United States Patent Application Publication US 2006/0134663 A1 - sequence listing, part 36

SEQ ID NO: 61353 - DNA, 340000 bp, Homo Sapiens
agtctatgataatttgttctagcagcctgaatagactaagacactagctcatgtaataatcaaatgaagtcagcaggaagctctgctccatgtagtcattcagggatgcagtgtcctgccatcttgtgatagcagcatgttctaaggcttcatcttcctctacattaagccagtgataggagcatgaagaactgcatgtgagaaggttccatgggccaagactcgaagttgtgtgcaacacttacctcccaattccattgacatgaattcaggcacatcaaaccccactgtactgatctgttctcacattactataaggaaatacccaagactgggtaatttataaaggaaagaggcttaattgacccacagttccacatggctggggaggcctcaggaaacttacaatcatggtggaaggcgaaggggaagcaaggcaccttcgtcacaaggtggcaggaagaagaataaccaatggagaaacttgccaaacataaaaccatcagatctcatgagaattcacccactatcacaagagcaacatggggagaccgccccataattcggtcacctctacctggtctctcccttgacatatggggattatggggatcacaattccaggtaagattttgggtggggacacagcaaaaccatatcacccaccatcccaccaccaccacctattggccactgcaaagaaatatggaaaatgtgtgcctagaaattagtggaaattagtctggtaaacaatcagctcatctcaagttccagccacagaacatcatagctctttctccctgcttatgtttcttcactctgctggatcaaatgagctaataactgaggaaataacaaaacaaagtattaaattctgactactttccaatggcctaaacaactcatagagtcttaattctttttgtgaaatttaaatcctgaaaatatttaggtaaatcaatttctcattctaataactatttcataataaattggctaatttgttctggtggttttgatgaccaggcaatgtaaaatactggaaatctaattttttgtttctcagaaatgtacaaatactgcctcactccacatttttgttaatctgatgagagattggcatttgagtttaagaacctctctagactgaggccagtgctctggggcctggagacttggccacagattcgaaggttttttggtgagttataggaatggaactgaatgtgcatgcccttggggtaggagtgccctcatcagggaaactacagagttacctccttctcctcatctcaaagactatgaagtgagtctttgaggccagacaggtaatctacttgtcctccttttgggagttccagatacacacagggcacattttcctgccagactctgtttaattctccatgctgcactgcactgtccttttactaactgcatgcatccccaagcttacaccaggaaattcatttagggagggtctcagataagacttctcttaatattctgtgaatttagtctatctcagtcagcctctgtttctaataaatgccttctactctaaacagatttgaaattattccgtttatctcactgtcagcttttgtccaagatcctgttcagttatagactgccatacacaaggtaagaataattcaaaagtttcagagacctataaaggtactgaaggattaagaaaaattgacacaaattccaaaggaaaaagactcaaaaagaatttttcacatcatggtcccctaaatttctgcataccatcaacttagctgttttttttttaacagtacagattcctgagccccattgttatggtctgaatgcttgcatctccccaaaattcatatgtggaaactttatcaccaatgcaatgatattagcaggtggggactttgggagttgatcaggtcatgaggtcagaacccttgtaaatgagattaatgtcctcataaaagagatctgagggagtctgcccctctcatcatgtgaggacacaagtagaaagtgctatctctgaattaggaagtaggccctcactagacaccaaatctgccagtgccttgctcttagactttccagccttcagaactgtgagcaataagtttctgttgtatataagccacccctgtttgttatcacagcccaaaaggaccaaggcacccactatatacctataaattcacattctcttaaggatagagctgggattcggaatttttaaacaaattccccaggtgattttaattcatgttaaagctgagaatcatgaaagaaaaggctaattatgaatcaaaagaaggttgtgagggtcacttgatgaaatatctgtgtcttgagagagaacatctggcacatgtttgcagaggtttgatgtctgtatgttatcattataatatgagcagcatatggatgactatgaagagaaagagggaggtgctccttcctcctgcatcaacctgtcatctcaggaaaagcctgatgtcctgatagataacccataaatagtgagctgggtgattcacttaagcatatcctgaaggacaccatgccctatccctgcttcatacataaaagattagacagagggagaagaggatatgaggggacaactgcctctttcttaacatttccctgagagtggagggggaagaacattgaccttgtcctacctccttcaaaggtttgacccaaataactctctcataaagtttgagggtatttcagttatctgttgctatgtaacaaaccacccccaaaacaaagtggctcaaaataacaatgttatctccatggttctatcaattgacaatgttcagtcagatggccttatttggtatttttcatatagcatcagtcaggtggcagctggatttggagatcactaaaggttcatgggccatgcatgtaaaatggctcactcatatgactaggaattgatgctgagtgtcagcctggagctcagctggggttgtcaagcacagaacatgtatgtggcctctccatttggcatgagcttccaacagcattggttggggcatggcaagtctgaaaaggactgatccaagagcaagtcctcttgtgaactagtctcataagtcccagaacatcccttctgattcattctactagttaagcatgttgcttgggccaatccaaatccaagagaagaagaaataggctcctgttcttaataaggggtgtggtaaagtcatattggaaaagaacattaagggtgagagatattgtcgctgccatcttttgaaaatatgattttctatagaatgtggctctgaaatatggtacagagattgtttttgtttttccaccaagggaacttggaagaaaatgcaaaaggtacccaagattctgaggatgggctaatacaaatccaaaaggtggtacagaaagtagcactgggggccgggcgcagtggctcacccctgtaatcccagcactttgggaggctgaggtgggctgatcacagggtcaagagatcgagactatcctggccaacatggtgaaaccccatctctactaaaaaaaaaaaaaaaaaaaaaaaaacatacaaaaaaattagctgggcatggtggcacgtgcctgtagtcccagctactcaggaggctgaagcaggagaattgcttgaaactggaaggcagaggttgcagtgagctgagatcgcaccactgcattccagcctgggcaacaacagcgaaactccatctcaaaaaaaaaaaaaaaaagaaaaagaaagtagcactgggggaattctgaggggccaaccaaaaactccacccaacgtcacctccctatggttcattatgccttggaattatagcagagggaacaaaggctggaaccacgcattgcctgtaagaattccccaggggcgagggttgagggctgcagaaggccaccctgcagacctcttacatgaagtgaatggacaccacaaccatacacacacataccccattctgacagcaaagaccaacacaaaaggccctcctccacctctcctttccactcaggcttgggatgcactgagtagtgctcagaggatgcacaggcattagggcaagaacaagagggagtgattgtaacagaaagatcaaactttccctcttctctaccatgttccttgaagctgagctgaagaccattatgggggatagtgattcttgaatgtgactgaatatttactctacatgagacttgagagtgtaattaccagattataatgcaaatcactagtcagaactgaatttatcagcagaggctgagatttcttaatggtgttttatacttttgcctctttgcatacctccttcccattcagaagtccctggaaaatgttaggaacttgaaaaattatgacagcagcttaaaaataattattccatgtttggacattactaagatgctcagattgctcctgctaactttatgtatgtaaatacttttttgaaataaagcatttgacccactttccactggaaaaatcctgagagttaaacctaatagttgcaccagaggtggttctttggcaaaaagtaggttatgtatggggtgttttggctcaatagaaatacctattttatcctggcaatagagctgtgtgatcatttataaatgtctgtccttgtcactagtctgtaagatccctgaggacagggaccaagtctgctttgcccattactgattgcatctctagcactaaacttggtgcctctcacaggaaaggtattcaggtaaggtttgttaaatgaataattaaattaagttgatgagtcaaagaagcccagaactctagcagtagaagagacttttgagatcatttagttcaaccttgatcttctatgttgtgattctgagatccacagacattaaagaacccactcaccataaagaagtatgtcaatggcagagcaagaagcaaaactcaggtctcttgtctctgaattcagggatttccaaaacatactgtgttttcttttatttatttatttttatttattatactttaagttttagggtacatgtgcacaacgtgcaggttagctacatatgtatacatgtgccatgttggtgtgctgcacccagtaactcgtcatttaacattaggtatatctcctaatgctatccctccccgctccccccaccccacaacaggccctggtgtgtgatgttccccttcctgtgtccatgtgttctcatggttcaatttccacctatgagtgagaacatgcagtgtttggttttttgtccttgcgatagtttgctgagaatgatggtttccagtttcatccacgtccctacaaaggacatgactgtgttttcttctctacgccacggtacagcagaagagctaagcactaaccagaatctggctctgtctccaaggcagtatcaatatttccttgcttttcccctctccccttaaagtcatatcacttagctaaattaaaagaggaagctcataagtagaatagaatgttcacaaaaactaaacccatctagaaggaaagaatgagggtggaaagggggctctcgtctgacccgattaagaaataagtatagggtacactaaagaatcaaaacatatcacctcagtgaacaaacctttgatcgtttattcattcaacaatattcactgagcatctacattgtgacagacactgttttaggaactggaaagaggtaacaaataagacaaagtcgtttcccacaagtagagtatattctagttcgggaggcagaaataaacaactacatgaacagtagaatttctgagagtgataagtaattggaagtaaataaatgttatgctgggatacaggataactgctgggagagggtctcctttggaagagatgatcaggaaggcttttcaaaggcggtaacattttatttggagtctacaaagggaaggaacttgccatgctaagcactaaggaaatataccagaggccaagggaacaacaaatgctaaggttcaggggcaataagaatttgaaggaagtggagaagaaaatcaaggcaaaggaaacagctcaaggaaaagcaaaataataaaataataaaatttttactttttttaaaataacaaaagtttaaaagcatgaaactacatggcatgtttggaaacaaataattcaaatatatgcatgggaatgaggtcagaaaccaaggctgggaggctataaagaacatctgaaattctagattttattcttcagacaatgggaaatcaagagaaatgttgaaatggatgaatgcaggaaatgcactgaagtgtaaagaggcagggagttcagacaaaaaacattgccagccaggcgcggtggctcacgcctgtaatcccagcactttgggagtccaaggcgggtggatcacaaggtcaggagttcgagactagcctggccaacatagtgaaaccccgtctctactaaaaatacaaaaattagctgggcgtggtggcaggtgcctgtaatagcagctacctgggaggctgaggcaggagaatcgtttgaaccagggaggcaggggttgcagtgagccaagatcatgccattgcactccagcctgggcgacagggtaagactccatctcaaaaaaaaaaatgccatggtccgtttaatattggaggcagaatcagcatagtggtattggtcatggaaaggaatagagagaattaagagacagtcagaggtggaagcataatgtatgaagtgaccaattagatataggagttgagagagggaaggagtcagaaaactttacgggtttccaaattgggcaatgggggaatggaagtacctatagccaacatcttggggagcaactgtgtgagatgagttcaggtgaggttgtacctggaggtcagacatcttggaatattagagaggggtgtctagccaactattcagagttgaagtctagtcttgagaaggaagaggtaaagatgtagatttggaagtcctcggcatataaaggggagttgaatccatgggggtgaatgatgttaactcagaagatgaaaggggcttgaggaaacagacagctgagaagaggctatgaaagatatgcagaagagaactttaggggatgatttcatttaaatggagagacgacaaaaaagaaccatcaaaggatgctaaaggtgggtacagagtggtagtggggaaagtgattgaatgagagaagcagcaaggaatcaagaatgtcaaaaatattgtcaagaggagaggagaccgtagttggaattgtgtaattattatttctgtggaccaagtaaatcttattcaggaagatagttagagctacattgctattctggaaataagtataaattgtgctagtcaaagcgcatagttttatgctccaataaaatctttgccagctgtcaaataccagtcactttaaaacataataaagacctatttcacagtgagaagtattccttttccccccagactccatgcaaattatggataaagaatgtagcaatttaataaatcactgtacttttgaacttagccataagaagaaactaccagaagtgtgatttagaagaaaaactataaaaaatattctacttattgttgaactgaatcaaggcttttatggaaataaatgtgatggtagtttatcaaaaagagggtacttgaaacagaatagaaataaaacagaataaagtagtgttatttcacttctaaacattgtcacttgaatagaccattgtctatggatttttaattgtaagttgcaatttgagttcaatcaaaattaatacctatcacaagaatgatttcatttttgtctcctctgtataattaccaaattgatataatatcttgcatagagcattatcacgaaggtcagaccatcttctttcaaaacactttgttttccttggaatctctctatatcaaccacctcagagaatctctggtaatgtcattacagagaaatagaaaataaagtctgccatgttattaacatgccattattttgcaaaagagaaaagtttaatagaaatttaaataaaagaaataggtggggatgggaagaaaaaccatatcaaaatgtgaaaatcaagtaagacaacttgttcaaattccaacagtccacaacataccacattatacctgtcttataaattttcccctaagcgtggaatagaaaattaaattaccacatttctgtgatttaagatctttggatttgatttgaatagctgtatttctgaagttgcttcattacattttttcctatggaggtaaagtttttattttcagaattattcacaccatatttttagtcccctaagatcttaaaatgcaaacagtggttgctgactttattaaaacataagaaaagttaggtaatatttatgatactgttgatcacctacccaacaatatttcttccctctttcctttcagagtgttgattttatttaggcattcactctcccctcttcactggggaaatcccgattagcctaagccattcttgggcatgtcattgcccaggaaaccaacaccaggatgaacctatgacctaagttgacccaatcagattggaaagaagggcttatagtttcttccttttctttcttttttcctttctttctctcttttcttcctcccttccttccttccttcctccctccctcccttccttcttttctgtctttctttcctgctggacatgaacaaggaagcatgaagtcccagctgtcacagacagtcatcttgctcccatgaggggaacccactttagaattaaaaatggcaaagcagaaatatagaaataaactaaattcttgaggactccattaagctattgttcattccacctgaaacccactttaccctttagactaccagaaataaaagaaaataaataacattatttattttcatttgagttgaggtttagccttcttaagacataaaccagattatcctgagataaaagaccacagcatttatttcccagtcttgaagggatgaagtgaaaaaatcagcagaaaccagcagatggccaagaaagtgatccctagataccctcattgctcattagcctaagatactcccacgagtgccatgacagtttacaaatgccaggcaattacctgggagttactgaccctttctgtggcattgacccaaaagttactgttcctttcctagaaagttctgaatcacccacccctcaatttgcattaaccctccccttaatttgcatgtaattgaaagtgggtgtgattataaagagagatgccaagagtccatacattgccaactctcggcacacttcatgtgagttagccctgctccacaaggagcagtactggtcactaaaggatgtctaacaccactggctcatccttaaaaatatttcctgggtgaaggctaaaaccctccaaggctaaatcccaattctgggacttgcctgtcctgcatcaatattgcttgtttaacattctccaatgtcttccaccatactcagaagaaaacccaaactgcttactctggataacaaagccctgcaagatctctcccttcaaactccttgaacccatgaccacccactctctccttcatgcactagactccaactaaactggtccagctccttgttcccaatttaaggatccttgtcctagctattcaacccaactggaaggctcatccttctaatacttttatgactaatgtcttcttttcattccgatctttttttaaaaggaaacaacctcacagggacctccctcaagcacccatattaaaatcgcttctcagtcaattgcgtatcacttctgcacaacatttcttaacatccgacaagtttcttgtttgtttacagtctcagctgcccacaagaataaataaatgaaagcattgctgcttccacagaaatcttggacccctgatacaagcactgatttgtgtttagttcattggactataaagagttttgaaatctcaattgtcacctggactaggtctaatgcatgcactagcaacaaaaccagatattattgagaaattatgtaagcctaaatgatcatgaaaaatgtatctggctctatgattagcaaaagaaaaaactgtaaactatctttttatcccttgaagtcattagctttaagtcaaaaagactaatgaaataaaacaacttcaaacgctaacctatatgcaaactgtgtttaccaactggaattattgttgaccaatggtatttgaaagtcactaacaaaaatgatgtgacaattgtcaaatgagcagaaagtacagcaaccatgaagaggaagatctgataaaactctgagaaaacatgtggatttgagtcacagaacattgcactggtctcactgtcttcttgaaggccgatcagaacaggttcgtacaatgaaagagcatttagtaagttatggatcgtgggccatatccttataggccattaatttgttaatttcaaaaacagcacagtgttttgtgcaactaagtatactgtctgcctgcacagagtctaaaaaatgttgaagtctactaacagctttcatggttatctccagcattttctttctttctctgcttagttactcactttggaagggaaggatactgaaggataacctctgacaagtagtatctttttttggtggtagaaaggcacaaaagttagagatccataaagctattttttcaccagcactctaagtcaaggaaagcataagaattgtttctgagcagatgttctctcccgtggaacttgccaggacagagtttctactgtctcgaaaaaaataaaacacacattttaatgtatttctcttaacgtctcattttcagtgctgtccaaacaaaaacctggctacaggttcagacttactgaaacaagtcaatgaaatctgcttggaattcatagttttagcataaagcacccaattttagaaaagtggttctgcacattaggttaatacattaagttagttgttttctgcaatagggttattgtagatacctaaaaacagaggtttggcagcctagaattccttatgccaaggatacaaaatgctggatataaaatccaatttccacctgcttacttgaatatctattttgaccaggtatgtaaaagacatgtacttgctgaaaatgttgtcttttacgctcaccactcacttcatgctgcttaaatatccatctttaatgaactcacctggaaactaattcactttgaaagcaaatatttaccaaaaaaatctgaggccaatagatgggtattatagaaaaaattacatgtgttctcaaagcacattttgagcctaatatacctttaaaatacccctctttttctattaaaatattatgacaaaatgttctactgttggaaaatacccaagtcccctcctctatttgtctattctatttttcactaatttcaatgaatacaataagttttttattttgaatttgttttgaacaaactagtatagggcaaaaaatgaacaaatgaaaactatgtggttagctgcctgaggtaattgcttgtaaatgtgatagtgtctaactgcataaaaatttgctataaataagaaaaaaataaatctgactctaagtagttttaaaaatccatttgaattcatcaaggagaataggaaatacattttcttttccaaatccatctcaattgaattaaaaactctttgagggcaggaagcagctcagactggtgggtaaaaccttggaaatttgaaataagacaactcaggatagtagcccaggtatttaaaccactgtgtgacctctgccaggtttcttattctctctaggcttgaatttcccaactgtaagataaggataataatatctacttcataggattgtggtgtgaattaaagatctgagcatctgactcatggtacgctccaagtcagtactagctctctgatatttcccaaaacacacagctcaggtatttacatactggatactcaatgactgtttcctaaatgaaataaaattaaatgttatttccactctataaaatatctgcatttatataagaaataactacaattaataggacttttggcaacttttgattcttataacttgagattgcttctactttctcatttgtacatatcctatcttactcctagccccaaaccaaaatgtaaaatttgtgcacgattagaatctatttaaatgtatgaaaagtcatactttaaatatccaactgagttttgtcaggaaaataaagtcaaaatcaacattatgagaaaaatgaattaaatatacaaattcaggctacacaaatagaggatgcagcaatgaaggtttagaaaatgatggccgaggtatctcttaactagggggggaagccatttatctctagaaagttcaagaaactgacacaacccaagaagtggaccttgtggaaaattctagaaaccacatcctttgccacaacctatagaaaacacggtctggggaagtccaaaaaagtaccacaaccactaacggcttgtggagaggtctaaaaaccagctgcacctaacaatcaggacagtcccaggataacagcttccacttcatttgcaacttccaaatcccactcaaatccctcttgtgggtgaattctaacccagcaccacttaggaataagaacatagggaaatacagtcctcagccttagacagggctcttggtggtggtgccacattgaaaacaaccaacctagcacagtccatgcaatacccttgttaactcattgactcaacatccatcctactactaaaaccatctttaatttccaaataaagacaatgacaacatcaggcctccacctaaactaatgcaacctatcatttacacgaccaaagacatactaatcatctgcctcacaaaggaggcaaagagtccacatgccactgttaattctttctaaatacaaagcaagataagcccatcaaccaaaggcaatatagtacaaggacttaagtgtcagaaagaccaagggtcaaatcttagctcttttacttgaccattgtgtaactttgataaattacataactctctgatccttcatttcttcaagagaaaaatgaaaaacacctaccttctaagactactgtaaacatttacaataatatttgtgacaattctgtttcatagtaagtgctcaacaagtaattagcctttatcaatatctattttaagtggcatggatagagtaacatttcttgctgatcattttttgtcatgcagcatattacattcatgttttctcaacattatattaaacggttttcatacacaactatgtatgtttttctattgtaaaaacttcctaaaacaaacatcagctgaaatttcctaatttaaatgaccaatttcttgatcctgcttaggttaaacagatctgcataaagatacagaaaagtgattgaacagtcaagaggtagcagcaaaccctaagaaaaaggaaggtcaaagaactgaattatatacaagttacctgatcagctcctaaataatagaaaatttactgtttatccaaaaggacagcagtcctatttacctaaattatgccaagagtgacttcagagaggaattagctttcacttctacaaagatctaacccatgagtttgtaactttaatattctgacttcatgtcaaaggagaaaaatctcaactcaattatcctaccagaaaacacaaattggttgacattggcagactacaacaacaccatgaaaattgtaactgcagagaaaagacaaaacaaaaaaacctctggaagtcagaacacttgagattcatatcctcataacttggaaggttattcttttgtttggacaaagaatactggagttttttaaatgtttgtacttcaactcatccatacttatgatataatccccaaaaagcagccagcaacccaaacctttaaggctgccaaccaggaaaaataacttagcacaacaatgatcttttctaaccataaataatggtatcttgggccaagcttcctagatagacttggattgaaacagctctttaccctagggctattaactgtataacatggatattgagaggaaaaaggcaaaaagaaaaaatgcaaaggaataaaattaattcttaaaatacctcaaattttgaataaatggggacatggacttcttgaatggtagttctgtgaattaagacaagccatttcttggtatgtgtgcagaaatcctagaagttgtgggatgcttgaaattatgtttatgactccaaaactcaagtgtgcatgtcaaatataggttgtagggacagatctcaactaatctctgtatggtatttggctctaacaccaaaataataggacctaaaagagaaacaacattaaagtcctaccatccaaaacccaaacaattttgtaactaggatactaataaaagaataactggagcctctagagttccagtagctcagtttggttagaggctacttcaaaggatattaaaaatgcccgaaaccaatagagtgggaaagttggcttgagggccctaagaaaatgcatagaacagaattctgattcagtggggctcctgatgaggtagcagaggaataaatacaacccacttcaagttaagatgaagcctaggtgcccattttaaattgccctaaaatagagctgaaaggtcttctgcctgtgcaattgccatgttgaagacctttgttctgcctgcaggaggttgtaatctggtcctgctattctgactccttttgactaaaaacaaatgacatgtaaacaaatacagcttccatgttacactggcatgattttaatgtcatatttaccaatctcatatgagctatttgcctaagattcaattagactttaagaaatcgtattatatcgttgacttgtcccaagctcatgactgacaaaaaacctcttgtccttttcatgtaaattaatgttaaggcacatcttgtctgctgcatatgctgaatctttagattcattgtagcactttacgttaattgctattacatttcatcttgttaaacctggtcacttattttacctgcgtctgatctcgattctgccctccaatatattagctaaagttccaaagtccatgttaactatttgtttcctatggccaccaacagtgttgagtaggtataatctcaaacatttgctgcatgtaaccagctacttcctgactgtcaaaaatattgattgcttttcttagatacaaactatcagtcaaaactttacaaattctcctgaatacattatcatcctgacatttttctttttgtccacaaagatattctctccatatctgtctgataaactagtttctgatatacattttcctaatcaatcagcctagaagctttattcaataaagaaatttggaaaatttgaaaagccttgttctacatgatttaataataacccactgcaagcgcttcagctttctcaaagagttcaaaagataccttctaattaacctgttagagcattttgttccaaatggacaatcaagttcctcaatctgtatcaaaatatttttatcagttcagaattttgataaccattttagcagcatttgcccatttctcatttttcagcacctttatcttcatcccaggcattttaaaagtgccaaaagaagtgaagaagctcattgccacattttctgttcaagaggaaaggtagaaaccaaagagaactatttgagtatgaaattcccttccatattcatataccctggactcaacattgcaatataatgaaaaattaaaatgggttagacttgaagatttggggtatacttctaacaaaagagaaataggtaatgagacatctcatgcttagcccaaaggataccattattttccacaatccactaaccaaatatctccatatcagataaggtaagtcctctaacctagttattcatcttcagtattgcctgggctatctttggtctcttgcctttcacacaaattttagaattatcctaacaatatagttacacatacatatgtgcaagcacataaaaaagtgctagaatttttattgggatggcactgaacctaaatcaatttggggagaattgaaatactgaagagattatagctttctatttattagatcctttttaaatttttctcaataatgtgttgtagttttctgtatagaggttttgcacaacttttaatagacttattcctggtattcagtatttttatattattgttcatggtattatttttaacttttaatctttcatttgtttttttctagagtgtaaaataaaactgatcaagctgaaatacaatgactttgctaaactcacaaatcaattctcataatttatcacttaatttttggatttttctacctaaaacttaatatcatctgtgaataattataattttgttaatctttatagtttttacttctttttattgccttctggaaatgataaaaaaacttccactaacatgttgaacagtaaattgggcaagctttacttgttcctaatctcaaaggcaaagttcttactattttacttttacataaaatgttagctggaggatttggggtaactcttctttatcagattgtgaattttttctatataaactatctatactaagaatttttaatcataaattttctcaaattattttatatatttataatatttttatcttttgttttttaatgtgatggactacattggtttatgatcaaattttaaactaatctcgcattcctagaacataaaaaaacttaattgtggtgtaatatattgttatatttggttagtgattattttgtttaggagttttggaccattgttaatatgtgagattgtcctgtaatttttcttcctttgtctggttttaaaatcaaagtttggagaacatcataaaatgagatggctgattgttcccctattactattttttggaagaatttgtaaatgatggccattaagcctttttaaaaaatgggacagaactcaatagtgaagctatgtgagcctgaagttatctttgaacgaagtattcaaatatgaaccaattgtttaatacttaaagaaccacttacatactctacttttttaaggccagtttggtaaatttttttctagaaataggtccatttcttctaaatttccaagtttattggacttgggttgttaaaaatatcttacctttctcatctctatcagttctatggttatttactgacattatttgtgccttctctattttttcctcatcattcttcccaggagcttaccaactttattaatccttcaaaataactaattactggctttgtattttcttctatctttgatgtctaattaatttatggtatctttctgattttctaaagtttctgccatcttcgtatttcactttttgttctttttctaacttcttgagctggacacataaatttctaattgcaccttcatcttttctcaaatatttagttaaggctctaaatgttcctctaaggactactttatttataactactttatttatgcaatatttcactataattttatcatatcattaatttttaaatatatgggattttaacagcactgtgatcagagaaactatatttttcaattttgtgattatgctaatgactaaaagtgctaggttttgctgtctctgtcttaacatcagcaatgaaaataacatatatatgtatgcaaatatatatatatatatgttctcttttcttgaggaagctcatgctgagtctcttgtatttcatttcctggttctaatgaagttcttttactcatatttcccctccaccttaagaactcttcattcctctagcccagcactctctgatggaactttacgtgatgacagaaacgttctgtatctccactgtccaatacagtagccagtagccacgtgtggctattgagtgcttgaaatgtgactagtgtaactgagaaacagtttttatattttatttatgtttaattaactaaatttacatctaagtaaccaaagtgagtagaagctaccacattgaacagcacaagtggaatcatcccattctctctctgttagttaggatgtagtcaggaagaagttatttgaacagagagaaagtaccataaataattgttaactaagtatacattttgttaattagagaaaaagagagactctaaggcatcacagaagtggcaactgggtgaagcaactgtcatctctagagctgagggaaggaaataaacaatctgaaatattaaacttagaagcttggggaagaggcccatgaagcaggagcagatctctgaaagggaaatgagggtgggcgggagagggtcacgctgatacgtgtaaactgtacactacaagctgtattcagcttgtcacatcctgaaagaattgctgctgccaagctgaaggaatgttgctgatgccccactgatagacttttgctctcacaggaaccaactggaaggagcaggtttgtcatctgcctccagtcatgcagcctccctctttccccctccgctggctgagtctaacaggaagcatttcacaaagcaaaaaggtggctttcagagtccaggtccaggcaccatgaagccaatcacagaagggtgtgttcaaagttaagaacccaaaaccaactaatatggtttggctgtgtccccacccaaatctcatcttgaattgtagttcctataattctcgtgtgtcgtgggagggacccagtgggaggtaattggatcgtggagatggttactcccatgctgctgttctcgtaatagtgagtgacttcttatgagatctgatgattttataaggggcttttccctctttttctctgcacttctccttcttgccatcatgtgaagaaggacgtgcttgctacccttccaccatgactgtaagtttcctgaggcctccccagccttgcagaactgtgagtcaattaaacttctttcctttataaattacccagtctcaggtatgtctttattagcaacatgagaacagactgatacaccgacatactctcttatctgtttctccattctcccctcctcttgctttccccaagcccaatcttaactgctccctaagagaaaaagcatacctctgagaaccttccagcacctccagcactgatccagtttcttagatctttgtttcaacttcagtgggagataaagagagaaataatctctcaatggagagtgaaaaaacgagaagagaatacccaaagaataatctgatgtaaagatataactctaccatgctgttttcatattttgataaagacgctggaagaaagacataatttcctactaaaagagaaatgagaaagtgcaatgataagtgtagtgaagtcacagaaacaagtagggactgtggaggacacatgcctgtctaaagagggcagcagccatccagccagcctgggactgcagtgcggtaatgtgagcccagtgttcccagatctcctaattttttgagagatgccagaaatctggatttttatgtgaaagcatccaatttcataatgttggctcaggaaagttttaaacattgtaccagccaaatgaaacactgcgatgggccaaatccagcctgtgggccatggtttgggacttctgcagtgcagcatgtggacaaaaggggctctgcagcaatgatatatggacctcaattatcccatcacatggcccatcggcaagaacagactagttcaacattaggtgccaactttaattttaatgcaatgttggttacttgggatgggttcctctctgttcctgtctctggccgctctctccgtcttttttgttatcgtcattgaagacgttaggacaaagtccgtctaacctagcactgtcagccactaccatgatcactcacttcaatgtggagttaatttaaaatgaacactttggaggaaataaattgtataaatgaaacatataatcattattctgagggtttggcatttacttcaagagagcgggcatctctttagtttgtaagagcaagagtccatcagcgggacatgtagttgaatatgcaaactgaaggcaaattgaaatagactaacaccgatgtatatacatacatacgcattgtacatatagtatgctcatatataaagcttcattgtctttggcaaaaacttttttacagctctattacaaaacaataaagtatattgcaaaataaaacgtgtagacattaaaactggaattagttttatatgtgtttacatttgtcaaatcttttagtaagttctttgatgcttgattctttcatttgtttgagtataagaaaatcttttacccatatggaagctttacacatattcctaagccacatggaatagacactttgacttgtatgcaaaagatttgtggtctttgcaaagccattataatttctcttttggtacaattgaaaccataaataaatatatgtacatgcattgtataaattgtgtcatatgtttctgggtatcttacttgctcttattctagaaaaataaatcactacataggcccacactttgaaggagcagtggattttatcaaatacaatatttctctttcttctttctctaccttcacccaactcaaattagcactttacttacactaccatcaaccatctgtactacagtttattcttataaaatagggatagtgcagagtattgaaagcatgactttttcctcctaaaactttgccttttaaaaaatatatatatattgtaagctaaagagaaaagataatcactctactagaattctagcagactataccttcaggtccttctctatgtgcactacatttgaaataattcctgcatgcttcagtctctaataataattatttcacaggttgaaatgctcagaaaggaaaataaattagacctttagattacagtagcattactatatgattaataaatgctagtttttgatactcaagaggggtagattttgttcagaagattactttggttttaaaaattaatatttattataagttaaaagtttgtaagactaattcactcctaagcttttcaattcaacatacaaatcttactccatttatagctccagttacttttaaagaggcttataggccaggcacagtggctcacgcctataatcccaacactttgggaggccaaggcaggtagatcgcttgagcctaggagttcagcaccagcttgggcaacatggtaagtcctcatttctactaaacataaaaaaaaaaaaaattagccaggagtggcggcatgcacctatgggtctcagctactcaggatgtcttgagtctgggaggttgaggctgtggtgagacgtcgcgatctcatcactgcactccagcctgggtgacagagagagaccctattccaaaagtaaataaatctaaaaaagattaatttataaacacatttgaaaacttatttatatttctttttttttttttttttttttttactttttaattttcttttttttttttttaatttttttttttttttattatagtctaagttttagggtacatcacactctggggactgtggtggggtcgggggaggggggagggatagcattgggagatatacctaatgctagatgacacgttagtgggtgcagcgcaccaacatggcacatgtatacatatgtaactaacatggcaatcattaaaaagtcaggcaacaacaggtgctggagaggatgtggagaaataggaacacttttacactgttggtgggactgtaaactagttcaaccattgtggaagtcggtgtggcgattcctcagggatctagaactagaaataccatttgacccagccatcccattactgggtatatacccaaaggactataaatcatgttgctataaagacacatgcacacgtatgtttattgcggcactattcacaatagcaaagacttggaaccaacccaaatgtccaacaatgatagactggattatatttctttaaatattttaagttgcatttatatatttgggtacttcattgtccattttttaaaaaaaatagccttgccaactgcttatgtaattcttctctataaaataaacttataaatctgagggacatcaatttctcttacattttctaatattattaataaacttctgtcttgaccttaaaatcacaattctaaattgattatgcatgatgcatattttaaattagaatctatttctaacattgcaaatggtcctcaacttaggacctacgttgttccctcatgtccctggacttttgagtttgtttccatttgtctcagctttgaaaggaagcagattggaaggaaggaagatttcttcttactctgtctcccatttatcttttcttcggtatttaggaaaatgtgtgactttggtgagaaatttacagaatttattttctcatttaatcattagattccctttgcagtatacatttaagattctttaaagtagttgtctgttcaatttttactatacacttaatactagaaaaggagtttaggttgctaatacatgcctttggagaatccaacatgcaaacaagaaaatatacacttctggcaatgtggtcttcttcagtttggcagataaatagacttagcactttcagaatatcaaactagtttcacaccatgttgaagagagacatgaatgattagatgattagatctactactggaaacagttaagaatctgtcctccacttaatcattaataacagaggagggcaggttttcctatagatttgtaatatatttgcctagattggagcaaaaggtagaagggtaataaatagcttagcagcttttttggaattagatatctcttgatatatataaatcctgtttaaccactcatctaaccataatgtgttctgaggaaagactagaaaatatagtcgttagttctcatctggtcacttggacttactatacaaaagacagagaaattcatttcagagatttctatattatgggaacaaatagaaaaaactagttgttatgcagtaatctgaaagtattttttcttcaaagaaacagaagtcatgaggtatggagcccaggacaacagaatttggaatcataaaactatggctcaaatgttggttctatcacctagctatgcaactttgtaaagacctaatcatcttgttcgtaaaggaagataataattttcctgtagacttgttattagaaataaagataatatatataaaatgtctcagagtaggtcctgatgaaatatatgctcttattttacataatttttaaattgctatttctccctgtgcgagctgtatctcattgtcatgaactcatggaatatataaacatgtgttgttttgacagatttttattccaatgatgtgctttgctaaaaagtatataatccaccatcaggtttctgggttaaagtgaaatgagaagccataatttgtgtttctttgatgaaagaattagaatatgggaaaaaagtattctaaaccaaaactatgagaatgggggaaagagagaataaagaagcaaatattgcagcagattgtccttcactctcaagaatgtgtcgaatacacattttgcttctgaaatctggaatctttctgctctaggtggaaatcagactgcttttctaggagtatttatgttgtttcatgatgtgattatttcacattgcatcattgcatgcctctatcaaaacatctcatgtaactcataaaatatacacctactatgcacctacagaagttaaaaataaaaagttacaaaagtaaaagagggtgaaattcatttaaaaacactattctagaggcaacaacagaggggtcaaggaaacaagttctgaaatccatcttctcattggtatggcctcctagctgtgggatctgagttacgaatgtgtgatcctttgtgatccttcaagtaaggttaataataatcactacctcatagagttgttgggagtattaaatgaattaatacatggaaagtgttcaggatggcacctggcatatactaatatttattaagtattcattgttattactgctaatcaacccaacagcaaacgagaaaaaactcgtactctgtctgggaaacacagaagtcctttgggggaaaatttagtatcaagaacaatcctgagagtgttctaggtcctggtcaaatctcgttataagccaattttcccccttttcagcattttcaaccaggttaagtcaaattagaacaaacattaaagataaccttaaataaggcactaaaggcatcttgaaatctaacagaaatgtggaaaaaggaatttagagtaccatattttatcccagttttgctgtgctgttattggatgtatctttcagcttttgctgcaataatgctgcataagaagcaataccaaaatctcattgacttataacaactgaaatttgtttgtcacacatggatctgtgaggtagccatggtgactatgctccaggctatatatctggttcctgttcctcagtctaagacttataacatcgctcaaaggctgatgcagctgtagccacctaaagaagtttttatcatggcagagggaaggaacacaagagaaaaaaagcaacgacataaacaaattgaaaaccttatttgaacaggaagtaggtcacttctgctcacatttcattgaccaaaataaatcacatgaccaggtccaatagctatgtaacaaggaagtacatgcctcctgtgctggtatggtcgagggcagtatttgctgaacaataatacaatcaatcacacttgccaaactaccagggttccatccatcaaattcaagacatatactgaccacttcaattaaccgtgtattagtgatataggtctcaaatgttgaagagcatcaaaatcacctggggaaattgttaaaaagtataaatgacctggccttcccacagtgattctaatgtaatgcatttgaggatgggacctaggatctgtattgttaccaatctcatcaataatcccatcatacaccaaagtttgagaatcactggtttgcagaaagctatgcctagagattaggacaagtcactattcagagcaggtgcctactttttgacttgctgtcccagggaagaagggaagatgacacaacaacattcccacttgtagaaagaagagaataaactgggctgggtgcagtggttcatgcctgtaatccagcactttgggaggccaaggtgggccaatcacttgaggtcaggagtttgagaccatcctggtcaacatggtgaaaccctgtctttaccaaaaatacaaaaattagccagatgtggtggtacacatatgtaatcctagcaactcgggagggtgaagcaggaaaatctcttgaacccaagaggcgggggctgcagtgagccgagatcacaccactgcacttcagcctgggtgacagagtgagactcaaaaaaggaagagaataaactgaagtttctgatggattggatgttggctcccaattatttcccctctgtgttttcatatctttgccatttgactttgcagttcctcccactgtttccctaccttgtggttagacttaaccatgtgactcacttggccagtgagatgtgggcgaagtaacagagtgccagttccaagcttaaaccgtgttcctgcttaccctcttgatctgtaccttgagaacagcttttcctggtagctgctgccagtccagacaggaccccagagttacacattgaccagcctaagcccaagcaagaagccaagcccagctggacccaacttgaatcagagctttttagccaagagcagttagatcaatccatctccatatgaaatccatacacatgaaagaaaaactgattgcaattttgagccaatggatttgggggtgacttgtcactcagcaaaagctaactcataacctctccccagttttagcattatttgggtagcaggagtgggaactcatgctccctacattgaaaaggggctcagactttaagcaaaataattttcctaattttatgaaacattaaggatatatactactaggaagtattctcatctgaattcacagtgtgtcatttatttgaatatacctgaagaacgaagcatatgaatgtagaagagtgaaataagagaaaataggaatatttaggtcatataacagcatcattttttttttcaaaatagaaacagattgttgtacagaatccagcaatcctggtggaaatactctgcaatggaagcatgttttccattaacttaaatattgtgttaacctcaatcaaaaatatactttcttaaactaaatacagaatttatagttttgagaaacagagcctacagtctaaatgggcaaaggaactgatgcaaatgactctgtcccacatgattaaaaatattcttagttttattttgtaaaaatgaaattaaaacctaaaatagaatttattctgtcactcaaccaaacatttagccatgtgtggtatcttttacatctccagagtccattttcttttctcattgctgtgtactgtcttgaggccataaggacacggtttctctctattcaataaaactactcaagaaaaacttctcacacacagacagcctctatcatctcaagactcttggaggctgacattgcaaggcagatctttctactaagctagtgaatctgagaagtattgtcagagctctgtcctgttagaaagtgtattagtccgttttcacactgctacaaagaacttccctgagactgggtaatttataaagcaaagaggtttaattgactcacagttccacatggctggggaggcctcaggaaacttacagttgtggcggaaggctaaggaggcatgtcttacatggcagcaggcaagagagagcatgtgaaaaaggaactgtcgaatgcttataaaactgtcagatcttggtgtgaactctctcactattacaagacagcatgggaggaaccaccctcatgatccaatcacctcccaccaagtccttccttcgacacatggggattatggggattacaatttgagatgagatttggttggggacacagagtcaaactatatcaaagaaagtgatgcaacaggtaatatattgtatatctgagttgcactctgggcttttgggcttaatgggagtgtcttgctatgaagaagaaagatgtatggaacaaggaggggcaagagccttcacgggaggctcaggcctcagagactgcagccagctttggatcttgcctgtgatccatgtatttctcctgtacttcatctttgccttttgagggaccaaacaaatgtggaaacttaatcacgtcttcgaaagaaagtgagaacaggcagtggtgggagagaagcagtgcactgttggaagaaagagtaaaggtccaaataaatcctgtctgaaaacccaaggtaataaagtgggccctaatcatgagaggaagatttcaggttaacgctaccatgcatcctccttttgcaggcaacctcttcctctggctgctagaaaaggaagaatcctcttcatatatccagccttagaggtgagcaaagaccaactctgtattcatttgacatgaaatcaaacatttctgggactagaagaagtgatttcccagcccagaagactatgatgataaatacaacctggattactgcagtgtggtaggagtggggtgggcaaataacctggtgtttataacgtgtttagaagactcagagtgcttgatgctaattcccaagaagctgagtttcgtatagcaatgccagggatatcatcattccataaatctcgtttacacccttagtcactaggaagcttggcttttttattacatctgacggttgcttccacaatcataaacatgatcctctgaatcatttccactctttgaaaatgttagttttaatgtcacacgtaaattctgccatagcactaatattcacaatttaatttgcaaaacctttaatccaatatatggtctcccctatcatttcgctggaaaacagaaaattgtgaaattctgtgacttattcactctacagtggagcagaacaactcaagacccatcaatcacatgaccagtcataggcaagtttaaagtacacgttgtttttcaatcaccagagcacattagatagtaggctcttttgcaaagcaaactcccaaaaaaagaaacataggcttaaatagttatcattctcattaaacatttgtctagttctctcttcacttgaaacagatgttaaatcatttggaacttccctttgctgagtcctgtcctccacagaggcttgttctctgtctctttctcaccctctgtcttcctcaggttaacaactgccccaagtaccaatctataagggatactgcctatcactgggtgttaaatttccactggaaatttaagatgtagaaaatggtattgaccataatattttccaaggagaggactgcatatgtttacaaagagagctttaagtcatttgtagccaaaaagactcttgaggtgaatcctagaattgcaaataaatgtttgctcctctgccctgtcagaaatgtgcaaggctcctgtttggtagaaaagaacatgcaagttttggggcctgagctgaatttctccattaatagagaagaaagcgggctctccaggaggtggtctttctcctcttgttccccaaccagtgtacacccctcctttaaattaaatgtagagagaatatttaaagacaatggtttaaggtggtgctgtattagtaggctatccaagacacttgtatgactcaaagcaaccaaatgccctgctctttttctcttcttgacgctgctctctctttccatttttcttgacttgttttaatttaaaaattaaaaatgtaattcttccctcacagatgtgagctaagtctcagctcttccttttatctcccaactcctgattcaactaagcaaacaaaaaataccttccttttctattcttccttctacatgataaacgcaaaaagaaggaaggcagagagagagagaaagaaaaaaaataaaaaaagagagaaagaaaaagaaagagaaagaaagaaagaaagaaagaaagagaaaggagagagggagggaggaaggaaagaaagaaaagagaagagagagaaagagagagggaggaaggaagaaagaaaggaaggaagcaaagaaggaaggagggaaggaaagaaaaagaggaaggaaggaaggaagggagggagagagggaggggaagggagagaaagaaaaacagaaagaagaaaggatgaaagggggaagaaagaaagattgtctagaaaaatgcatgatagtgttttagcaatcattcaaatgaatcattcataactgttttctccaatcagaaatttgtctgattcagaaaatttagaagtatttaaagaaaagaaatttgtctgacactacttctctttacattgctgaaagtggatttaaatctactttctcactccaaaaataaacttcagataaatttatattctcagcaacattccaaactcaaacacttagctcacatataacccacatatatggtcatatgaatatatgacttgaaaaagctacataagtgaaaaatgcataaaatgaatagtttctcttgcattataatcaacaatgtccttcaaggtttgaggacaaaacattcgttaaaattaaccactcagataactcagatggtagtgtcagatttaaatctactttctcactccaaaaataaacttcagataaatttatattctcagcaacattccaaactcaaacacttagctcacatataacccacatatatggtcatatgaatatatgacttgaaaaagctacataagtgaaaaatgcataaaatgaatagtttctcttgcattataatcaacaatgtccttcaaggtttgaggacaaaacattcgttaaaattaaccactcagataactcagatggtagtgtcagaggcatttgaaccagagcaactccatcttaaatagaagctgggtaaaatgaggctgaaacctactgggctgcattccctgagggttaaggcattctaagtcacaggatgagatacgaagtcagcaaaagatacaggtcacaaagaccttgctgataaaacacgctgcagtaaagaagccggccaaaacccactaaaagcaagatggcgacaagagtattctctggtcatcctcattgctacactcccattagcgccatgacagtttacagatgccatggcaacatcaggaagttaccccatatggtctaaaaaggggaggcatgaataatccactccttgtttagcatatcatcaagaaataaccataaaaaattggcaaccagcagccctcaggactgctctatggagtagccattcttttatacctttactttcctaatacacttgctttcactttatagacttgtcctgaattctttctcgctcaagatccaagaaccctgtcttggagtctggatctggacccccttctggtaacagcagccccagtcaaagactctcaaaagcataactcattcagaggtaggcagacagaatgagactcccagggagcttgtcctgcttctctggagttaaatggaaggctcacttcatgatctcactccttgattgcccaactgcattaattttttctggttttagttctttttgtctccagatctgagcactcaccttgagaactctttgctagacccagtatgttagtccattcctgctgctgtcacaaaatatcttagactgggtaaatcataaaaaatttatttctcacagttctggaaactgggaagtcccaggtcaaggtggtggcaagttcagtatatagtggaggccctgtttctcacagatggtgctttctctgtgtcctcacatggccaaaaaggcaaggcagctcgcttcaacctcttttataagagcattaatcccacccatgaaagtggagtcctcatgacttaatcacttcccaaaaggccccaccctttaatactattgaattgggagttaggtttcaacatatgaattctgggggcacatcaacatttagatcatagcacccagtaactaaatgattcattagctacctaaggacctacgggctaaaacacattggtaaattatagtaaacttatgcttactgtgtgattttagcacatttaccaagtgcttccaaacaactggcttatttgtccatgtcttcctcatacaagatagaacaagtaaacttattcctcttttatgtacaatgattacggaagtgaaatagcaaccttttgctgctttaaacaatacatttattcaaacatgataataaaaatgaaaaatggatcaatcctaaaagataataaatgaatacatctcaagttggcaattcacaaattatgtcaggcagagcacagcctgactcatcaacccctcccagtgtccctattttgaaaactcgtgatctaactgttattaagtgttttgaatatctaaagtgactgccaacaagactgtcagcagtagggcaggatatccatcattggcaacaaaaagagggcaagttgaacacaaatgttacaagacagagacagaacagggaacattttaaccttgctcagggcatgcccttagaaactataaggattgatgatgcatcaagattaatttgatgacttgcatttcaaccaagagggcagattttcaggaacgcatattctgacttggagctgggaaaggcacaaaccctgggcccagtccatctttggggactgagaacagagagttgagaactcatcttactaataattcctgcaatattggagtgtgtgtttttaacttggagtcagacacacttttcctcacccgcagagtggacagtaaaagtaatccagaatgttgcatctgtgttagctcttcttagaagggcctggagctgctacaggaagtttctcatttggaattatgaagttctttcttctcttgggccactttctcttgcaagtccagctgggcattaccctgccccgtggaatttactccaacacagaatccttcatgcttaaccccaattccactgtctgggccttcggagtcagagccaaagctcagcagcagataaagtacaaaagctagcaaggtagaatttgaagcaaactgccctggtgtatggtttttagggctgccataacaaactaccacagactgggtggcttcaactacagaaatttattgtttaacaattctggaggctgaaatcctgatatcaaggtgtcaacaaggttgatttctcctgaggcctctgtctttagctggtagattcctgtgtctacacatggtagtccctctgtgtgtgtctacgttctaatctcctcattttgtgaagacaccagtcagcttggattagggcccacaataggacctcattttaatttaattaccccttcaaagaccctatttccaaatacagtcactttctgaggtaccagggggttaggacttcaacaggagctgatcataatcacaaaagacacaatcccaaatatcatcatcttgaaatcctgaaagatcaaaatcctgaaaatacagagacagccaggtgggagggggtcccgagagaaactccaactggcctgcacactgggaggagcatgcactggggtgtagccacagaagttcgcgcctttgcagcagcgaggagcctggcccctcctcttcctgggtggtacccaggattcaatctgtgaggcaggaagcacactagcggaccctggctttgtggagggtccctatttcccctttttcccccttttgcccaataaattccattattctcacccttcaaattgtctgtgagcctaattttttatggccatgtggcaaggacccacatctttagtggaactaaggagagagtcctacaacaatataattctggaaaaaatgacttttaaaattctttaagatggagccaagatggccgaataggaacagctccagtctacagctcccagcgtgagcgacgcaaaagatgggtgatttctgcatttccaactgaagtaccgggttcatctcactggggagtgtcagaaagtgggtgcaggacagtgggtgcagcacaccaagtgtgagctgaagcagggcaaggcatcgcctcacccggtaagcgcaaggggtcagggaattccctttcctagtcaaagaaaggggtgacagacagcacctggaaaatcgggtcacctccaccctaatactgtgcttttccaacagtcttagcaaacggcacaacagaagattatatcccacgcctggctcggagggtcctacacccacggagccttgctccttgttagcacagcactctgagatcaaactgcaaggtggcagcgaggctgggggacgggtgtccaccattgccgaggcttgagtaggtaaacaaagcggctgggaagctcgaactgggtggagcccaccacagctcaaggaggcctgcctggctctgtagactccacctctgggggcagggcatagccaaacaaaaggcagcagtatcctctgcagacttaaatgtccctgtctgacagctttgaagagactagtggttctcccagcacgcagctggagatctgagaacggacagactgcctcctcaagtgggtccctgacccccgagtagcctaactgggaggcaccccccagtaggggcagactgacacctcacacggctgggtattcctctgagacaaaacttccagaggaacaatcaggcagcaacatttgctgttcaccaatattcgctgttctgcagcctccgctgctgatacccaggcaaacagcgtctggagtggacctccagcaaactccaaaagatatgcagctgagggtcctgagtgttagaaggaaaactaacaaacagaaaggacatccacaccaaaaccccatctgtacgtcaccatcatcaaagaccaaaggtagataaaaccacaaagatggggaaaaaacagcagaaaaactggaaactctaaaaatcagagcgcctctcctcctccaaaggaatgcagctcctcaccagcaatggaacaaagctggatggagaatgactttaacaagttgagagaagaaggcttcagacgatcaaactactctgagctaaagggggaagtttgaacccatggcaaagaagttaaaaacctggaaaaaaattagacaaatggctaactagaataaccaatgcagagaagtccttaaaggacctgatggagctgaaaaccaaggcatgagaactacatgatgaatgcataagcctcagtagctgatttgatcaactggaagaaagggtctcagtgatggaatatcatatgaacgaaatgaaacgagaagagaagtttagagaaaaaagaataaaaacaaacgaacaaagcctccaagaaatatgggactatgtgaaaagaccaaatctacgtctgattggtgtacctgaaactgacggggagaatggaaccaagctggaaaacactctgcaggatattacccaggagaacttccccaatctagcaaggcgggccaacattcaaattcaggaaatacagagaacaccacaaagatactcctcaagaagagctactccaagacacataattgtcagattcaccaaagttgaaatgaaggaacaaatgttaagggcagccagagagaaaggtcgggtaacccacaaagggaagcccatcagactaacagcagatctctcagcagaaactctacaagccagaagagagtgggggccaatgtccaacattcttaaagaaaagaattttcaacccagaatttcatatccagccaaactaagcttcataagtgaaggagaaataaaatcctttacagacaagcaaatgctgagagattttgttaccaccaggcctgccctaaaagagttcctgaaggaagcactaaacatggaaaggaataaccggtaccagtcactgcaaaaacatgccaaattgtaaagaccatcaaggctaggaagaaaacgcatcaactaatgagcaaaataaccagctaacatcataatggcaggatcaaattcacacatgacaatattaaccttaaatgtaaatgggctaaatgctccaattaaaagacacagactggcaaattggataaagagtcaagacccatcagtgtgctgtattcaggaaacccatctcacatgcagagacacatatgggctcaaaataaagggatggaggaagatctaccaagcaaatggaaaacaaaaaaaggcaggggttgcaatcctagtctcagataaaacagactttaaaccacaaagatcaaaagagacaaagaaggccattacataatggtaaagggatcaattcaacaagaagagttaactattctaaatatatatgcatccaacacaagagcacccagattcataaagcaagtccttagaggcctacaaggagacttagactcccacacaatactaatactaatggtagactttaacaccccactgtcaacattagacagatcaacgagacagacagtcaacaaggaaatccaggaattgaactcagctccgcaccaagaggacctaatagacatctacagaactctccaccccaaatcaacagaatatacattcttctcagcaccacatcgcacttattccaaaattgaccacatagttggaagcaaagcactcctcagcaaatgtaaaagaacagaaattataacaaactgtctctcagaccacagtgcaatcgaactagaactcaggattaagaaactcactcaaaaccactcaactacatggaaactgaacaacctgctcctgaatgactattgggtacataacgaaatgaaggcagaaataaagatgttctttgaaaccaatgagaacaaagacacaacataccagaatctctgggacacattcaaagcagtgtgtagagggaaatttatagcactaaatgcccacaagagaaagcaggaaagatctaaaattgacaccctaacatcacaattaaaagaactagagaagcaagggcaaacacattcaaaagctagcagaaggcaagaaataactaagatcagagcagaactgaaggaaatagagacataaaaaaccctttaaaaaatcaatgaatccaggagctggttttttgaaaagattgacaaaattgatagactgctagcaagactaataaagaagaaaagagagaagaatcaaatagatgcaataaaaaatgacaaaggggatatcaccatcaatcccacagaaatacaaactatcatcagagaatactagaaacacctctacacaaataaattagaaagtctagaagaaatggataaattcctcgacacatacaccctcccaagactaaaccaggaagaagtggaatcgctgaatagatcaataacaggctctgaaattgaggcaataattaatagtttaccaaccaaaaaaagtccaggaccagaaggattcacagccagattgtgtcagaggtacaaggaggagctggtaccattccttctgaaactattccaataaatagaaaaagagggaatcctccctaactcattttatgaggccagcatcatcctgataccaaagccgggcagagacacaaccaaaaaagagaattttagaccaatatccctgatgaacattgatgcaaaaatcctcaataaaatactggcaaaccgaatccagcagcacatcaaaaagcttaaccaccatgatcaagagggcttcatccctgggatgcaaggctggttcaacatatgcaaatcaataaacgtaatccagcatataaacagaaccaacgacaaaaaccatacgattatctcaatggatgcagaaaaggcctttgacaaaattcaacaacccttcatgctaaaaactctcaataaattaggtattgatgggacgtatctcaaaataataagagctatttatgacaaaaccacagccaatatcatactgaatgggcaaaaactggaagcaatccctttgaaaactggcacaagacagggatgccctctctcaccactcctattcaacatagtgttggaagttctggccagggcaattaggcaggagaaggaaataaagggcattcaattaggaaaagaggaagtcaaattgtccctgtttgcagatgacataattgtatatctagaaaaccccatcatctcagcccaaaatctccttaagctgataagcaacttcagcaaagtctcaggatacaaaatcagtgtgaaaaatcacaagcattcttatacaccaataagagacaaacagagaaccaaatcatgagtgaactcccattcacaattgcttcaaagagaataaaatacctaggaatccaatttacaagggatgtgaaggacctcttcaaggagaactacaaaccactgctcaatgaaataaaagaggatacaaacaaatggaagaacattccatgctcatgggtaggaagaatcaatatcgtgaaaatggccatactgcccaaggtaatttatagattcaatgccatccccatcaagctaccaatgactttcttcacagaattggaaaaaaatactttaaagttcatatggaccaaaaaaaagcctgcattgctaagtcaatcctaagccaaaagaacaaagctggaggcatcacgctacctgacttcaaaccacactacaaggctatagtaaccaaaacagcatggtactggtaccaaaacagagatatagaccaatggaacagaacagagccctcagaaataatgccgcatatttacaactatctgatttttgacaaacctgacaaaaacaagcaatggggaaatgattccctatttaataaatggtgctgggagaactggctagccatatgtagaaagctgaaactggatcccttccttacaccttatacaaaaattaattcaagatggattaaagacttatatgttagacctaaaaccatgaaaaccctagaagaaaacctaggcaataccattcaggacataggcatgagcaaggacttcatgtctaaaacaccaaaagcaatggcaacaaaagacaaaattgacaaataggatctaattaaactaaagagcttctgcacagcaaaagaaactaccatcagagtgaacaggcaacctacagaatgggagaaaatttttgcaatctactcatctgacaaagggctaatatccagaatctacaatgaactcaaacaaatttacaagaaaaaaacaaacaaccccatcaaaaagtgggtgaaggatatgaacagacacttctcaaaagaagacatttgtgcagccaaaagacacatgaaaaaatgctcaccatcactggccatcagagaaatgcaaatcaaaaccacaatgagataccatctcacaccagttagaatggtgatcattaaaaagtcaggaaacaacaggtgctggagaggatgtggagaaataggaacacttttacactgttggtgggactgtaaactagttcaaccattgtggaagtcggtgtggcgattcctcagggatctagaactagaaataccatttgacccagccatcccattactgggtatatacccaaaggattataaatcatgctgctataaagacacatgcacacgtatatttattgtggcactattcacaatagcaacgacttggaaccaagccaaatgtccaacaatgatagactggattaagaaaatgtggcacatatacaccatggaatactatgcagccataaaaaatgatgagttcatgtcctttgtagggacatggatgaaactggaaaccatcattctcagcaaactatcgcaaggacaaaaaaccaaacaccgcatgttctcactcataggtaggaattgaacaatgagaacacatggacacaggaaggggaacatcacacactggggcctgtgtagggggagcggggagggatagcattaggagatatacctaatgttaaatgacaagttaatgggtgcagcacaccaacatggcacatgtatacatatgtaacaaacctgcacgttgtgcacgttgtgcacatgtaccctaaaacttaaagtataataaaaaaattaaattaaaaaataaaaataaaataaaattctttaaaatatttctatattatatttatgattatatttatattatattttaaaggggatttatttcagaaacacacaaacacaagagaacacttcataagccactttacacaataaaataggtaatagtaacatacacattttggcaagcataaacactgaggtatactaataacagtcacacaggtataacaattatgagcagatgaacaatattcataaagaaataggtcaaaaagcaaaatgtatgaacgcttatcactatggctggtaactgtgtgcacccagctttataactgcagtcatctgaaacactgtgatgaacaacccaagtcttttgataagattaatccaaaaccatgatgggtcactgccgcgtcatcactgtaagtagcccaaagagccagtatctcgagaaattttatctttcacaaatgcaaatgtacaaaaaggatatctcttatataacatttttacatacacgcacaatgtttacacacctagtcaacattgtgatgatgcacgttcatggaatcacatttgtaaaaaattacataaaacaaattagaactctctgaaagtcttaatacaatttacatctccagtgttagcgattatgaaaaggtgaaatatatagcacagcatattgtaaaaaataatgccaacaattttaaatagtgaaaaacactaaaaataaaagaaaatttaacatgaaaaaacacattgcaaagaaagactgtgagcaattgcacacagacagcccctaaaagctaactttcataatcactaactatattctgaagtctggcatcatgagaagcttctttttatcttttgggatatgtatctccttggagaatatgttgacatttattttctatgtggcactgctctttttaaaattactgtataattcaatagacaccaacataagcattcccatcttaaactattaaactctcccatcttctgtgctatgcttatatgttgttttggatactcagaaatccattccacatgcacctatatgcagaccacaaatttggcagaaacaatactggtgattcaacagcaacaccattgtgtgtttccttatcctaccgtgcacataattattctcaaacactaagtaacttctctggcttcttcagccaaatgcagctttaattctttaaaatctggaatgttgtcagctaggaaggaatgtcaatgcaggcaaatgacacattttttaaactgaagttttcactggaccaattcatccatctgaatttccctccaaatgcactaggctaaacggaaaaacaaacttcattagtaataccttgaaattcacttttataatcctttatgacacctaatttcgagtctgtcattacggtttgggaattcaattgaaatccatttccttctgcataaagactacaaggtaatagttcaacctgacatgatgcaaccatcctgtgactgtgactttcatcattttagacataagggatattatactgcagggattttcatcatttgggatttcatcatttgagattacggcattcaggattgtgtctttcagaattatgatccaaacctgacatcaacacgtgaatgggggatgcacaatcccacccatagtacttgggaactccagtggaccatgggctcacttgagctccaagctcctgggtcgaacatccaactgcccttcctcaccttgatgaccaagtacctgtgagatcagctctattctacaaggaatggttatgcacacttagatttctagtggccaccaaaaagatttaaatggtgtaaaaagtaaacaaagtcagacactagttaaagaggtaaagacagattttcatcagtaatgtactattgcaatagggaaatgagttctgcatgaaccgaagtcaacttcaatttgtggagaggtgactggtgttttaaagggagaatgagagagttgggagggggcaggtattagagtcagggaagtaaaaaaaacctacaaaaaacagaaatagggaatcggttcatgtgaagtatctcaggatgcaagacttcagaatatagttagtgatcataaaagtcagctcttaggggctacctatatgcaattgccttgccatatgttttccatatgttagattttccttttttaagtctttttcactattttaaattgttggcattattttgtacaatacactatgatatgtatttcatcttttcaactgatcatgagcctttatgtcccaaaagccagtataccagaaaggacaggaagttgaagttgaagaacagcaagactttcatcagaaagtcacaaagagccacagtgatgactccctcttttttaaactttagctaaaggctgtggtaaagtggaaaaggaaaaatatattaagaaagcagaagatttaagaccccactgactctcaaaccaaaacaaagcccatcgttgcaaacttacagaagccagtttggttatgcacacttagatttctagtggtcaccaaaaaggttgaaatggtgtcaagaataaacaaagccggatgctaaagaggtaaggacagattttcatcagtaatgtactattgcaataaggaaacatgttctgtataaactgaactcagcttcaatttggagggaggtgactgttgttttaaagggagaatgagagagtagggagggggcaggtattagagtcagggaagtaaaaaattacaaaaaaaacagaaacagggaattggttcatgtaaaatccacacaactttgctaactggagcttatcagagttaggctccttccctcccacagaggctgggagacagggtccctgtattcaggtgttggctgaaacaaacagtacatccttgtgacagccttgagtgttctcaggcaagcattttatatgtgggtttagggtcattcttaggaacactactttgagctattagaaactatattagtgagtgttcaagtctttatatgccaggctgaggcctagtcaagaagagggctccaaagagcctggctagagtttggtgaaggagagaatctgttatagtgaaaatttactactctcccacacctcaccattaggttttttgttttttgtttttttgtttttgttgttgttgttgttgctgtttgttttttgagatggcgttgtgctcttgttgcccaggctggagtgcaatggcgcaatctcagctcaccacaacctctgcctcccaggttcaagcgactctcctgcctcagcctcccaagtagctgggattactggcacccaccactgtgcccggctaatttttgtatttttagtagacatggggtttcactgtgttggccaggctggtctcgaactcctgacctcgtgatcctcccacctcagcctcccaaagtgctgcaattacaggagtgagccaccacacctggccaccattaggttttaataaaaacaaatctcagcataaatttctttatatagacagacatgtagtagcaactattcattagcaagaaagcataaaagagtttatactatttgttctgtgtgctggatgaacgctttttaggtggcccagggatgaaacattcagttgaaatagacactgtgagatttccaaggcaggattctgtgcttacacagcaccatgcagtcagaaattctcctaagtcaacatctggattgaagggaatcaaaccatgactgtcatccttaaaaatatcaggtcaggccttcgtgcatttttatactctttttaaaaaggatggagagactctgaactattttagccaatccatatgttcaaaatatgtttaatttcatcagtgagagccaaagcctatttctaacatccatcaggctaatcaacaaacactagattcagcaatggaaacccaaatttggaattgatatgctagttcatagagtatcagaggttgaacaaaaggatataataaagggcatgtatcagctgtttccacagtgggcccctctcacattataccccctgccacatctgaactgtgctgccctgctagcattctatctggccacatataaagttaatgccttagctaaagtttgctcatgctgtatgtactttaaagtaaattacagagattgtaatacatgtcttatacaaagctgaaccatggcaatggcaaacatactgcacctggggctaggacccctggattctgattttagggcacccaccttggacacaccgtctctttggacctcattttcctcgtctagaaaataaatggattgacttaggtcacatttctcaaatttgtcctacagaaacttagggttttgtggaggaaattcaggaatcctacaaacctgtgatatacatttttatatcatttatttgcagtgtgtttttaaagaaaaaaagagaaagtatgatgtacatgtcagcatagcatgcacacacccagcaaaattcaacagagtagacttagtgctaccagaccaacttgtttttttcaatcttagaataaagcttctctaaccatatctgtaaatgatatataaagatactataaacatgtgattgagaaagtagattgtaactcaaccttttttgttgttaaatttaggcccatgcatgtcaactcatgtaaaagtacgtgacaagggacatgactaagatacaggtaatgtacttggcttaatgccaggaaaagcttaaggatggaggccttcatcacagcatagttgtcagttatgcaatagaaaggaaaggcccaacattttgtgcatttattgtaagttcttgttaaaatttgactctttaattttaaggctagatgcattgtaagtcttggggtctttttacctaactgtttcttttccccaggtaagaaaaataaatccttctaaagctgaaaattgatatgaatcactggttaaaaataaagcttccaagaagatttgttgatggatatggtgaatggatgtggctcaagttaaactgtcaaaatgcctgatgatcaccagctgatttttcaaccaggattccattcacaactgcacgtcaaatgaaggaaacctctctcaaactgcataacacaacttgaagacaataaagaatgagagtacattgcccattcattgagagtacattcaatgggttcgagtgaaattcttcaaaataattttgccttcaaatatactccagtgtaaatctgaaacaaaacatagtgaacatacaacataaactcagatttttcaacagtaattgaacaatttataggaaacatatgcaaacaatacttacatctaacaacaaaaatgcattaacttttatcttcagatgctgctctgtggcaggtctgggaaaacctgttagaaaaagtttattatatcctggactcttgataccagcatgtcaactagagtgcatgcatgatgaagcagggactttgcttggttaactgcttatctccaggatctaggatgacacatactaggttctcaataaatgttgttgaatgaataaatgaatgagtaagttgatacaaaaatatacttagcattattatcagagctgagagaagaattcagatatgtacactacagatgcgtaaaaatttattctaagaaatgtttatgctatgactaaagaagcagtagattttcatggctgtctccattttgtttacttttatataatatgcccatataaacaaatacaatgaaaatatatccctagtaaaatacagaacacacacacaacaggagagggaatctttaaatgcatagacaggagatctacaagtggtgatatgtgggccaaatccagccatgcccattaattgacgtattgttcatatgctgtcaggctacaatggcagagttaaatatctgcaacagagacaatatggcacacaaagctgaaaatatttactgtctggccttgtacagggagagtctgcccaccccggtgtagataaagtataacataccatcaattaagaaaaaatgtaatgacaattataccaaaaagtagttataaaatggcagaaaaaaatcaaaggagtatcttctaaaagctattgccaaagtgattgaggcattccttgtacattatgaacctgagcatccactataaagaatatcccgttaaaagccatgcttaataattccatgcaaattgtagatgttaagacataatcatttaatcacaaatgtcttagggttacagtaacaaaagcagccagttcaagaatttacttttttatacctacattttcactatccttagagaaatatttcagctaagaaaaaaataattttcttttttgtctttttttttcttaaaaagaaggttaagtacctttggtaagtatctttcaaatatcacaagaaggcaccagcatgtatatctcagtaattttttagccttcatatattatttgtgaaataaaatacaaacacataaaacaacacaaaacaaggtataaggcgatcacacctttggcaggcagaattctaaagacatcctcccaagattctagtcccctggttattcaatcaaacacactcacctaagtactgctgtgaagagacattgaagatggaactaaggatacttattaactgaccttaaaatagggagcttatcctgtattctcatatgggaccaatgtgatcacatgagcccttcaaagcagcagaggaaagcagaagagttgcaatagaaggagaactctgagagattcaaaacgaaaaagggactccgtttactgctgctgtttgaagatgaagggggcaatgtaggggtggccttaagaagctgagtatattagttcatttacacacggctaataaagacatacccaaaactgggtaatttataaaggaaagaggtttagtggattcacagttcctcatggctggggaggactgacaatcatggcagaaggcaaaggagaagcaaaggcacatcttacacagcggcaggcaagagagtttgtgtaggggaactcccatttataaaaccatcagatctagaaagacttattcactaccatgagaacagtatgagggaaactgcccccatgattcaattatctccacctggccctgctcttgacacatggggattattacaattcaaggtgagattcaggtaggggcacagccaaaccatatcactgagggagctcctagataatagccatcaataaaacagaatcctcagccttgcagcctcaagaaactgaattgtggcaatcatctgaatgaacttggaagtgagctcttgctcagaggccccagataagagcccagctgaccagcaatgtgattctagccttatgagactcatagcagagaagcaagtcaagctcacctggacttctgacctacagaaccatgagaaaataaattgtggtttttttaagcctctaagtttatagcaatttgttacagcaataatagagaacgaatacaatgcccttgacatcctcacctgaaccaagaagtagagctttgccagccacctagaagccccctctatgtgccccaactcaaatgcagccacctctttctccacaaagaaaccactctcttgcctttacagtatcttcaaagtaatttctttcttgcattgtatagtcttatcatcaaaatgataagccccagatattatgtataatttacctcaattttttagaaatcaacacgtctgttacttccaatatacagcatctccctccatctccttcttttccttacagtccatctgtgtaaaaacacagccattttaacctgtagagcttctctcggtcaggattttgttgattgatattcacagtgcaattcagcaagcttctcagtcctctctattttctgcaaattggcagctagatacagagtcttgatcaatctcagattgcatccctttgtcaaggttataggtgttgctgtacttctctccctttaggaggcacagaaggtctgattttcactctggtcatgacatcagcagctgaatacctagatcgtatttcatgtgtgttgcaaaatggtgataattctatcacttctttctcattcattcattggaatactcttgttaaagagatgcttcccctcatctactattgattacccagtgagacagttcatatgagagagggactgaacgcttgggtttttctctttccttttaaccagtttttgaaacaatgaattgattcagcatcttccaaagataatcaattaatttttaaatatctttatgaatttaaggatttaaatatctctgatggggttcactccacgtcagttaaaatccttattaaaagcccaaattgttccatttttggccagtgagttggcctcttcaagttggtttctgaagccttttctcatgaccctgatggtctctggtgggttccttgaaatctggcatgacaaggtgttacaggttgatcttatacatatactgcccccgagcctgcaatcagccatttctccaaaaagttctggttgcctcagtgggaaatagtatttcaatgccacaatctaggagctaggattaacgatattttaaaaattggaacaaactcaagttggcaagagatagtgatgttacgattcaacagcagataaagtgtcaacaaagatgtcagaatataaagcttggacccagcatagaatcaaatgtttactcttttgaaacaacctgtgaatatctaacaagacaacactggagatagctgaacattctttaaatgactttgttaaacatttcattatttcagaaaataatatgcattttcaccaacacaaactaaccaaaaaactgtttattggctctctccaaatttcaaagtttatcatacagaaatgcaggaagctactaaatcttactcattatttgactggaacaaatgttctactcttctttcaaccttcccaagtggtttagttaaagaatacaccagaatggtaaagtgcagtttaaaggccaaaattatagtcattaattaaaacccactttatctaaaagattgtatcacccatgttattcacagtactgttgacccatgagattccttgcaaccctggacattctatgattccatatgcattataaatttatttcagcaagagactattactcttactagtctcagcaagagactagtatccatgagatactaatggaagcaaaagaaagagatacaatcagggacaagaaaagcaactgtcctcaagaaatgcaattaatagtgtacagaaatgcaatctaaaaattaaaacaaaatatgaagctatatgcaatgattaaaaattctatcctaggaatatatatactgtatatgctttacaataaggaaagtaaagtaaaaatagaatatggaacaatattcatattttgataccattttctcttttaaataaaaacactataaaactaaccaaagaatctaaaaggaaataaaccaaaatgattaatagtatattttatttatttttgatatttttatgttgtagtgattgaatagtttttaaatattagtattttcatttcaataaaatacatttaaatgtaaaacatgatctatgcaaaaacttgtatatgaatgcttctagcagcattattcatgataaccaaaaagttcaaatcacctttcatcagctgatgaaaggatgaacaaagtgtggtatattcaaacaagaggctattattctacaataaaatggaaaaaagtatacactacaacatgatgaactttgaaaacattatactaagtcaaagaagccagtcacaaaaggccacattttgtatgcttccatctgcatgaaatgttcaaaataggcgaatccaaagtggcagaaaatagattagtgttttgccagcccctggaggagggggaggaatggggagtgactgctaattagtactgggtttctttgtggggtgatgaaaatattctggaattagatagtggtgatgattgcataacttcatgaaaatgctaacaaccattgaaatgtacactttaaaaggggggactttgtggtaatgaattatgtctccagtaaaaacttttaaaatatatgtataatgtagatggtaaaataattcattcaaaaaacatttactttttataaagctctatacagatgagaacaggagaggaactagagatctttacaaagaaggtggcatttgtgaggggttttaggcatagaagcgtgcaccatttgcccaagttttagcaagcatgacaaattattaaagctaatgtcatcatagtaataaggacttgggtactatgacttataacattttcaacctaacaaggattcacttttaagcccgatcaactggaggtgaaagttttctgccaagcccccaaaagaatgaggaatttttcaggttgtacatgtatttcttaaccaaaatctctgattctgcttcaacattttgattgctgcagcaataatgttaaaatgacacccgttaagcatgccgcagcctgccaaaatgaagtacatttttatcttttgggaatcacatcattttgtattcatagaacatgcaggaaagcatgctttcttctttatcatattaaagacagtgagccctcatcatttcagctggtttacctaactaacttgccttgaggataacagtgacacattggcaatctcatctagctatctaagatgcacatatatcacctcttatacactgccagaaagaaggaagaaagactctaattttgtctttcttaatcagtgtttagctgaattaaaattcaacatggatttttcacttctttacccacacaatcaagagagaattttttttcaaagtatttccaggaaaatgtacccatttaaaaatttatttacaaatgtatgagtagtagatagtacaaacaaagcattaaatgattaccaaatatatctgcttaaccattacaatgtaattacagaggcagtttcaaaagtacattgtcaaaggaagggtacctgtttgtaattattggcctggcctacagtttcttggacaattccattcctcaagcacactgggcattcataccaagtacactctgaggcttactttccgttttctcttgtttcttttaatggttacggtacatacttgccataaatagtagactacccaacatgtagaatttgctttgacctaatttgcaggaatgtcttataagtctgtgtgcaatatctatataactaacatacacatcatctttgaatgctctaagtactatgagaaaaacaacaaaaggaaggtacagaaaatcttagtatagcactaagaggtcatcaacattacaagctcttaaaattctttaaagcctccctccatcatttatggttgaagttctaagcccttaatgtggttctcaaaaccagccataatctggtccctgcctcactacactatcctctttcttcaactgtccttgacacactctacaatgtagttatacttgcatttcccaaatgttcaatttccctcctctatttttttttgtattttcttctctctgcctggaacatttatctcttcctggttcttggagtaattactttttcaagattcagggccggacgcagtggctcacgcctgtaatcctagcactttggaaggctgaggcgggaggatcacgaggtcaggagattggagatcaaggccatcctagctaacacggtgaaaccccgtctctactaaaaatacaaaaaattagccgggcgtggtggcgggcgcctatagtctcagctactcaggaggctgaggcaggagaatggcgtgaacccaggaggcggagcttgcagtgagccgagatggggtcactgcactccagcctgggcaacagagcgagactctgtctcaaaaaaaaaaaaaaaagattcaacattgtaaaactttgctgaactttctcctcctagctaggctgagtcaggtatgaaggccaatatgcgatcttttatcttgactttcttatgcccaaaatactgcctgatgcagttagtgcttaatatttttttctaaatgaacaaataatgaaccagtgaaaaaatatatatagcagcttgtcttagttcattcagactgctacaacaaaataccattgctatagtttgttttgtttaacccctccaaatctcatgttgaaatctgatccccatgttgaagatggggcctaatgacaggtatttgggttgtgggggcagatctctcataaatgacttggtgtgtgtattagtctgttctcacactgctaataaagacatacccaagactgggtaatttataaagaggaaacatttaattgactcagttcagcatagctagggaggcctcacaatcatggtggaaggtgaatgaggaacaaagtcatgtcttacatggaagcaggcaagagagcttgtgcaggggaactcccatttataaaaccatcatatctcatgagacttattcactaccatgagaaccgcccccatgattcaattatctccacctggccccacccttgacacgtggggattattacaattcacggtgagatttgggtagggacacagccaaaccatatcattctgcccccgccccctcccaaatctcatgtcctcaaatttcaaaaccaatcatgccttcccaatggtcccccaaagtaagtcttacttaactcatttcagcattaacttaaaagtccacagtccaaagtctcatctaagacaaggcaagtctcttccacctatgagcctgtaaaatcaaaagcaagttaattacttcccagatacaatgggggttgtatcagtccaatttcacactgctgataaagacatacccgagactcggtaatttttatatatatatataaaggttgaaggaactcacagttccacatggctgaggaggccccacaatcacagcaaaaggcaaaaggcacatcttactatggcagcaaacaagagagaatgagagccaagtgaaaggggtttccccttataaaaccatcagatcttataagacttattcactaccacaagaacagttttgtgggaaactgcccccatgattcaattatctcccatcaggtccctcccacaacacatgggaattatgggagctacaattcaagatgggatttgggcagggacacagccaaaccacaaccggggtacaggcattgggtaaatatacccattccaaatgaaagaagttggccaaaacaaagggctacaggccccacgtaagtctaaaattcaacagggcagtctttaaaccttaaagttccaaaataatctcctttgactccatgtctcgcatccaggttgcactgattcaagtggattcccatggtctcgggtagctctgcccctgtggctttgcagggtatagcccctctcctggctactttcatgggttgtcattgagtttctgtagcttttctaggcacacggtgcaagcagtctggatctaccattctggggtctagcggatggtggccttcttctcacagctcctctaagcagtgtcccagtaagaactctgtttgaggactcccatcccacatttccctttggcactgccctagcagaggttctccatgagggctctgcccctggaacacaactctacctagacatccaggaatttccatacatcctctgaaatctagacagaggttcccaaactgcatttcttgacctctgtacacctgcaggcccaacatcatgtgtaagccaccaaggcttggggtttgcaccctctgaagccacagcctgagctgtaccttggcctcttctagccatggctggaactgaggcagctgggacacggggcaccatgtccggaggctgcacacagcaggggagccctggacctggccaaggaaaacatttttttttctcctaggccttcaggcctgtaaggtgaagagctgctatgaaagtctctgacatgccctggagacattttccctgttgtcttggttattaacatttggttcctcattacttatgcaattttctgcagcaggcttgaatttctcccccagaaaatgggtttttcttttctactgcattttaagcctgcaaatttttcaaacttttatgatctgcttcctgttgaatgctttgctgcttagaaatttctttccccagataccctaaatgctctctctcaagtttaaaattccacagatctctagggcaagggcaaaatgctgccagtctctttgcatagcaagagggacctttactccagttcccaacaggttcctcatctccatctgagatcatcccagcctggaccttattgtccagatcactatcagcattttggtcaaaaccattcaacaagtctctaggaaattccaaactttcccacatctgcctgtcttcttctgagccctccaaactgttccaacctctgtctgttacccagttccagcgtgtcttcagagtaatgagtgacttctcactctattagtttccacaagagctagttgttgaaaagaagctgccaccttctttctctcttgccaggtaatctttgcacatattagctccccttcactttcaccatgagtggaagctccctgaagccctcatcaaaaacagatgctgtctccaggcttcttgtacagcctgcagaatcatgagcccaaaaaaaaaaaaaaaaaaaaatcttttctttaagaattacccagtctcgggtattcctttagcttacagtaatacaaacaaacagacaaccatagacacggtgacttgtaaacaatgggaatttatttctcacagttctggaggctggaagtccaagatcagggcagattcagtgtcttgtaagggcctgattctctggctcataaacagtgtctttttactgtgttctcacatggaagaggtgaacaagctcctgtgggcctcttctataaggagatggatctcactcatgaaggttcaaccctcctgattaaaccacctcacaaaggacccacttcttaatactattgtattgcagtttaactatcaatatatgaatttaggaaacacacgaagattcagaccatagcacatcatacaacttttagctggagcatgagctctggagccaactgtgtttgaatcactatgcaactacttactagctgtgtgctgttagaatgggctttttaacctctctttaactcaattttctcataaactggagagcagatatatatatataaagcctgcttcatagctttaaatcggttaaaatgaaaaattgtttaaaataatgttgagcacattacaaataatatgttagtgcttactgacattataattgtaattacttgtattacagcatacatgccaggaatacaaagacttggtcctatcccccctcaagcggagagattcttttttaaagaattatttaatttaaaaaaagaaagaaaagaaatgaggaatgactatgaaaatgtgtaactaatacagtaaaaccaacaaaagctgtaaataagatcaaaaaactgcaattttatgaaggattgaagtattacaaggctaagaaaaactaattttttctactccatctcctatgaactgtttgagcaaacatattttcactgattagatgttttcactgattagatattttcatgaatatattttctatgaactgtttgaacaaagacattttcactgattagatattttccctgattagatattttccctgactagatagatcaattatgtttttaaaaagacaaactatatcttgcatacctaccccgaccaaaccccacatgggtggcgaatgaaatccatcaccaaaacttatcagaattcacattatcccatggttttgcatattctttataagatcaaccaaaatgtaagcattcatgtgtttttttaatctctgaaatgttcacctcctaatattatttcatattttaattcatgcaaccattgctcaaattattgttggaagtcatctttctgaatggcctctagtagtaattcatgaaccaccagagaaaatctaaactatgctttttagttaaaattacccttttaatgaaatgctacatgactgtcttagtctgtttgtgttactattgcaaagtatcttagtctgaataatttataaacaacagaacttatttcttaccattctggatgctgagaattccaagagcaaggcacaaacagttttggtgtgtggtgagggcctgcttcctggttcacagatcgtgccttgtagctatgtccacatttaggaaaaatgaatacattgaaattgtccaaagattttgaagatattaagttgggtcaaaatttacaggtaagtttatcagtcagctgagtttgaattattttaggagaaagattaatgtgggaccaaacaaaaatttaacaagaagaatacatgattttttaaagtatcattggcattttagggtttgataaaggtaaaaataaaattgcattcactgaactttagttcgatttaagattttatcaaatttaagagaaatttgtttaccaagaagatataatcaataaaagggtggagtgccaagggcaggtataaaagtttttcattaaatatatttaaggaaaaagtttgcaagcacaaacatgtctgtcctcttttcaactttgagtttgttaacactgtgcaagaacagatggttcagatagggtttcgtcatgccccatgaaatgggaactgcaaacgcttgatttatgtgacaagaatccttactcagattaatttcattgaattttacaattaaatcactaaaatattaccatgttttccatatcatttagatttcttcaatacagtttaataaatttataccaattttctttccccaaaactaaatgctaaataaagcagcaactgatccttaaggtgagaaacagaccaacagtccctggccaacacagtgtttgagacttaacaaaacatccaggaggagaaatgcatccccagggtgtccccatctctcttcctcttcccaagtagtgacccccttcccctctcctcccaccagggaattggtgtcacccccactatgtagcttttcctattctgctttgcctctctaactttgttctctcaataatacctctattatgacaactgtcctcatcataatcaatggtatttgaagtattgttcacctcagaagaacacgtttccatttttaaacagtcatcaaaatattttgctttctcaaaaaacaaggggaattattaagatggatagactactagctagactaataaagaaaaaaagagagaatatccaaataaacacaatcagaaataaccatggggacattaccgccaaccccacagaaataatattttaaaaagccttcagagactactatgaacactgctatgcacgcaagctagaaaacctagaagaaatggataaattcctggaaatgcaaccttccaagattaaaccagaaataaactgaatctctgaacacaccaatgatgagttcagaaattgaatccgtaataaaaagcctaccaaccagaaaaagtccaggaccagaaagattcacagccaaattctaccagatgcataaagagctggtaccattcctattgaagctatttcagaaaattgaggaggaggggctcttccctaactcattgtatgaggccagtatcatcctgataccaaaagcttgcagaaacacacacacacacacaaagaacactttaggacaatatccctgatgaacatagatgcaaaaatcctcaacaaaatattaacaaactgaatccagtagcacatcagaaagctaacctaccaggatcaaggaggctttatccctgggatgcaaggttggttcaacatatgcaaaccaataactctaattaatcacataaacagaactaaaaacaaaaaccatatgattatctcaacagctgcagaaaaagcttttgataaactccaacatgccttcatgatgaaaaccctcaactaggcattgaaggaacatacttcaaaatagtaacagccatctatgacaaagccacagccaacatcatacagaatggccaaaagctggaagcattccccttggaaaccagaacaagacaagaatgccctctctctccactcctattcaacataatactagaagtccttgccagagcattcaggcaagagaaagatataaaaggcatccaaataggaggagaagaagtcaaactatccctctctgcagatatgattctatatacctagaaaactccatacctctgaccaaaaccccttgatctgataaacaacttcagcaaagtttcagtatacaaaattaatgtacaaaaatcagtatcattcctatacaccagcaacatataagctgagattcaaatcaagaatacaatcccattcacaatagccacacacacacatacacacacacacacacacacacacacacacacacacagacaaaacctagaaatatagctaaccagggtggtgaaagatttctacaatgagaattataaaacactgttcaaagaaatcagaggtgacataaacaaatggaaaaacatcccatgtgcatggataggaagaatcaatatcattaaaatggccatattgcccaaagcaatttacagattcaatgctattcctatcaaactaccaatgacattcttcatataattagaaaaaactattttgaaattcatatggaaccaaaaaagagctcaaatagccaaggcaaacctaagaaaaaaagagtaaactagaggcatcacatttctcaatttcagactgtactataagtctacagtaaccaaaacagcacggtaccactacaaaaacatatacacagaccaataaaagagaattgagagctgagaaataacgcagcacacctacaagcatctgatcttcaacaaagtcacaaaaacaagcaacaaagaaaggactccctatttaataaacggttctgggataactagctagccatatgcagaagattgaaactggacccctgcctattaccatatacaaaaaccaactcaagatggaataaagacttaaatgtaaaacctaaaactataaaaacccagatggtaacctaggaagtaccattctggaaataggacctggcaaagatcttatgacaaagatgccaaaagctattgcaacaaaaaaaaaaaattgacaaatgtgacctaattaaatttaagagcttcttcacagcaaaagaaactatcaacagactaaacagacaacctacagaatgggagaaaatatttgcaaactatgcatcagaatctataaggagcttaaatcaataagcataaaacatacaaccccattaaaacatgggcaaagaacatgaacaggcacttttcaaatgaagacacacacgcagccaacaagcatatgaaaaaatgttcagtgtctctaatcattagagaaatgcaaatcaaaaccacaatgagataccatctcacaccagtcagaatgactattatcaaaaagtcaataaataacagattctagtgagggtgcagggaaatggaaacacttatacacagctggtgggaatgtaaattatttcacacattgtggaaagcagtttggtgatttctcaaagatctcaaagcagaattaccattcaacccagcaatctcattatagggtatatacccaaaggaatataaatcattctaccataaagatacatgcacttgtatgttcattgcagcactattcccaataccaaagatgtggaatcaacctaaatgcccatcaatggtagactgggtaaacaaaatgtgtgacatatacacaatggaatactacacagccataaaaaaagaatgagatcatgtcctttgcagcaacatggatggagctggagatcattatcctaagtgaactagcacaggaacaaaaaagccaaataccatgttctcacttataagtggaagctaaacattgtgtacacatggacacaaagaagtgaacaacagacactggagcctacctgagggaaagagactaggaggaggatgagaatcaaaaacactacctatcaggtactgtgcttattacttggctggtgaaataatctttacaccaaaccctggcaacacacaatttacttatataacaaacctgcacatgtacccctgaaactaaaataaaagttaaaaaaaaaaggtgggggaaggatgattccctgtaggatcgctggctggacagatggggaggggatgcaataagcattattatcctggttttgcaggttaaggccagggagagaataaagccaacctcattaagcaccagatgtcaggcaccacattggaagtcttgcttcctttttctaacatagtctttacaataatgctccatgttactgacattgtattatgaaataagaagctcatgagaggaactaagcatcttttatctgctcatcctttatctatggataaagacaggctgaaaccccagacttctgttccagtgctctatccatgggtccaagccaaaggcagcacttccctgtggtagctgttactgtatttcatttcttacgttccacatcccttacattttatcagcatcctctggaacaggaaagaacattgtttttatagaagtacattcgtcccgtgtaaaatttattggatgctctgattcagagttacagaaaaaaaattacagtgtagtaacactatatttaatgaggtgttacatattttccatccttctcttggcattttagacattattctcttaggtcaggacaccaacatttcatgctgttttcgtggacttgaagcttacttgactatggttaatgctaattaatattgtgaacccatacaacatgtctgctcatgtcacattagcattgaaacactatccaaactattgttttggaagttaagatactgaagaaataaaccccttgatatataaacagtagcttggaggtcatgtttctagcaccttctcgtgccttgaaaattagctaagttagctgcatcttcctagaactgtagagggaagccagaggtagttcaaaatgctgactttctataaactaagcccagctggggaatataattcagaccacatagaaaacactttttccccatttttatcccttctcagacctcctaatgcactgctcaagcaattaaatctccttatactcatgaggcatttcctaagtgccctgagacttcaaacaaaacgcatggctggttaaaggtttgctttttttacgtcctggtagaaaatttatattggatctgggacaccatctgggtgagaaacaagtgattagggtgttagctctaaaccccttgcttagcaattttactaaatattttcttcataccatgatattcagcatgttccagaaggttttggcaaaaaaaaaaaaaaaaaaaaacttattcccattatactagggttatgaaatgcaggtaggttttgaatggacacagaagggaacaaccgtttaaaaaaaattcaaattgcttcaggtaaccctaatttacccctgactttcagcggtcattcataggaaaactgtcacccctaagatgtactaaaattactctgaagtaatttaaagccaatttaaagccaatcatttaaaataaatgttgatgacaaagtatacaagtttcaaaataaaaatgctgaatgtaaacacaacttaatttgtcctggtccctgtaccaggtggagcatgtaaaggcagcaagcactgatgttttcctggcttggcaaactgcctcactggcttcaaactgctttggcacttctaattttacattcggagtaacggcctccttccctcttcactgctgctatcgttcgtacttgctggtctccctctaggcatctttggcttgaagtcaacaaaattacgtgagggtgaaagaaatagaaactgcagttttctctccaagcagcttggtaaattttcatttcttttcttttttcttgtcctaccttgacttattcctaccactatcatactactagatcaaggctcaaaatattaacaaatattttttaacattttactgagcccattctctcctatacattgaaatctatatgtctatggactttaaataactacaatgaagaatttcattgatttgaataattttaagactcttttttactacttttcttttctttatctacccaaagaaaaatcaagatttttaaataatttcttcaggaggctaccttcctaactcattcattgatagaaggaaagacttagaaataggttcccatgtgttcctcatgacagaaatagaaaaccaacataatatctcttggcttcttctcttattacttggttaatatgttagctgcatagtacagcctacacaatactgtacttgagagtgaagagttgggagtcagaaaaatgtccaacttcaaagactctgctgtattcattttccaccataatgaattaccataaacttagaggtttaaagcaacccaaatgtattatctgacggttctgtaggctagaagtccaacaaggctctcgctgggccaaaatcaaggtgtctgcaggactgtgttcctttctggagactctaagggtaaatcaacgttctcgccttttccagcttccagagactttccacattccatgactcatgactccctcccccatcttcaaagccaaatgcaacaaaaatgcagagaaatgcaattctctgaccattctgtaattccatcttcctttctctgatcacaatgggaaaggttgtctgctcttaagattagcttgagcccacttggataatccaagataatttctaaatcttaaagtctttaatatcacatcttcaaagtcatttttgccttgtaaggcaacatattcacacattccaagaattaggatgtagacatctttgaagtggtcattattctacctaccacaccacctatcagtgcctcattctacacggacaaagtcacaggttaattgttctatatttgacgtaactctaagttctcgtaagaaatctcaaacctgtctctaaatctcctctgttttcatctaaagattttgttagtgtatatctttgagcattcagaagtagacagttgcaactacaaattcatttcatctgttccacaatggtttggttacattgaaggattatttaacgactctataacatcctagttatattttctgagaaatttatggtccttatcgggcctcaatcaaatgtcattcatgtcttatttcacatgtagttagaaggggagtgtgtgtaaaatatggccatgaggtgactcttgcagtatctttactcatcttggaaacagaaaaaatgagctagtttcataaacttaatttctttacctcttcagttttctctacctgaaatattgaggcttctctttaactcatcttttaaagcacagaatttcctaaactttttaaaaattaaatgacttttcctgattttgcagttttcttttcccttcatgaacgttatcactgcagaaaaagcaacgcttgtactttcaagactataaaataagcccagtttataaaattattatttggaggctaaatatggaatttcagatactcactctgaaccacaaaaaaactgaaattagcattattcttggtagctgtattctctgctactgtatttccttattgttctatgtactgtgctctacttttgaaactcccagtcagtaggaaactgctctatgctctcagataaatatactctggtgaatgaaatgtaatggaccctttgaaaaagtaaatacttaatgtacacaaagaaggtggaaatgacatttggattctctaaagtctagcagttctcaaactttctggcctcaacatccctttacactctcaaaagtgaagggcctcaaagttcatgtggattgtgtgtactgatatttctaatattagaaaattacattgagaatgtttaaatatttattagttttaaaacgacaataaacacattaaaggttagcacaaacaacatcttaatgaaaatttactatattttccaaatcacaaaacttagaagagttgcacaattttaatttttttttttttttttgagatgaagtctcactctgtcacccagtgtggagtacggtggcatgatctcagctcactgcaacctccgcgtcccccattcaagtgatcctcccacctcagcctcccaagtagctggagttacaagcatgcgccaccagactgggctaatttttgtattttttgtatagacgggatttcaccatgttggccaggctggtctcgaactccttgcctcaagtaatccacctgcctcggcctcccaaagttctgttattacaggcatgagccaccacactcgatgtaaatatttttatctctttaacatacaccctagtagaaggcagctagactcaccagagaattgcctgcttgtaaatagtttttctactacatttagttaaaatgctcttctcaataaactatcctactatatatatatataaacacacacacactgtatccctacataaagctgagggttaccgagaataagtcaaatgtattcattaatgtcaataatgaattgggtgggagtggatttagacagaaaagaaataaaaacaaagggtatatgtatatcaaatcatcacactgtacaccttgaatatatacaatctttattgtcaattaaatattgttttaaaaaataaaggaccagaagctgaatatagttatagaatgcagcaaatgatgaaaacaaaagtgggagcaaagaacaagcctgagatgatcggtgtgaacttggctaggaggattccagattgctggatctgctgctaattgggaagcatgggtgaaaaaagcaattactttaaaaacaagcccatggccaaaagttttcaggacccatattttcaaaattccagattccatgatttttaatcatgtttaaataacattaatgcatgttaatatcttcttgacacaatgtttttatggtttaaataaaatgaggaactttaatgtagtcaaaaaaaaaaactgttctaccatatgaaacttacatgtggaaacttaaagatcttttgaaaatcaggttttatttttactggtttctcctactattaatccttttttgcctcctgccaaagagtattctttgtcttcttccactcattatgttattcatgcttatgtagtaaatgattataatttatcttacaatttccattaagttgttcttggatcacaatccccagggtatggttataatcccagggatgaaaggaaatggcaaataagatatcatgtgggcacaggttaaacaggtacaacaattaattccaagcatatgtacagaaggatagctatgacagttgtcaacaatggttatgaccaaggaaaaatagaaagtattatggtgtggtttgaaagatatttgtccttaggaaagctattaacaaaaataatgctaggtaatagcaaaaaagggtgttaaaagtaaatcatacaagtctgtcattctttattcaaaacggattcataccatacctagaacactgtgagcaactgtgacctctataaaggcatagccaaactggatgaaatccaagaagattaactaaaatgcttaaaagaatggagtggtttctcaaaaatgagagattaaaaaaaggaaaggttatatgtgtaaatgaagactgtcttagttcaggtagctataacaaaataccaaagacagagtggcttataaacaacttagttctcagtatcctggaggctggaagtcagggtgacagtatggtctggtcctggtgagggccttcttccaggttgcagactgtcatcaacttgttctatcctcacatggtgaaaagagctggggagttctttggggtcccttctataagggcactaatcccacttatgagggctccaccctagtgacctaatcgccacccaaaggccttcattgtcctaataccatcacactggggattaggatttcaactcatgaattttgaaggcacacaaacattctgtccattgcaaagtctttgaaatcacaaaaggtatatgtagaatacagagttaatatggaggcaaatttagagttgtttatcaaatctgagaattctcaaattaccttccattgtggaacccaggagtggcacaaatttaaaatataagtagattcaggaagggcttagggtaaagtcatgaatgagagtcataatataggatggaacttcggaatgcacttctctagtatttccaaccggctgttataaaagacaaccaagtctactgttaagaaaatgtcccttggtgctgtcagatagaaaaatttcttatatccttatttatataatttaaatacaaagattatcttatgagggtcccttgcctttcccatccttctgccctataaaaaagattctagcttttccttgtctgtcttcctttcttccaccctctaaggagctcccacctttgccagactgaccctgtaaggctttgtaaggcaaaatcagacagagggcaggggagaaaagcacaggaaactagagggctggggcgagaggaagagattttcccaggtgaagggcacctgaaaataaaagtctgggtataactacagagaatatgcatggaggatgggagaggagtaaaaaagaggatattagaaagcattgcttttgacagatgtaaaggatttaggttactttgaagctaattttggtttcagtgctgtgttcttttgaccatgatactgccccagacctaaccacaccagtcaagggtttacaaacattcccatgtgggctcatccaataatactctttgggattccctgttaaaacacctagaattcctacttatgatttctgttttaccacatgacacttttcagaagaaagtggttaaataagctccttggataacctcctaagttaggtaattggagcacagggaagaatctgtcatcagatgcctttcactaagttaattacagataaaaccaacacgaagtggttagaagcaaaggttaaaatttcactcccttggactttgtataataatgaattaaactgctggactgcattggcatcctgttgggaatatgatttggaaatagaaaaaccagccaatggtggtctaattttgttcttgaaagtaatttaaagtaacacaaacccaccaagactttacctcttttttactttaaaatgctattcgtgattttaaaaaatggtgcagatgtacaaaagaatctatatgcttttcctcaagtaaagatactttctccatatgtgtgtggaccacaaatcacctaaatactttataactcaggcaccatgacagcatttcagtgctgtttcatttctcaaaacattaaatcctccacaaatccagaaatcacatcaccttaaaaagcagccagtgctggggagtgaggaagaaggagtaggagtgaagagagggtgcagtggagaatggaatgaaatatatggaggatggaaagaaaaggatcagttattttcttttcttcaataggaaagaatcaagtgatcctgtctcaatgaatatgcttcatgtatagtatttttgctattttttaaaacttcagaaaacacattcctaaatgaagatcccacccaaattccaagtttttcattaatcaggctttccattacattgttcatgagaaaattctccttttttaaactacgtggtttaatgcctcccatattccataagattttataacccgtcttttctgctggtggcacctatatgctaaaagttgtcaagctccagagccttgttattttttactttacttcttctacatctactataaatactagatcctgatttttaatatgttcaactattaaaatatattagctagaaactctaagtacttttaattaaaaaataaaaaatccaagtccctacctcctacactcccttcggataatatcccattttcctttccaaatactatgtcctcttaattattttggaggaggaatgagacgctttcattattgtatatgagcaataaataagaaaatattctatctatatgagggctggggggcattgcagacaccattagtgccttttcaacatcaaatatctgtgtatctctgcttgagggggccctctggctgctgaagtgaatttggtccaggccaaaccaggcaagaagtgctggggagtcatggttcctcagaacagccctcaaccactgcctgatgtgagaggatgtctttttcagtttgggctgctagaacagttggggagcccaacttcaattagagggtgtgctcacaatgtttagtgatagagaagaggcaaaaaatgttttagaacctgttgatctagaggagggggctgataggaacaatttaattcaagtctgtctgtgatataaactcacataagagcaaagcagcttggaaacaatttgacagggatccagaaaagcttcagaggcagtgacgtttcaaggaggctttgaagaattaataggattcatctcggcagaagtgtttagaggatatcctagcgagggtagcttaaacaacaaacatttatttctcacacttctggaggctgaaagtacaagatcagggtgcccatattttcgagctctggtgagagccctcttccgtcttgcagacttccattttttcacttgtccttacatggcagaaaagagggtgaggcaactctctgaggtccctgttataaggacactaaccccattcctgagggctccactcttatgacctaataacctcccccaaagcaacacatcataataccatcaccttggggattacatttcaacacaggaatattggaaggacacaaactttgagtccatagcagaggacaatctccccagcatctttgccttcagttgcacaactatgaggcatgttatacacagcctttgagaggtcccagcagaaaggatccctggttgcccaccaccatgatctggttgataattccccactccctcaaaagcacttcctgggatcatctcccaaaacagattacttacactcaaatccatatctcaggatctgcttctgggggaagcccaacttcaatcagagggtatgctcacaatgtttagtaatagagaagaagaggcaaaataagttggagaacttgttgatctagaggaaggggctgatgtgaacaatttaactttaattcaagtgtgcctgtgatataaacccacataagaaagctcagaaacaatttgacagggatccagaaaagctccagaggcaacaatgtttcaaggaggctttgaagaattagtaggattcagctgggcagaagtgtttagaggacatcccaggcagaggaaccaacaatcaaagccaagaacacccttgggggcaatagagaagccatgaagatgaggcaggaaagtgactcaagaccttggatatgatgttaattgcaaagagcatacatttcattccatagacattggggaagagaataaatgtttgatcagggaattgatacattacaattgtttagaaacctaactatgaagaaagcatatgaaattggttttttaaaataataagagtataaaatgtttgaattacttacatttatagtaaagctaaataaatgttttgactaatttacaccaatcatggcaaacctactatttttgtgtatatttgtttccatagatacatacatacgaatatgatgctctttcatgaatgaaaataagattttaggcaaaaggtacactaaggtttcagatctgtgaaatatgtctgcaagtaaataaggacaaaggtactctgcaaagtcagtacttttctggtattgccttttgcaatgaatggcatcaccacaggctgagtttccaatttgggagaccaggattcatgcttagcacctccctcttcttccactgccatatccagcccaccacaaagtcccatccattttacctcctaaatatctcccagattcctccacttttctccattgctcatgccatcacccagtcacagccaccatcatctctcaccgggaggacagcgagagcaaacattcacccttactccgccactctattaacagcacagaagctcatgtctctccccagcttaaagccctgcattggttcccactgcacttaggataaagtgaagtggcctctgcccacctattccgcgttgactctcaggcctccctcactcattcttgatgctccagccacaatggccaacctttagttccccaggaaaacctgtgatccccaactgggggctttgcatgtacagttcctcttgctaggatgctctttccccaggcccctccttctttactcatttaactcccattcctcctttgcatcctagcctagtagcactttctcagggaaccttccctgtccctgggaaccaaaccaggtctccctattggaagtttgtaaccttctgcgcttttccttttctgtctgttattatctacctacggacccatgtgactgtctacctccgtctttagaccatgaactctgtgaagatggcacatagcaggggcttaagaaataagtgtgtgaagaaattatttcaattatatgttaccttgcctcaggtatatggttcatcattttatatggccaatatgtacatatgcattctatgcacattatatacgcatatatagctaagaaaactcaggctgagagactcttaagttacttgttcatcaggaataatggacctggaatttgtccatgagtctggcttgagcagacgctcctgaccaacaccttgtactgtacgccagaataataggtaacagttatagagttgtcttcatgttaagagttatggggccatttttctatttctcaacattttattgtatgtcattgccttgatgcctcttccataaaaatagccttctaaatgatggataaatttttctaagctttgtcttacccaaattctaatgtattgtttgtgttcttagaacttttttccaggttagttatttggcttcccattgtatcatattatgtcattctagatatattatttctactctttgcctctgttctccttaatttttgcaaagatgcaataaattgagaaaatatgcccattgaggcctattaattttgctcaaaatatcactatcttcctatatagttagggtgtggagagtgttctgaaatatggtaggtacagacaatgagatgaggctgaattatacatagaataaagagtaggaaaaatcagctccaggttggaaacaatgaaaccagataacacttcaggttaaaggaacaaacatggttaaagaaacaaacatggttaatgagtgtctactgtgacaaagagttgactaatacacagaaggccaaacataatcttcatttttaaaaatttaaacctttgtttttgatttggggtacatgtgcaggtttgtcacgagtatattgcatgatgctgaggtctgggatacaaatgatctcgtcacccaggtagggagcatagtactcaataggtagtttctaaacccttgctctctctcccctctagtagtccccagtgtcaattgttctcacctttatattcatgagtacccagtgtttagctcccacttataagcaagaacatgtgatatttggttttctgttcctgtgttaatttgcttaggataatgacctctagctccatccacactgctgcaatcaatgtgacttcattcttttttatagctttgtaacattccatggtgtatatgtaccacattttctttatccaatccaccactgaagggcacctaggttgaatcaatgtctttactcatattaatagtgctgtgataaacatataagtgcatgtgtttttggtagaatgatttatattcctttgggtatatatccagcaatttgattactaggtcaaatggtaattctatttttagttctttgagaaatttccaaactactttccacagcagctgaactaatttacattcccaccagcagtgtgtaagcattctcttgtctccgcagccttgcaagcatctgttatttttttttttactttttattaatagccagtctgactgatgcaagatggtatctcattgtggttttgatctacatttcactgatgattagtgatgtggagcattgtttcatatatttgttggccacttgtatacctcattttaagaagtgtctgtttatgtcctttgcccactttttaatagggttatttattttttgtttgttgaattaaattctttacatattctggatattagacctttgtaggatgcatagtctatgaatattttctcccattctgtaggttgtctgtttattctgttgatagtttattttgctgtgcagaagttctttagtttcattatgtctcacttgtcaatttttgtttttgtggcaattgcttttgaaaacttagtcataaactctttgccaaggcttatgtccacaagagtatttccttgattttcttctaccacgtttatagttttaggtcttacatctaagtctttaatctatcttaagttaatttttgtatatgatgataggcagtggtccagtttcattcttctgcatatggctagctagttatcccagcaccattgattgaatagacagtcctttccctattgcttatttttgttggctttgctgaagatcagatgattgtacgcaggaggctttatttctgggttatccattctgttctattgatctatgtatctgtttttgaagttgtaccatgctgttttggttaccatagccttacagtttagtttgaaattgagtattgtgatgcttccagctttattcgtttgcttaggatttctttggctatttggactcttttttggttccatgtgaactttagtttttctaattctgtaaaaaattatgttgatagtttgataggaatagcactgaatctgtacattactttggccagtatggctgttttactaataatcttctgatacatgtgcctagaatgttttgttacttgtttatgttatctatgatttctttcagcagtgttttgtaactctccttgaagagatctctcccctccttgactagatgtattcctaggtattttgtgggtttttttgtggctattgtaaatggaattgtgttcttgatttggctctcagcttgaacactattgatgcatagaaatgctactgatttttctactttgattttgtatcctgaaacattactgaagtcatttattagttctagaagcctcttggcagagtctttagggctttctagatatcaaatcatatcatgagcaaacaatgataaaagcatcctatatggatgcttcttatttctttctcttgcctgattgctgtagctaggacttccggtactatgcagcaaaactagacatcctcatcttgttccaggtcttaagggaaatgcttccagctttcatccattcagtactggctgtgggtttgtcatagacaactcttattgttttgtggtatgttccttcatgcctaattcttgagggtttttattatgaagggatgctggattttatgaaaaagcttttctgtgtctattgaaataatcatacagttttgtttgcagttatgtcttcagtttttagttgtgtggtgaatcacatttattgatttgtgtatattaaaccaaccttgcatcccaagaatgaagcctacttgatcatagtgaattaacttttggatatgctttgggattcagcttgctagtattttgttgaggatttttgcatctgtgttcatcaggaatatcggcctgtagttttcttttttcattgtgtctttgccagattctgctatcaggatgatgctgggtttgtagaatgagggaggagtccctcctccttgattttttggaatagtttcagtaggattgggaccagctcttctttttatgtctggtagaattcagatatgaatccatcaggtcgagggttttttaaggttgggtgtttttttactactgattcaatttcagagctcattactggtattactggtctgctcagggtttcaacttctttttgattcaatctagggtggttgtgtctttccaggaacttacccatttcctctagattttctagtttgtatacctagaagtgttcataatagtctctgaggatcttttgtatttctatgggatcagttgtaatgtcattttagtctttttttttttttttttgagacggagtctcactctgtcacccaggctggagtacagtggcatgctctcggctcacagcaacatccgcctcctgggttcaagcaattcttctgcctcagcctcccaagtagctgggattacaggtgcatgccaccacctccagctaatttttgtatttttagtagagacagggtttcaccttgttggccaggctgttctccaactcctgacctcaggtgatctgcccatctcggcctcccaaaatgctgggattacaggtgtgagccactgtacttggccatctagtcatttctgattgtgcttatttggatcttctctcttttttctttgttagtctagttagccgtctattgatctcatttatcccttcaaaaaagcattttggttttcttggtcctttgtatggattttggatctcaatttcattcagttctgctctgattttagtcatttcttctgttctggtagctttttagtttgttcttgtgtttctagctcttctaggtacaatctgaaattgttaatttgagatctttctaacttcttgatgcaggcatttagtactataaatttttctcttaacactgcttttgctgcatccagagattttggtatgttgtgtctgttttcatttatttcaaaaattgttttgatttctaccttaaattttgttgtttactcaaaagtcattcaggagtaagttgtttaatttccatgtaattgtctagttttgagagatcttcttggcattgatttctattttattccactgtcatctgagagtatgcttagtatggttttttaaattattattttactgagacttgctttatggctgaagatgtgcttgatcttagagtatgttccatttgcaaatgagaagaatgtatattctgtggctattggctgaagtagtctgtagaagtctattaggtctaattggtcaagtgttgaatttaagtccagaaattctttgttagttttctgactcaaagatctgtctaacaatgtcagtgggatgttgaagtctctaactattactgtgtggctaagtctttttttaggtctagaagtacttgttttatgaatctcagtgctccaacataatctccactttaaaaaaaaaaataaactgcttgagatttatccaaaggagagttatgtgaaaacagataagcttatataatagaatcactacatattttaaatatgctgcatttttctcaataaaatcagaattatttacaacatatacatatatttttctttgtttcaaacaaagaaaattgtttaacaaaagagataaaaggtgaggtcctaatgaattcagaaaatccagtcaacctgattcatgataagacaaaagagtagatgaaagtatcaaaaattcttgcaaaatctgtcaatgattgtgcacagcaagcttaggtatgagtcaaggttaatgtcttcactcacaatcttatgcttttatcccagaaaaacctactcatgccccacaaagccagtccccaaaaaaggcaacaatgggcgccacagtccattcacccatgagtcctggccttttcaatttcttcctggctgatgtctggctcttatttctatgccttcttttatgggctctcatcttttgacttcatctccagcccctgtgggagcattgcaattgagcatcattatgctttgggtttatctgcttttgccttttgccaagtaggggcattgctcattttctggctctgtttacagttgactctgcccaactgatatctttcagatgagtccccacccaaatctcaccttgaattgcaataatccccatgtgtcaagggtggggccaggtggagataactgaatcatgggggtggtttcccccatactgtttttgtggtagtgaataagtctcacaagatctgatggttttataaatgggagttctcctgcacaagctcactcttgcctgccaccatataaaacgtgcctttgcttttcctttgcctttgccatgattgtgaggcctccccagccatgctgaactgtgagtccattgaacctctttcctttacaaattacccagtctcaggtatatctttactagcagtgtgagaacagaataatacaccaaccaagctctatgatacactcacttggctgttccactccctgggagtaggagtgggcagttcaccattatgaatatccaagtgacagggtttgaaggaacccagtagcttctcagctgcccacccaaatacacggaaagcatctcttaacatgcaagtgttgacgaaaagcaactcagcttattctcattattcagagattcacttatttgtaactccaaaatcaattctctcagtgctttcatggccattcacagatttgcatagaacaggaaaaaagtctgagtcacttgccacatatattcccagctgaggttgaacaaggcaacatgctgccttcttgtttcagtggacatactgtaaaacaagtgtccttttaactgtctatttactgccctgttttttacatttgtgtgcttcggtttgatgatttcactgcttaaaaagttcccaagcacagtgctgaagtgttgtctagtatatgtgttaggcaagcttcattcaaacctgagctacagtattgttggccatgagttcaatactaacaatccaacaatagacagtaaataaggtgattttaaatagaaacacacataaggtatgtgatgatcagatagtgaacatactgtgaccagaggctcctgggagcataaccctgtatttcccctaggagcaatggttcagtatttgctaattcagtgtttacagtgactttatagaagacaattactatgaataatgagaatcaactgaactgcatcacattatggtcctggagtatgaataggacccagaacagacagtaatgttaaaatataagggcctggggccaggcatgatggctcatgcctgttattctagcactttgggaggccaaggtgggcggatcacctgaggtcaggagtttgagaccagcttggccaacatagcaaaaccccgtctctaataaaaatacaaaaattagctgggcatggtggcgggcgcctgtaatcccagcaactcaggaggctgaggcaggagaactgcttgaacctgggaggtggatgttgcagtgagccgagattgcgccactgcactccagcctgggcaacaagagcaaaactccatctcaaaaaatacatatataagggcctggatggaggttttgatgggctccaccgtgagaaactaagaaagtgtcatgcgaaataggagagcactcaactggagctggagaaacaccagacaaacttgtacctcttctccatacttcttgagcccaaccctattgctatgtatatagtattagtaaataatctggtaataatatcacacaaactatccatggcaaaagaggtattatcttaggattttacacttaatgtttgacagtatggattgctactgctcagtatagtagctaccagcaaaagtagtcactgagtacttgaatgtggctagtccaaattgagatgtcgatttcagacacagtatgataaaaataatgtaaaactgcttgtgaatattttttgagacaggattttgctctgtctcccaggctggagtgcagtggtgtaatcatagctcaatgaagcctcgacctccagggctccatccatcctcccacctcagcctccctggtagctgggactacaggcatgcaccaccatgcccagctaatttttgtattttttgtagagagaggttttaccatgtttcccaggctggtctcgaactcctgggctcaaggtatcctcccacatcagcctcctaaaatgctgggatgacaggaatgagccaccacgcccagcatgaataatttttctattgattccatattgaagtatttttacataataggcattaaaagtattgaaattaattttatctttttttaaccttttttaaatgtggccactagaaaacgttacatggcttatatggactgcattgtgtttgtattagacagtgctgatttgaaataaacagctgaattgggaggatttatagtaagaatttatagtgaaaatagtgaactagaccaccatataacagctatacttacatcctacttactctgagccaggcactgttctaagtactttacatatattactaattacatatattactttacatatattaacttgactgatcctcactggaattctcagggatagatgctattcattttgcaaatgaaaaactgaggcaaagaaaagtgaagtgatttgccccaggtcacactagatttgagccagatttgacctaattaatatagctcacattcttaaccatcacacacacacacacacacacacacacacacacacacatacacctatttgatgcaatcatcaaacccataaaataaaaattacttatcagtaaatagaaatcatagcttatgcctcagttgcattctctgaagatataaaaagaaacagacatttttataaaggaattaacttccaaaagttttgcaaggttttgcaaaaattgagccaccatgaatgtgaggatattgtgttgtcttccatctagatctagtatagaaacgcaggtcaaaaggtaggaagatagagtaaaaatataccgattttactggttaaaaaaaattgataaaagagaatacaaaaaaatttaaagggggatttggggataaatattagaaaaagaacttttcaaatgagaagagatagcatacagtgaagtttgcagatgaactaaggtgctaggtaaatgaagaaccaagccagcaggaacaggagtccgatggaagaggcagaaatgtgctaaataaacagacttaggatttgtaaaacaaaactgcttaagctgaccatataaagctgcttgtttgttgtttcaaaaatcaattgaaaattatttgagagagttgtttccatttaaaaaataatgattatattcacttattagcaaaggacaatgacctggctcctgtgctggttattcctgggaagaaaggcatccataggccgggcacggtggctcacgcctgtaatcccagcactctgggaagcagaggcaggcggatgacctgaggtcgggagttcaagaccagcctgaccaacatggagaaaccccgtctctaccaaaaatacaaaaaaattagccgggcatggtggcgcatgcctgtaatctcagctactcaggaggctgaggcaggagaatcgcttgaacccagaaggcggaggttgtggtgagccaaggtcgcgccattgcactccagcctgggcaacaagagcgaaactcagtctcaaacaaacaaacaaacaaacaaacaaaaagcatccagaaaggccatgagaggagcctgactctcttttatacctgcaggatctgcatcttcagaactccatacaggccttgtagatttcttttattaaaaaaaaaaaaaatagagacaagtctctctctctgttacccacgctggagtgcagtggtgcaatcatagctcactgcagcctccaactcctgggcagaagcaatcccctgcctcagcctctcaagtagctggcgcctacagttgcacactgccatgaccagctaatttttttttatttttattttgtagagacagagtcttgttatgttgcctgggctggtctcaaactcttggcttcaaaagatccttccatctcagcctcctaaagttctgggattacaggcatgagacactgttcctggcctagatttcattttaaaacactgagaacaattagtctacatgtcactgcacacttgcatggagacaactcctctgctacacagggaagcctggattagtagcaggtgttgctgaaccgcatcaccagcctgggactcagaaaacctgcattcgaagtctctctgttacttattaccctggggatcttggcatatcacagagtttccaagggctttatttctaaagagaaaagatggaacaaaaggaagaagtttacacagagattaaaaatctaaaacagggctcagattcttgctcttcaacttcaagtttaagacgttggccacattacctcttggagcttgtttcttcatcaataagatgttgataatcatccccgcctcatgggactgatgaaatgaaggagtgagatcatctttgtaaagttttagcacagtgtttagcctggcacgtactacgaacccaaaaatgattttttaaaattagatgataattcagcttctttccagctcagacatgctatgaagatacgcagccagcactgccttgccatggtgtgtctttttttctgactcaagcctgttccttattaaaatgctgcaactttgtggtgagaaaaggagttattccgtaactttgaccatcagaaagtgaaccaactgacaccaaggcctcagcaatgattctaagtattaagagttgctttcatcttcacagatggaagaagtgaggacaatacttggtcaaggtcacacacgttgaggaaccacccaagagagatcagaaactcaatcccttcctcaagcccttggactctgtttgctaattacttgtgagagttattaacgtgctttttatttttctttaattttggttttcttcatttatggctatcaacataatcccttgctcaaagctcaaggctaaatactaggtaaggctcatattctcactggcagaaacctctgttttaaacacttctctaaaaaatagaaccttgtttataagctttataccattgctgtaaaatgtaatatgcaaataaggcattttataactttagagttaaataataaaggcagcactccaaacctcaactagatatttacataattgcattactagcatttgcatgagctgtaatgaaagctaagggggaaaacctgcttatttcctattaactccataatagaacatgatttttatttgctcttacaaataaaacttaactgcttgtttgtttgtttgtttgttttttaaccagacgctacatttgggttccttatagttcctgattataataacagagcgccagcaaatttcataagaagaaaaacctgtttgatgaaaaattagttattccaaaagaattcccctaaacatctgactttagtatgcctctgcatttgctttctggcttttgacagatcagcttcttcactacatgtatcaggttttttgtttttgtttttgtttttgttttttgagacagggtctcactctgtcacccaggctggagtgcaaaggcatgatctcagcccactgcaacctctacctcctgggttcaagtgattcccctgcctcagcctcctgagtagctgggactacaggtgcacaccaccatgccggctaattttttgaatttttttggtagaggcggagttttgtcatgttggcccggctggtctcaaactcttggcctcaagcaatccgccctccttgacctcccaaagtggtatcacacctttttaagattaatttctttaaggtcagttttccctaaatctctctatgtacactcagtacagaggaccagctgatagtcctgacttccatcctgattaataagtcaatcaatgttgttgggtgtccctagagccaacctagcatgcacccaataaatgcatgctaaattgtattgaaattaaatctattccatgtaagtaagtgacttatggcacatctcttggttttgatgtcccccaaatacagattctgagatagaagctgggtgcaggtagtttatttgggagataacctcagaaagcacaggtagggcaatggagaaagtgagactaggaagggaggtaaactaaaagggatacattcatgagacaggtaatcactgcagacaactgagctgcaaactcagagtgaatactgggaggaaacacatggagggaacttgatgaaatctcaggcatttctcccccttagccttctcctaaccacacatcaacagctttccagggataccagacaagagtgagggcttaggtgctgccaactctcagactgaactctgcaagttctatcatgtcctgactcagaccccagttactgtcagaagcaatgctctctgccatccgcagtccagattctcaatctcatttcaagtcttgcttttaaataattctggatgatttttataatttggtcttcaatttgtctatttttactcatctattccctaaaataatttcaaaagacattgtaccccctagcacattattaggttgacatctataggctttcttggtcatcagtttaagtagttgctaaaagtgacttccagtaaattgtaaatattgaaagtctaaaataaaattgttactcagatccttcaaatgtttccagtggaatttaaattccaaagaaatgggatactcatcactgttcacttaacgatataaatgtacatgcttatcttgttttataatgttccttaaagtcatatttccattccattttccccacagaactttattctaatacaataatatacttgaaataatttaactaaatttaactaaataagaatttaactaattattaacataattcaccacagaaaagggtataaattaacattttttaaaaaaggtcctttgactatataggttcaaatgtatatttttaagttttatttggggaattaccatactatgttttacttagttcacaactgatcaaaacaatacaaatatattttaaatattaataaataaacttaaaaatttaaattttaatggaaaatcatctcaatgaaatgggcgggactggtctgatttttctaattagttaatctctccatgaatgaatactatttatcaatagaatgagacagaggttaatatcaatgttgttctttgtttaaaaaatagcactgaaaagacttgtccaaaaagaatttatttaagtagttgaaaatagaatcgattttattatagcagtgtctttcacttctttgagattttttagagttacatcctaaacatagcatagtagtctaccgtcaaagattattttcaggccaggcacagtggctcatgcccgtaatcccagcactttgggaggccaaggcctgtggatcacttgaggtcaggagttcgagaccagcctggccaacatgtcaaaaccccatctctactaaaaatacaaaaattagccgggagtggtggtgggtgcctgtaatcccagctacttgggaggatgaggcatgagaatccttgcaccactgcagtccagcctgggcaacagagtaggaccctatctaaaaaaaaaaaaaaaaaattatttagaatatcctaagtaggttttcaaactttattctgagcaaagaataaaaaatcattgtaaaagaatgtggtccccagttatcagatcaattagttttctcaatatcagtactagttcacagggtccctttgcttgggtttttccaccatagcaagataaggagtgaatcaaaggatggaagtaggaacatgaaaagggcaagtgtggggagaaaaaataagcaagaaactctgcaagtcataagggtgcctatggagagatgagtctgagaaaagcaaatataggggatttgaggatctggaggttgattttgttgacactgtctcagtccccacgtattcccttgggaaggagatgcatccccaggacacccacacatttacatacacttcagtggctttggaataattgtatggtcccaaagtctttcttagttttgccttatgaaattcaaagcccaagcgtttgaaacccaaaaactaagaatcaactctttggtttggttacatcatcctcaggagaagttagtaaaacctaatgcccaggcagctgcctggaaaggagggaaggatagaggacaaatagtttctagcaacaaaaaatacattagctaacctttcaaagttgcaccctgcgtgctcaaaataacaaaggagccacatccattatggatgctatagaattcatgaagtgcaatcatttgatttgggcctttagtttgtagatttaagatttattggagaagaaaagaagtgcatataatagattaatttgtggggatgttaaaaatgcctgtgcatggacttattagataacctgcaatgcgtaggtaaatttgatgttcaaataggaccacttgtttataagcctgatttctttgggaagaaaatcaattcagaccagacctgtttcattcaagtaagcctgagggcttgcttgaaataaactgataaattcttctgttcccaattaaaaaaatagggccaatatccctcattttaaaaatgcttctgtttttcatgaagtgtgtgtatgcatacacataataatctgaagcagtctgctgctatttaattatagcaatacatgtgacaatggaaacagagattggagcgattcagggccatgagccaaggaatgcagggtgcaattttagcccagtgaggcccatttcagacttgggacctccagaactagaaaataataaatttgtgttgtcttaaactctaagtttgtggtaatttgctacagtggcaataggaaactaattcagtgccctaataaaatgacatgcctttacaaattaactatgtagacacatcccataatcatcctacattaaaagtatttaatgtcctctaaaataaaattccattttaataattatcacctatgactttggattgccctaaataatctaatacagatatgaaaatgagtgtatcaccaggctaggcccaaaggaaattgacagggctgagcagtagaaatcaggagttattagaaatcatggggcctccctaaagggtgggaaatttatcaactgtgcttttctttcctattcaagtggttatgtttgcccagaaatccatgaacatggaagaactcttaagtatgtcttcggtaggcaaatacttgttttcttctaaactcatgatgtagagggaatgattaaaagctacagaccacagggggtggaaaagtattagcttaaaaaaaatggatccaatccaaatgtcatgggccagcttgaattttggtgagcctaatgatttttgaaaaatgtctgttaaaactgttctccatgccaagctccagggtaaaaccacaagtaggaattgatctgttgtattttataaaatccaaatgctgtttttctgatttaaatacttttttaacagattctgaaataggacacaagggaagaaactgaagacagtacattttaatcttctcaagctgccaggacacagatctctccctctttccctacagaagggatcaagcagtgcccactctccaccctccagggagctgtgactcctggtgaggggctattcatacagtgtccattcccagaccatgctttaaacatggccaggaacactgaagctttgggactgagagtgtactcatttagtttccctgaattgagaatgcatgagaaaaagcaaagggcacccaaatacttgtggccttattaatgctttctggaaagtctttaattatttaataatcttctaggtttctctgtctctacttctccccaaaataacatgggcaggtgcgaaagcctgttgttctcctcttcaagtaacctccaaatttagttgctgcttaagccccaaaattcctcctacgctggctttgcatgcacttgagatgttcatgcctgagatctaggccttgaatgggaggggttttaataggagcaaatggcaaaaccaagaccgtggcctagaaaatgtttgtgaatgggcttagaggtaaagggacctcaaagcacataagcctctgccaagtcctatagcagtgcctagaaagagcgtgggcatttttgttgatagcagagggactggaagagcactgtctcaggcaaagctggatcccaactatttcacttgcagaaatgtctacggcaggggtgtccaatcttttggcttccctggtccacactggaaaaagagaactgtcttgagccacacgtacaatacactaacactaacgattgctgataagcaaaaaaaaaaaaaaaatcacaaaaaaatttcataatgttttaagaaagtttataaatttgttttgtgttgcattaaaagttgtcctgggccgcgtgtggcccacaggctgtgggttggacaagcttggcctacagaaattcttgcaagaaactaatatctatggagagttttcacgttgaggtttttagaagacgggttgtcgagtgataaacagcacaccactcccttgcccagtttttctaattaaaaaataattgggaaataatgcaaaacacacgtggagaacaaactgtcatctttacgacccaatatagggaaggtcagagtatccacttacatctgaggggcaaagggcttcctcagactgaacacgagattagccagacctacccagctgtactagttatctattgctttgtaacaaaatccctcaaagctaagcagcttaaaagaacaaacattgccgggcttggtggctcagacctataatcccagcactttgggatgcaaaggcgggaggatcacttgagtccaggagttcaagaccagcctggggagcatagtgagacccccattgccacaaaaaaaaagttttaattagccaggtacggtgggatgagcctgtagtcacagctactcaggaggctgaggtagcaggatcgcttgagcctgggaggtcaaggctgcagtaagccatgatcacaccactgcactccagcctgggcaaaccttgtctcaaacacacacagacacacacacacacacacacacacacacacacacatttctcacaatttctatggatcagggatctgggtacggcatggcttctctggctcagggcctctcaccaggctataatcaaggtgttggccaggctgtggccacctcaaggctccactggaaaaggacctgcttccacactcactcatgtggctattggcaggaattagttcctcacaggctattgaactgaggcctcagtttcttgctggctgttagcttggagacgtgagtccttgctatgtggacctctccatagggctatttagaacatggcagcttgcttccttttatagcagggctccaagacagcaagaaagagaggactgcaagccagaagtcacaatgttttacaacctaatctcagaagtcatatctcaccacttttgccacattctgtttgttagaagcaagtcactaagtccagccacattcaagaggaagagattatacatgtgtgtgaatattataggggcccttctcagaggcagcccaccgtgacagacaagtcaagcagtgctctgggaggattggaggcctccctctaccccatcccagcaggaaaaactcacgctccctataagaagcctgtccatgggtgaaatgacagaggatgggatacacagcacatgctgtgtcatacccatcaattgcataaataaatcctgaatgagggaggaagtggtggagagaggcttaggctaaaaaagttgggggaagggagaagagggaaggagcagatcttttcaaatcgaaaggagcattagtagtaagtaatgagaacccgctaattctcacaataccctgtttatattatgatactcaatttacatataaagaacttgaagcttatagagcttgagtaacccaaggtcacatagatactatgtaatggagctagaatctataaatatccaatttctgaaaaagtgccatattctgtgtaataattatacgtcccatactcagaatctgttggaagcagctatctgatgaagacatttatacttgcccatgaaaatatcccatttcaggaatgatgctgccccattctctctgtgtccttagatgtcccctaaatctaaagttttatgaaacaatggcttggccaggaaacaaaatacacacctggcttagaagtgagcagttgctcacaggaaggggaacatcacactccgggaactgttgtggggtagggggaggggggagggatagcattaggagatatacctaatgctaaatgacaagttaatgggtgccgcacaccagcatggcacatatatacatatgtagctaacctgcacattgtgcacatgtaccctaaaacttaaagtataataataaaaaaaaaaaaaagaaagaattgagcagtcccttcatgacatagggctagagagaaaagagaagtgagcagtccctggagccacctgcaagctgtctgggaactctgcagagcaccctaggactgcacagcctgtgcctgcagccatgaaccttgccagtagctggtagcccacacagaggtggtgacatgcaaggcaacttgtccagagtccctgggtggtacgtgtcactcctagaaacctagcaggtcggaaaagcgttgctttgaacttgagacaagatacttgctttcatcagccacccagcctctcctgccgttttgttctaggacgcaggctaaatcacagatggtgacacttggcttcctgctgcctttgaggtacagggctggacaatggctatttctagccctacatgctgcatagaagtagaatgcccagggactatcgtctcttcaagatttcatgtcctgtgttaaagagaatgggaaaaatatttacttgaattgctgtatagttctatgtgtgctgtcacagttagtgttctttattaaatggtatttcagtgccactgtgtgccaggcactgtgatgtgtgctgagggtaactgatgaataaagcagaagcacacatggtctagtgtgaattcccaaagataatacagcatgtgctggcatcaagggatgtcccaggtcacatagcatctcctaggatggactgcatatgtgaaggggattcacaaaggcagaatactgtgggttgtggacatcactatcaatttccctctctgggacgcagttcactaagatactcttccctcgcccagaaaaaaagaaggctgtaggcaggaggagtggatgtaagcatgaaagggactggcaggggggccacaggtagggatgaaggaacttgtgtaaataatgtttcccaaggagacgacagaaaggatcaccagcatatatccagtatgtgcacccaaatcatctgagattctccactgctcagagggaaagactctgtctgaacaagaaaaaccttgatttctgctgagtctcagacctgaccattattcccttctcccagatgtctttcaaaatcctctgtctgcctctagataaaattttgcttgtcggtaatacccgggtacctccagaataaggactgtgcaatattgaagcttcactggggtcaacttgtgctctactcatcacgtctcccaaacaaaaacattaagaatgaccaggcgtggtggctcatacctataatcccagcactttgggaggctgaggcgggtggatcacaaggtcaggagatcaagaccatcctggctaacacggtgaaaccccgtctctactaaaaatacaaaaaattagccgggcgtggtggtgggcacctagagtcccagctactcgggaggctgaggcaggagaatggtgtgaacccgggaggcggagcttgcagtgagccgagatcgtgccactgcagtccagcctgggcaacagagcaagactccgtctcaaaaaacaaacaaacaaacaaacaaaaacattaagaataagcagcaatattgtttacatgaattgtgtggtcttccatttccctgtttgtagcagaattcctcttagataacattggctttttttctcagctaagcatccacaacagtctccagctgaaaatcccatcatgtaccctaaacatccaataactgcctcttcctgggacatacacgcaggtctcatgataaaggaaccagtgatgcacttgtggacctctctacagttgaacctgaacatgtatttcctccacccacaccttacattttgctcttccttttctctctgggtcaccaatgttttgaattaagttgcgtacccactccccccaaccccatttttttcacacacaggagttttgccccatgtaaccttttggtagcctgattgccaccctttgcaagccactggttttttttttttaataatagtttaagttctagggtacatgggcacaatgtgcaggtttgttacatatgtatacatgtgccatgttggtgtgctgcacccattaactcgtcactgtttagtcttcctctgcgacagcctctccccacccccttcccagcaacggcagcgctattgctgatcctttttccccttcacactaatcttccagcaatctccatccacagatgtctgttctatcattttttggttcatttagggatggagaaaagccattatcatctttcctgagagagggtattaacatcggatgccattgcagacctcctattactgaaatactatagcaatcaaaccttctaagtccaagatccctaatatccgtatcaggagttcaaaatgaaactgagccactcacatttgcttcacacacctgcctgattatcttaggaatataaagtagacagtagccccccgaagaagaaatccaagtttgcaaacaggctgagttcattgaaaacagtttagactccacacagagacacactgcatatatttataaatatacgttttaaactctgacagcatgagtacaccactgaaatgttttcatctttgttttttatatctgttgtctgccacggcatgtctgctttcaactataatcagaaatttggcaagacaatttttttaatattttatttataatttgcaatcatatttataatggtgaaaaggtgagttggtaaaataatttaccctgagctcctgatcatagaaagaagtttatataatgaattgtttttacatgaagtgtaaaacaattataaatgaattgtttttacatgaagtgaaggtgcagtgaggaactttgatatggcccatggaataatcctgattgaacccatgccagagctttgatcagctctgtgacggtgtgctgcctaagtacctcattgaaatgggtgggtctcatcatgagtcaacaaaagctttctatctgaagaatcatcagttccaacctttctaaatgtggcagtgtgcacgctcagcattaagacaagtttggtgtctgcttataaagacagactttatatcaatgagatattgctctgtaacaaaccaacccaaagcttaatggcccaaacaacaatcacttgcataactcatggttctggaggtcagcaagtcagagtaggataaactgtgtggttctatactcggctgaactccctcaggcatctgtgatcaactgtgggttggtcaggtggccctgcttctggaagttggccagcttcagtgggggctcctcggcactgcttcattgatctctcattccccagaaggctagtctgggcatggcttcttgatcttgccaaggttccaagagagagaatagaattgtatgaggtcttttggggctatgttggttttctgttgctgcataacaatttctacaaacttagcaccttaacacaacactcatttactagctcatagttctgtaactcagaagtctagtacaataggactgggttctctaccctgggtatcataaggctgaaattgtggtgtcacctgggctaagtttttagctggaggctctgggggtgaaaatctgcttccaatcccattcttggtgtcagcagaattcagttacttgtggttgtaggactgaggtccctgattccttgcaggctgttagtgagaggccactttcagccactaaagatgacccacattccttatcacaaagctccctccatctccaagacagtcagggtatgtcaagttcttccctaccatatataaaatttgagcagctggggagatttaaaagaggcttcccataaactcagaagtaaaaagagacaagggtcccagtaaatacaaaacgactggggttggggaggcggattttctgtcctcagtgacgttttgttggttgattggtttcagaccttggactgcctctgtctctgaccactagactcagatttaaagaactcatgtgatgaggtcaggtctacccagataacctccctatcttatgctcaacggatttggaaagttggttatatctgcaaaatctcttttgctatatgacataacataatgacaagagtaatagctcatcatattcacaagtgccaaccacagtgaaggcaaggagattacacaagagtaagggtcatggtggaattcagcctcctgcggaagcctgggcttgaccggctcattggcccttctaccccatactaaaaactaaagcagatcagcccaaatttaaatggtgggaaaacagattctaccttttgatggaaggagctacaagggcacattacaaggagggtagacacaaggaaggggtatagatcgacaccagattttgcaatctactacagacaggatatatgagacttaaaaaatccaggcagctcaatgccttatgatagctcttgctgcaacaaggtggcctgcagagagagcccacttctagttattaggatgagaatatggaaggacaagcaagaaatgtcaggcccacactgtccgtgaagtaggataacccacctctatttcctagctgctccacctcacaaagcctagctatctttgcctcctgctccttcattagtgcaatggaacagcaaatcaggatactttcacagttctcttaagtgagcctagaagtggggagctgcttgttcacaaacttgaagcctgaatatgttaatattctttcagtggccggacgcggtggctcatgcctgtaatcccaacactttgggaggccgaggtaggcagatcaacctgaagtcaggagttcgaggccagcctggccaacatggtgaaaccccacctgttggtctgtactaaaaatagaaaaattagctgggcatggtggcgcatgcctgtaatcccagctactcaggaggctgtggcagaagaatcgcctgcacctgggaggcagaggttgctttgagttgatatcgtgtcactgcactccagcctgggcaacagagtgagatcctttcagaaacctgctgtctgtatttggatacaattaaaaaaaaaaaaaagatgagacaggcaggtgcgaaagaaataaaagtcacaactgatccagttgggaaactcagaattgacagttacgtgtcctttcatttattgatattttgagattcacaggggtttaaactttatttttccaagactgaatagttcccacctcccttccatatataaaatttgagtagctggggagatttaaaagaggctccccataaactcagaagttaaaagagacaagggtcccagtaaatacaaaatgattggggttgaggaggcagattttctgtcctcagtgaagtttgttggttggttggttggttggttggttaattggttggtttttgagtcagggtctcactttgtcacccaagctggagtgcagtggtacaatctcagctcactgaagcctctgcttccagagtttaagcgattcttgggcctcggccccccaagtagctgggactacaagtgtgaaccaccccaccgaggtaagttttgtatttttagtagagatggggtttcaccatattggccagagtggtcttgaactcctggcctcaagtgatctgcccacctcagcctcccaaagttctgggattacagtcatgagccaccacgcccaatccctcagtggagttttatccacttattataaaatgtttttgaggctttagaggcagagccagagaaaacgagaattcaaaaatctgcctttttttctttagaagtgttgaaatcatggcctacttgtgttttaatgggttttcagagcttaattagtccatagactgttaaaaaaaaaaagaagaagaaaagatgagctgctctatgattccccagctgccttagaaatgtgcaccaagcttacgatgaaaatttgtaaggaacatatatttattttaaggattctcaagagctctggagaactgtgcctttctctacatacatcacttcactgctctcatatctcagttaagtgagctaaattcaccaagccctgcttaacttcacaagccaggtctgccagaactctgggaggtgtccattgctgattggcagctagccagtaatatacacaaagaatgcaaggatgagaggatgacctacgaagtaaagaatcatgttcagggagaaacacaggaaggggcaggttgggagcaaacactgaaaagccaattgcactgtgttttcatttgtttggagagggcattatgggagggctggaggattgtttcttagcttcttccaacaacagttagataattgctgcaagtggagagctcagaatagcaacaatttgccgacacatgagggcccctctttacatgttcatctttttggtcaccttccacttatgtatgtgttattgaagtagcaatggacactttgaactttctttctcagaaagctattagcttagctggtgttctgtattatttccacatttaagcaataaagcagtgtttctttgtaaaaatctgacttttttcagttaagtttgttgccagatctcccaaaaagacagctgaagtctattacatatgttgatcgctattattgggagaaggtgttggcaaccttttgagtgggctgtgatgttgccaatgtgtttttccaacaaggtaaggatgagacaagataaagggcaaggaagggggaaagggtgctgatgtggacacagagaacgtctccctcttgctgtcctccctctgctttccatcaaggtcaagtgtctcttgtaaacaccggcagggacagttcaatctgcccatctctgacacttgggtctccctttctgtgacccgggaaacagtcccacggagaagccaggaccctgggccttctccctgggggctctttatgcaggtcactgccccactccctgaactccgaaacaacagagcttacgtcctaggaaaacctcccagagatggctctagtccccaacatttttgcaattgcaacatttcttatcctataataatacaaaaacttccacatttaaatgcattcattcaacagaggccaacttcagcacatgcacttctggggcacttgtgtttacaatggggacaaaacaagacagttggtgtccgtgggcagcttaatcctagtcattttaatgcattttgctttcaattagctttctctgaataattctatgaccacattgaaattgtgagtgacatcctgaaatatacctacactggatcgtaaaccacagtgaaaaaaatatataaatatcgccctttccagaagctcatgtgtacttaaaatgaaaccaaaaaaacctaaattaggtattcacagatacccttttgagaaattcgcgagagcagcaaaagtacattgacatgcgtatttctgaccccatttgatgacctgaaacatttcctccctcttcattttctattgctgaaccacagtattttcctgtttggcacagatcaagaacacaggtctttctcttttttcgtttttcccactgaggctatgaaattggccattcagttattatagtaaggattagtaaggacatttcaaacacaactaattaaagaagtgttttctgaaattaagatatttttgtttaattacattagaaggaactaaatataatatggtatagataaaaatagacagaattactcagaactgagggaaaaaataagtagtgagaaaatgttaataagatctgaatgccatcttcgtggcatttttccctaaacttcatcagttgggagaaaactaaatcttcaatattaaaaacaagtcttatgagcaaaaattactgtccggtcaccctccagagcagggtgctgtctaaacagaactttctgtgatgatggaaatgttctctatctgtactgtccctatagccattagccctaggtgcctattcaaatttaaattaactaaaattcaataaaattaacaattctgtttttcagcgacagtagccacattttaagtgctcaaaagcaacacatggccagtgtctaccatattggacagcacagttctagaagccaggaaagaaggttaaatacacagtgaaaatacacacccaaggttttccaaacataagtagaaatgggaaatttttcccgaaagacctctatggagcatgagaagaaaggtctactttgtatcatctggaggattttttcctctttccatcaagtttcagccaataattaaaacaagttagcaatatttttcatcccaacaccttgtgtaaattcttgtcttcccccaaagagttcccttgatatgcgttttacacaccgtctatagaaaaagcactttccaaacacccagtgtatgtttttcatgtaaattcacttttctgatccttttagtatatttataatggaaattctctctacttaaagcctatctatatcttagcaaccacagtttccaaagctattccatgaagcaggtttctctatttacttttgtctatttgtgtagcccagaccacgcaataagattttcaaactggccaaaacacatgaacatagacaaagtcctttattgtgtgggtaaccctttggaatgtcttattccctatgagagctgacataaagcaggaattcaaatgacagtgggtcaaaacctgagggccaactgcagatttcagcctactttacagtccgttggctatcatagcttccatatgggcaatagtgattgtttatgaattaatccatgcaaaatatatcaaatctagttggagaggatttttgtgggagagaaaaggtacccttccttcaccagcctcggcttcatgctaaagtatttcacaactacagtgttttcataagcttagaattcaaatgaggccaaaaactatcaaaagcaacctgctatctttacctgacccagaagtttacaagattgaattcctagaaattattggctttattcttctggagtctgctcaagtctagataggcaagaaagaacctaacagatcaatgcctcttaagggaattgatcccttctgcccaacttcctgggcagagtggccttgagtgaaccatattcagaattagctcctgtggaacctgactatggataagtatgttaataaatacattacatttttgaaaattatgtaatgcatttttttggacacagggcactgttcataactgtatatatgctttacctctaatacaattactactataatttacttcctaagttggtttctgtttggttaatatacacatgtgttagctccaagataactgaagagcattttcatgctcaccaagccagctccaaaccaagcacaatcccaaatctgaactcttattcctaaagtcaaatcaaatcagatgggtcccatgggaagaaatgagatatgtccaggccaacatcatgattagacccatctccaatgtcacactcacaagtcagtttcctaacccactcaacccaacattttacctccaaaaaagatgacacaagatcatgcttgaaacatatggggaaagcataagcatgaagttttaaaaggcaggagagagaaaatgtgtgtattaggcattcaaacctactacagaaagaggtttctttttttaacttttattttaagattttaagttcagggatatatgtgcaggtttgttacataggtaaacttgtgtcatgggggtttgttgtacagattatttcatcacccaggttattaagcctagtacccattggttatttttcctgatcctctccctcctgccacccacaaccctccactaggccccagcgggtgttgttcccctctatgtgtctctgcgttctcatcatttagctcccacttataagtgagaacatgtggtatttggttttctgttcctgtgttagtttgctaaggatactaaggcctctagcttcgtccatgtccctgcaaaggacatgatctcattcctttttacggcagcatagtattccatggtgtatatgtaccacattttctatatccagtctatcattgatgggcatttaggttgactccatgtctttgctattgtaaatagtgctgcagtgaacacatgtgtgcctgtgtctgtataatagaatgatatatatttcttcctttgggtatatacctagtaatgggattgctgggtcaaatggtatttctgtctttaggtctttgaggaatcaccacaagagagagccttctttacagggaaagcaagcctgggtttgaggaggtgacggcaaactatcgctcaggaccaaatctgccacctgtttttgtaaataaagtattgttggaacacagccatgcctgtttgtatatgtattgtctatggctgctttcagggtaaaatggcagctttgagtagcttggacagagaccgtgtagcccataaagctgacaatatttactatctggatggatctgtacagaagaagtttgctggcccctggtttagagttttacatttgctgaaaacagtaattattgaacagtttctttacgtttgccacagagcaccatttgtgcctcggtcttaaagcaaccctacatctcatcactttgctgccataagttctgagaacaattatttctttgttaacatttggtaaacttatctctagggacataaaagaaggttgggaacatctctgaggtttaatttcaaaacacgttgagtttaacatggggattcaccaagtgctggtagctagaataatgatgcacttatccaaagacttttcaaggggaggttactgactagtgctttgtagtacaggccatgagagtaaacatgaaaaaaatgggcataattccttttccaagttttaatcataaatgatcatttttttaaagattccaataacttgcccactaagaaaaaaaaaaggaaaaaaaatgggggagggagataacgacacagtggttttgttctaaaacagtcatgtgcaatgtcatggtgccatctacagtatttcaatattttcacccaaacaccagaatttgaagaagccctatagacacatatctatttattgagggagaaacgtttttctagcacaacagtataagaaggctttaggctaaaattttctctgtggtcacggtcttctgtcttcttctcctatgaaccatttttaagtttattccgtttcctgacaacttcttagttcccattgtgatagtaaatattaaaattaatgaatgcgctgtacctggtaggagtgcaatgaaactgttcaaaaatgttgggatttagtatctgctcacgttcacacaaacacagtcactattgtcaaatgcgctgcagtggtggagtgtagcaacaggagggatgagacccaaaggtctgaaaagccagtattttaagaagtcttggaaaatgtggaggttgaaaaatctaacaggagtgcttgcttcagcagcaatttagagtagattagcatggcctctgcgccaggatgacatgcacattcctaaaagtgttccgtgttttaaaaaaaagagagagacagaatctaaggggatgtgtacatttgctagagctactataacaaagtaccagaggcagggtcacttcaacaacagaaatttatttctcacagttctggaggctagacgtccaagattaaggtgttgactgggttgaattcagcccataacaggaaataaggagttaaataaagcacttgcttctattgtttgtacctaaacttaacagaacacagtaagtaacaagtcattgggatgcagaaaagaaaaaagagagtgaaggaaggagagaaggtgaagggagaatggaagagaggaagggagggaggaaagaaaagtttgatgaatgattgcagtctaaactggttcaaacaagagatcttgtttaattaaggaattcatcccatctctgcctattaggaggaggaaaaagtctaaaatagaagatggtgaaagttggatgaccccaggcattaaggccattcatctttaactgttatgcttggatcatgcaaatgtgtctggtagctacaagggttgctgtgggtactgaatgttttattgttctgagactatcaaagaaaatagccatgggacatatagaccacagaatactatacagccatgaaaaagaacaagattgcatcctttacagaaacgtggatggaactggaggctgttatcctcagcaaactaacacagaaaaccaaatgccacatgttctcactaataagtgggagctaaataatgagaattcatggacagaaagagggaaatagcagatactgaggcctacttgagggtgggggctgggaagagggagaggttcagaagagaaaaaactatctgatactatgcttagtacctgggtaattaaatactctgtacaccaaacccctgagtcatgagtttacctatataacaaacctgcacatgtactcctgaacctaaaataaacattaaaatattttacaaaaataaaataaattaacaattaaaaaaagaaaaaaatgagacaataaatagatcctgggaaaaactgtccccagaagtgttcttttaaatttgcactacagatgtaatccaagttgagtaaaatagaaaagcatggatttgctgttcctgaaagtcattcatggttaattgccgaacactttcatctgcagtgtctgtggaagggtagaaccttaagtagtttttcattctctgactactcaactagaaaggcataagaggcaactcactctatgatatctcactgtttggcctctcctgtttcatagtagcaaaggatttttgcacttatccactaatttatgatttcttcttaataaaggaaacaagagcctctatttattatgattcctgccatgtgtgaggcttgagctgggtattttacatacattatttcatttgataatcaccttttcaaactcttcaaccacataaatgcattacagagagctattttagataaacatggttataaatatgtaaactatataaaaccatatgttagaaccattctgtttcatgcttttagaaaatcttactatagaccataaattaaaaacagtaaattataaaccaaacacttttatggggtttttttggtcttgcagttctagctgaaggaatactgcactttaactcacatgctgattaattttattcacaaattttgaattataaaatgtgtagagtcacagacaattcaattttttcaacacccattttcccaagacaataaccgaagtatacatacagtagccactattggcaaaaaatgtattcctcatttatggaaaaagtgcaaataaagaaaaattgctgtttataagcataattccaatgactgctgcgagtgggaagcacagtgattttgtgttagatctctaagagcttacaagatggaagcttgtggtgtaagcatttagtggtgcaatactgtcatctcgtggtcagtatgcagtatttcagatttagttggagaaaatgtctgaaaatcgttaacgatatttccagtctcctttcacatacttactccccagagagtctgatttgtacacatagacatgatagaatcggcttgttatttaaacaagcagatggatgttgtatgagattgttccaggagtttactgccttagacccggacgagaggggccctgccctggccccgtcagttagagggctcagctttgacctctcctgcctgtacccctctccacagatcaagaagtcctcggaaccaagaaaacgcccatccaaaaccaagcccttttcttccctttacctgccctctatctcacctcaccagcagttccactttcctgcatctggatgaatgctctaatgctctcacgttgcctgaggtttcatgaataatagctggctgccacttcccagatatcatttgcatttgagcagcttcccgacatataacacaccccttcccaacaataataatgatgaaaggaattttgaagatgcaaaaacagccccatggaataacttttctcacccccttcaaatcctatcccagcatgtatacaagaacatgtgagcactttccaaaccttagctctccgctgccaccttcaggacgatttcagtaaccgcagatactgcagctgcttagctaagaaacattaacactcccagacagagaaacctggctgaatcctgaaatagagccaggtgagaaaaaagtggtcggcatttagtttatggtatttagcaaaatcttgtaacatattttattggatactctatcaaataacagaataacaatagctaacaccatatataatgtagacatgtgtaagtaataaaaactgataaaacgttttgttttatatgtataacaaaactatatgaatataaataaaaatatgtatacatcctacagtaacaacagctgatatttatttggagctttttctgtggcaggcagtattctgtatacttcatcactgtaaatatgtttacatgttttgaaatgtctcaataacaacatgaggtacatactactcttagtatgttccttgcccgtgggggactcctgtctttgcagtgagtcagaagataatgacataaagcatagacatagcattgccctgcattcattcaacaaatatcaccgagcactgagaatgcagagatcagtaggacaagcaagttctttgctcacgaccatgtgtgcaggtagggagatgagcaacggaaaataaatatttttaagggaatatatgagtgataaatgtagcttataaaatgtataactatactggaaatcaaaatagggtgacgtgatagaaagtgactgagaggctatcatacattgagtggtccaagaagagttgctattaaagtagggccaatctaaaaaaaaaaaaaaactatatgatgatctatggagaacattccagaaagatatgaagagctagtgcaaaaactttgagaagggaagcatttcaacatacttgaagaacacaaataaggccattggcaggggtgagaagggaagggagagggtggaagagggagggctgagagccaaacacagccacagcatggagggcttgataagccagggctgtgcaatgaggttttttaccaggtgggaagagaagttcttaaaaggctctgagactatcaaaaagatcactccggctgctccatggagacaggaatttatggtgcagagaacgtagaagcaagatacctagtgagaaatcacgtgcaatatagaggctcaagagacaccacctttgactagcaatggaaatggacagatctagaagatccaggtttgttgtggccatggagtctacaggtgtacctgatgttttcaatgtggaacagaagggaaaagatgaactgaaagtcatacttagatatgggaattgctatgacctgggaggagaaagtttctgggtggcgagaagcaaatctagagttgtcctgcaaggcccggatggaggagcccattctgtcttcctgtttgaccgcagtccagctattggacctcatggagccctaatgtacttatctgtaaaaatgcaggagcaggttcctgccagatcagtttctctgagtctcgtgggatttaattgaagttgacacagaatgactttaaaaccttccaagccaatggctaatgatgaaaatacatatgaaaattaatttgggggatcctgtgcagaggaaaacaaaatagttctattcaaccctcaaaggaaatgtccagaagtgaagatgaagttatctttcagagttccaatactcctaccccactacctgtttaaaatggacttttatgttacataatcctgaaaatgttaggagtcaaaattcctctagataaatgtggtacacatataccatggaatactatgcagccataaaaagaaaacaaaattgtatcctttgcaccaacgtgcataggaaatcttatcctttgcaccaacatggataggacatcttatcctttgcaacaaggtgctttcagaagcaggatgagcactgcaattgaaggctaagaggaaatggctcttggccaatttaactgatcagtctgtaagaaattaaaaggaacataaccagagagagatagggtatctcttatgagaacatcagaggagcgtctatggctgtgtaatgttgacattctcttctcaacgtggatgcagctggaggcatttcctaaatgaattaacacaggaacagaacagcaaataccacatattcacacttctaagagggagctcagtattgtgtatgcatgaacataaagatggtaacgatgctgaggactactagagtgaggagagagggacaggagcaagggctgaaaagctacctattggctaccatgctcactacctgggtgacaggatcattcaaaccccaagtctcagcatcacacaatacagtcatgtagcaaacctgcacatgtaccacctgaatctacaatgaacattgaaaaatgtaaaataaacattgaaattatttttaaaacagaagcataagaatataaattaataatgatattcaccttttactataccttggtaaaaaataattatgagttcagtttaaaaagtcttctagataacaaaagtatcatactgcttttaaataaacatggtaggttggagtaagttctttttcatttggcagtgacattgctcttcacacaagtttccatcaagtattgaaccacttgggcttgattctttccctcaagttacttttgaaggagtctgtgaggtttggggattattgctgtgatatctgggttttctaaagaaaattccaggaaaccaaaaggatttgggacaaagcatacatgaacaggaaacagagacatggaaataaatattccatcttctgggaaaacatgcaccattatcaattatatggagctaatcttcattttaaaaattggttcatctttccattgtcagagagagattacaaagattggtaatattcctgccctgttccttagaacttttagagaatttccattttctagtttgctttctccaaagacttggaggtcagctgaactattcatattaccaaactcacggggatatgtgtcccaccaactgacccatatttgagcaaattgatctagattcttgataaatattattgcccaataaacatcacatacttttaagatctgggtttaacatattatcagaccttggagacatggctccttagatccccagaagcagagttaatttagctaaccagtggtgagctgcattctgctgtacgagtttgctctacctcctaatgtagctataatatttgtaggagattccagcattggccaaaagagtggactaccctccctttatgatttcttggaaccctaaaactttatgagactatgaatatgactaggaacaaggagatgattttcttctcagtagtgaaaatcattatatatacatatatgtctttataatcctaatagcacaacttatattgttactatgttatatgggccaagcattgttccatgctcaaattaactcatttaattctcataagaacttatgtggtaaatactattattatcccatttttagaggaggagattgaggtagagaaagttgaaatgattacctcaaagtcagaggatccaaagtacctgcccatcttaagataatttgaaagtataaacttgttttctgccatgaaggacacacagccaaaattccatacaaaattcctaacagccctgtcacttttttaaatgtgcaagaatccaatcaagaagtgtgaatactgatactgttcagcacttggtgaccttgaacttgatcgtcagagtatgatcctctaaaaggcaatctgttttaacatggtctttgctcacagcacaggaggatagcaatttcaggagcaggatgagcactgcaattgaaggctaagaggacatggctctcggccaatttaacagatcagtctgtaagaaattaaaatgaacataaccagagagagatagggtatctcttacgagaacatcagaggagtgtctacagccatgtaatgttgacattcacttccaaaaactggcatattctctaaaaggacagcaaactggattgacatgccaaaaccactagttgaaaaataaaaataatccgttattaagtcagttgttttgtcattgctattttcaccaatctaattgaacaggccaatgcttttacaagaagcagacaagtcactcatcttgaagtttaggactaatagctgagtaaatgcttctgaaatacacagagagtagactaaccaacagtactcacaacacagtgaataaatacactaatatatgtagaaacccaggcatatattaggttaaattaagaaaagagaaacacatgaatatcctatagaatgagatttgaggagaaaaatcttctaaatatgaaattaggttccctcatcatatttaatttttagctgtaagtaatctattctaagaccacagtgtagaacatcccagtacagacacacagtttaataatttaataacttcagaaataaccatagatgtcaactaggccaaacccatttcacagagtagaaaacaaagtctcagctgggagcggtgactcatacctgtaatcccaacactctgggaggccaaggcaggcagatcgcttgaggccaggagttcgagaacagcctggccaacatggtgaagctccatctctactaaaaaaatataaaaactagctggatgtggtgatacacacctgtaatcccagctactcaggaggctgaggcaggagaatcacttgaacccaggaggtagaggttgcagtgagcagagatcgcaccgttgcactccctcctgggtgacagagcaaggctccatctcaaaaaaaaaaaaaaaaaaaaggcaaacaaagtctcagagaagttaagcaatattcccaggctcatgcagttcattagtgacacagccaactctacaacctggttcagtctttcacaaaaatgaaagaaagaattgttggcaacagaaatgcagttgggcctaaaatgttgtgatacagaacctttcagccatctcttctccactcgccatgtttagaaacttcagagagcattaagatacattagttcggccaggtgcggtggctcacgcctgtaatctcagcactttgggaggccgaggcgggcggatcacaaggtccaggaaatcaagaccatcctggctaacaaggtgaaaccccgtctctatgaaaaatacaaaaaattagccgggcgtggtggcgagcacctgtagtcccagctactcgggaggctgaggcaggagaatggtgtgaacccgggaggcggagcttgcagtgagccgagatcacgccactgcactccagcctgggtgacagagcaacactctgtctcaatgaaaaaaaaaaaaaaaagatacattagttcactttcatgacacagagagatcctaagttactcactacctaatacttctaaggggtgtgggtttcttatcaactgcatgaattcttcctaaatgatcttgaaaagaacccactatcattctgaatgttgcttggaaacatatctactgttcaaagtaactttgttgagcttagaatttaaacagaggaagattaatgtcagagcatgtaccatgtgcagattaaaaactccactgtgggttattccagaagtagaccagaatttttttcattttctttttgaaatcgtgtgtctaaaaccagcagttagttaagggcagaagagatgttgcaaatgaagatttagacagaaaaatttcaaagccaatttttaacatctacgttttgttcagaaccaccataagcaaaagttttttgtttgtttgtttgtttttgagacagagttttgctcttgttgtccaagctggagtgcaatggcatgatctcggctcaccgcaacctctgcctcctgggttcaaacgattctcctgcctcagcctcttgagtagctgggattacaggcatatgccattacgtccagctaattttgtatttttagtagagatggggtttctccatattggtcacaggctggtcacccgcctcagcctcccaaagtgctaggattacaggcatgagccaccatgcctggccaagatttatttttaagaaaagaaaaaaaaaatgtttgttttatagacaagaaattgggaaagaataaattgaacagaacataaaaccctttcactgtctaaaaacaattggattagtctctggttcccacttaagttttaaaatctctaaaattaaagtatcatgtgaaagtcatgaaaccagtttttaatgtacattttctcaattcctgtttgccagtgaatagactaattgtccccaaaccaaacaaagtccaatcttacagagctaaacaaacagaaaatcaaaataactggaaggagcatcatcatctggttatctggtcatcataataaccagagagtgaatcaactgatcccaggatagtccaaaggaccaaacaaacagctgtcattccagttagtagtacctcacttgacggagcacatcataaagtccttctaagacgtttctaatcaaggtatgtgagcctggcttccaacatacctcagagacatagaaatgccctatgataatcttgatgcttcttccatagtcatgtcttgaatactattattcttgcaatatagtatatgttttcttccactgtcataaaaaaatggaaatgcttcaatctcacctaaagacagacccttccagctgtggatactgagtgtccacacacagcgaacagagccctgggttagccatcaggagaacagggaccactctcaactcagtcttttcccagccttgtgtccttagcaagtctctgcaccacgtcctcatcggatgggggcagaaatgagagagaaagggataaagccagctctacatgcctcttgaaaagcagaagcactacaaaatgtaagatattattgttgttacaatgcaaagggtgaagccaggagcaccccactgtcatgacacagagggccacggcagaggcccatggggatgtggggcaggtatcaacggatggcctgtgtgcacagtgagcccatccttctccattcgtgcttggcatcatgaaccacgaatggttcttcttacccctgaagaaccattattgttaagttctgcagtccctgctatggaaatgaggctgtggtgatgccttggtgcgatggctcttaagcaagaatggttctccagggttaagaagtagaaggtacactttggaaggccaagatgggtgaagcacttaaggtcaggagttggagaccagcgtggccaatatggtgaaaccccatctccactaaaaataacaaaattagccaggcatggtggcacgtacctgtaatcccagctacttgggaggcggaggcaggagaatcgctcaaacccaggaggcagaagtcgcagtgaactgagattgcaccactgcactccagcctgggcaacacagtgagactctgtctcaaaaaaaaaaaaaaaaaagtagaaggtaacgcacatgtttacatttttccagaatccttagtgcctgcaatactagagcatgtgctttcttgcatatggccagaatagatcatctggcacctcccagagttcacccctaactcccagggtcattatgggagcagaaggattgacattctcaatcatcattgaagaaaggatgcccctaaagagaaaataatgcccagtacatcataaatcctacctcagcttttaaggcaggtgatttgaatcctcagcagtaacttcatctctaagggtagccatttacaaatctgagagttagccatatacagtaatgtgaaaagaaacacctttcacaaaacagcactatttcggaaaaagaatttattctgcttagttttatgaaattcttttctataacctacctatctactatttttgtctagatagagatttggtcctttcaaacacacgtgcacacgcaatgccctcctgtctccttttttgggatgctcctccatctaaaaaggcagtggaattccaaaggttactaaatatactctggctttttcatggcgtgcaataataaaataatgctctcttttcatctgtttttgtctttttaggtaaaagtattttttcaggaaggaactttctaagatcattcagtacgtgtttggagtgaagccctgttcattttcatttctacaaatctcataccagaaagatctaatgcagccccactcctatgtgtagcttccatcagtgtcaatgccagagaggcccaagggccccctcgcacagttgagtatataacctcatgagtccacaacttcacttccccgagtgaagagaagaatggaagtgaagaaaagaatggaaattcaatcggtaccagcagactgtcagttcctccagtagcaaacaataaatgcatctgagaaagttctggtgaaccaatcaacaggggggctttgttctgaacttggcggagcctacctcgtgccttgtaaatgtcagtgtgtgtacgtgtgagggtctgacattactcagcagcacataccaaaggccaggaatttggcagagtgaggctgattacaatgcctaaaaatattctgttttatcaaaatctattctgatgccttttagcatgtgggcaaaatgctagagcagcaggctctttaggaagcggaaattctgagaggcgttccaaatatccaaaacgacacaacctcattgtgtaagaagtaacccttcagcttaaattcttgttgtttgtctatttttatctcaacagaatttttttttgtaaaccatgtaaggcaatgatctctcctttgtaaacatttataaaatgtaatataatttatttaacaaataattattgagagcctattatacacaaggcactttgttgggcttaacagggactataaggtcaaataaaaaactgttcttatttttaatgtgcctgcaataagaaaagcgttaagacctttcctgagaatgagctgctctgggcaaggcaaactgtgatccaggctttagaagaggcaagaagcaagagctagggagaaacggacaagggaggaattaattttctgctaagaactggcaaaggcttcttgagggttgtggcattttgatgtgggcctttcagagtagatagagttggccaggcagagctgaggagtgctctaggcaaaggcagcagcatgggtgtgtgcagagatgggaagtccagggcagtagaagaattcgtgtgaggtcttcagaggtcttcatcatcaccagggataggatttttccaaaatgagaaggctaatggcacctagaaaatgtactacagtgcggtagactctaaacaaaaggaagggtatcatttctgtgaaactgccaaagccacaagagtgataaattaggccggagggaggcaaggcttaatcctcatttgttgaacatgttaaaaacatgtgtgtccaccacgtacatgtacacacaaacacactctaggcacgccaccttatagcaattcttcctttttcagcaactgatgtactctttgtcctgggttttagtttaggtagctccctctcattacagattgaccaagaagctgcaacttatgtttctaccatagagtttgtgggagtaaatacaagaggtgtgatgtctatcttctgtgggaagagctctggaaggcttgctcaggaatcacctttatgtttacctgtaaactgatacttaaagaataattgtctagcaattgtgaggaagactgattgccaagttatgacactaccagatagagccagccaggtgctactgcatagccattcaacaaacagttactcagtgctcactgtctacacaggtatgaggcgatgaaaattgtgcctgagaaatgcctaataagacagaaataagagcaacgccatttctgtgtgtgagagaacaggactggtcaatctactgatggattgcagtctctctcttatacccagatgcctatatgcatatacccttatacctatatgcacgaagaagagctagaaataaaggatatattctagcacaaaaggtatattgaaccaaacattaaaatatatgtgtgagcccaattttcacatttctaaggccagaattgtagcagctgaagtcaagtaacttctgatcatcggcacagttttcatgagtgttctccataactccctaactcaagaagacagacacaaggccagttctggcatttggttcattaccagtggccacagatatactttgtttttccgagcaacaggtgagttgttcaaccatgcattccctatgaactgtgcatctgtctaccctggggccacctaatgtcacaaccaaccaaccttagccaacagcaccactgatggctaaaccacttagtggtttaacttccaatctcttcctcactgcaccttcctacagaggcagatcatgcatataccatgtgcccagtttttctgtctttccccaccctctagccatttactgtcacttcaggcggccttttttcacacttcactctctacttcattccatgtagaaaatgatctcaggaaaatctccatccattccaaccataaaccaaaaatttattttattctttagctcctatttgagtctcaccttgtattataaaacacattaaatatgtatcatttcacttgattctccaaacaaccttgtgagatagatatcacttatcacaatttacagagaagacaagtgccttttgccagagagtttagctagtaagtgaaagaacaggtctacaaaccaaggcctcttgattcccaaacactttgtccttctagggtaaaacaatagtactaatggttcacctgctataaataagaaaggagaatttttacattttgacatgaaattaacataagaaaccaaaacttccaacagcaatatcatgtaaaactattcagaagtctccttcagcatctagacaatgttctgacttagatagctttttctcaagaagggtgtctaagattgatgtaatcaatgctattttctacttatggtaaataattcacttaataacttttgttctatcattcattgcaaatacaatattttagtttcatcatgttgtacatggaatagcctggatagttagtattgctttgaactctactacacatactgctattcttgcattaatttattcagcaaatgtctattaaatattttctatagtaaagatgctacaccgtacagtattaggaatatcaaattatgccagcacactctaagtcgatctatttataaggtgtcatccatgcttaattcaggtatcatgtaagtgattcaaactaaatgacaggaatgaagagaacccaattatggttaaattttttaaataataaaaccaattggcacatttttatgtatttataagaatatttcataccatgggagcagaatggaggaaaagatgaaagggaaacaaattttagtttgtttccttaaagaaatatatgttagattttctcattcctgcctgccccattcctctgtctgctgaacagaatcaatgatagcagcagccgagatcccagtggaccctctggccaaatgcagctgcatgagtaagcccaggtaaagacaacaaaggaactcccctgcccaaatacagatgtgttagttttaaattgtttaatttaactttgttgtttaaatttgttgttgttaaatcactgttgtctgcagatgagaagttgcagggtagtttgctacacaacaatcgacagcagatagaacaaaacagaattccctaaagactgcagggccagaagaaagaattgagttggtcaggacaaaagagtggataacagtactgactaggataagcgtagacgtaaggccaagagggggtttccatgaaggagtgtgaggagggcattctgggacagcagaaacagagtttgttcaggagcttttcctgggtataagagacagactgcaaccagaggaaatacagcagataaggctatgcattaggaatgaatttctccattccatcattttctcagtaaactgagtaaagatctcaattgctttcaattgtttattataaatgaaaatttgctttgagattcattttaaatatgcattctcagtaattctttttactttaggggcagaggatgtataacggatgattttcctcttagccatatggaagagttggacaaataaactaagtaagattctaagaagaaggaagattaaatacagctagattgtgatcctaagacaaaaatgaaggagctaaggcatgcagactagctggtcagttatttgctgacaccttagtattctagtgtagatggaagactgaataggaggccaagaaaacaacagaacaagaaaggcaggagccatgattaagaatgagttgctctgtgcaatcatgttgggcgggacaaaaagagaaagtcaatttttggacttaagaactagaaattaagaggcaaatatgatcatagcaaaggagtaaaagtagaaaggaatctggaaaagacaaaaaggaagttggtcacaacactaactcatccatcgcagagaaccagaggagttggcagcagatgagggaaaggaaatccgtgtggcagtgaggagctcagcaactggcacaagagagaactatgaagttggagaaaactaagttaggaagggcaacgagcagaagagaagatgactaagaagagaaattcttaatagtaaggcaacaagaataaaaccaacgtgctcttaataatatgtgtgttgcattgtattaaattctttggaacacttcccatgaaacccgatcctcaggcatgaaaataacatgtcaaacctccccatgacaggttacctaaaaataacttccaggtaccaggggaagctggtgaataggctggagctcagtgatttgtggatctagataggctttttagatccagaaagtacacaatccagcaattcattccaagttagagaagtatgtatgcctgctgcggcccctctccagggctaccaatgtctgctgcactctcactcctggtagtcagctgagtagtctggcatagctggttttcaaaatgcaattgtcacaataaatggataggtgccctctgatgtccctttgagatccaaagtcctaggatcagggccagctttctgggcatgcaatctgtgcatttgcacaaggctctgtgctccagtgggtcctgcacttggtttaatgctcagctgctaccatcttaaaattcttgacagtttattagcaagatcccagcattttcatcttgcactgtgcccaagggcatgggaacccacctcttgcatcagtgtgacctggatgtgagacatggagtcaaaggagctcattttggagctttacgatttgactgccccactggatttcagacttgcatggggcctgtagtccctttgttttggccaatttctcccatttggaacagctgtatttcccaatgcctgtacccccactgtctctaaaatgtaactaacttgcttttgattttacaggctcatcggcagaagggacttgccttgtctttggtatgactttggactgtggacttttgagttaatgctaaaattagttaagacttggtgggactgttgagaaggcatgattgattctgaaatgtgaggacatgagatttgggaggggccgggggtggaatctcatcttgaattgtagctcccataattctcacatgttgtgggaaggacccaatgggagataactgaatcatggggcagtttcccccacactgttctaatgatagtgaataagtctcatgagatctgatggttttgtaagggatttcctcttttacttggctttcattctctcttgtctgccaccatgtaggacatgcctttcgccttccaccatgattgtgaggcctccccagccacgtggaactgtgagtcccttaaacctctttttctttataaattacccagtctcggatatgtctttatcagcagtgtcaaaacagtttactacacactgaacatgacaaattatgtaactggtcctgcctgggatctgtgtcctgcactaaaactgaacaaggactgaattgccatcacttgtgggatattttctggacttctttccttacagtacaaagtaccacaccaaatgtataaaatctcacaatgcagcaattgtccaaggcatcttactgcttctatcttgactgtgaagaagagggtacaataacaactcccaactctcagggtgagaaggatgattgaaaaggaaatccctgtagatggatgagatttttggtgatctctgaaagtttcaattaggctttgcagcatatttctagagtcaattatcaggaatatcaagcccatgctatatcaaggccttcatcactttctagattcaacaaactttttccataaatggctatagagtaaaattttaggctttgtggcacatgtgatctttgctgcagtgacaatgtgaaagcagacatagacaatacctaaacagttatgtctgtattctgttaaaaatttaattgcacaacccaggtaccaaggacattaacactggaaaagaaacttttatacagattacagacttcctataaattttgtaaattgttttgactgtatccattagttacaaaataatatccaatatcacatatagcattaactcaacataactctttggttccctttaatcttgaacactttccgtatcattctttatatttatgacattgatatttttagaggatagtcatttattttgtacactgtcccatcttatgatggccccttcatttttgacatgggtaatttgtgtttttgatcaaagtccaatcctgccagatatacactgaattaacagtgttttgacaaagccaacatttggtcttcattctgtttcacatttgttttctatttcaataatttctactgtgtgtttattgtttctttctactttattcggggataatccagtctttccctttcaaacatatacagatttaccttttgtcatagatctattcatttattattgagtttatgttattatttattttcaccttaaattatacataatcagaaaaaaataattccagtgattttattactgttttgctttgttctgaggggacttcttttatggcccagtatatgattatttttgaaaaatgtgatgttcaacaaatataagttagctgaaacttattgactgaggttttttgaatcatctatgtccttcaagaatcagttcataagaaatggaccctgaagaatttaggtataaatgggcaccatatttgcaacttactttttaacaattcagcgaaaaaaatatatatatgcatgtgtttatttcattattttacactattttaaaaacttttctgtgagtaagaaattatccaaaatgtttaaaagtaaagccaaaaaattaatattaaaaatatttttaattgcaaggacctgtgttgagcaggatttggcccatgagtcaaaatttgccaaccctgctgtagagaaaggaggcatctcattgtatcatagattacagtaaaaatcggatgacctgaagtttattcccttggttacctgtgtcacataactcagactgagtcctttcttcactcggtgtctcagtttctctatctgctctacaaagctttttttttttttcaatttagtattaaatatatgggaagccttaggaaaactgtataaactggcctgggaagggttactggtctctcttcattctgtctcctcccccatttgccacatacaatgcactaaaatgccttataaaatgaaatggagggaagacacagagaaggcacgcaacaggttgaataaatgatgaggcatcaagaagatgaaaagcagcaggatctttgaaggaaagatgtagaccataaaatggggcagcaaattgaaaagacgaagattggaatgaaaagagtttgaagccaaaccacagagaattcaacccaatgagatcactagactgaggtaggaaaagaaacatcatgatatacttccaaatgtgtttccagtctctgctcattaggaataaaatctctaccattgtgtattccttacacccacagataatttgatacccactctggggtaaatctgaatatcttagctttccctaagaaaagacgttgccctcagattgctgacaacctgcagaaattcacacaagaagagaggaatgctgcctgggtgttgactcctggagatgctgtctctagcacattatgtttcacagcatttattaataccattattggcccaagttacccacatcacttgctattcctgtaatcctttaaaggcttgcacaaggaaacaaagaacatacccatggatattttttaaatgcctacaatattttctgcttgacatatgaaggttatccaaaccatggtctacattaaaaacaaataaagctgagtctcaccttatttatttatatccagcccactataaaaacaaggcctctctcacctgtctcacattgttggggttgaaagggtcaccaaaaatcactgaatgtgaaaaattaactccagagagagtatgtactttgactaatgttccagaactaaatggaattggtagcaagctgcaatggttttaatgtgccccacaaaagtttatgtgttggaaacctaatctctttgccctcatgaaaggagtagtggaataatgttgctatcactgcagcgggtttattattgcaggagtggctttgttttaaaagcaaattcccttggctctgtttttcttcatctttccccttctaccatgttatgatgcagcatgaaggccttcaccaagtgcaggtgccatgctcttcccagcctttagaactgtgagctgaataaacttcttttctttataaattactccatccgtcatatggtgttatagcaaaagagaatggactaagacatgggacaaagattcagtaggcttattaaattatctatgtaactacagagagctagcgaaccaatttcagcttaggggaaacaggaaattcggaaacaggaagcccagagaaaaatggcactggactgtgactcctattgcctcaggttagatcatctgacttcacaaggtaaaagcttctgcacacaaacctgcttcagcccttttccaccaatgggacacccttgctatgtagagtagtgcaaaactctgtcatttacttgtcatgggacattgggtaagtcactctgtattagtccatcgttttgctataaagaaatacctgaggctgggtaatttataaagaaaagaggtttaattggcttatggttctgcatgctgtacaagcatggcactggcatcttctcacttctggtgaggcctcagagagcttttacttatgatggaagctgaagcaggaacaagcatgtcatatggtgagagaggaagcaagagagagagcaagaggaggaggtcaggctcttttaaacaatcagctcttgcgtgaactcactcatcaccaaggggatggtgctaagctcttcatgagatcagaccccacgatccagcgacttcccaccaggccccacctccaacagtgtgaatcacatttcaacatgagatttggaggggacggacatcccaactatatcacacgtgaacattctcagcctcagcagtcttatcagaagaatgaggataacccagtaaactcaagcctaagtgatggaggtgtggaaatgcttgacagacagagttgttaaaggggaagctatgtcatcataaaagggaatgagctgatgactatgaccatgttcttttcaggagacacagtgaggtgcacttaagcagatgtgattggtgcttccaaaccaactcgtttgactgccaacaccaactactctcttcctgaggtgatctctggccattgtagcccacatggaccacatggagcagactagggagttaatgtatccctagaagcagtcctcaaccgtgactgaaaactccagcttcctcatcctgggataggagcaggcacaacaactctgaagcatgttgcatagtgtccccctggcagaaccaaacctcagctgtacacagcagtgacctacttagcatcacactctttaatagttttctctttttttcctaactcacctccctactccctgctgctgtttcctggaagcacttcccacataaactatttacactcaaatccttatcttagagtctgttactgggtacttagccaacctaagatagccaagtagaaatacccagcaggtagtctaatatccaagtctgggagttgtgtcagcaggacaaactgtatctgcaagttgttgtgcattcatatttgctatgtggaaaagagtggttagagtgagtttaaataaaaattttaaagtgaggcagaagctgctaagacaagagagaatttgaggaagaaatatttccacagaggcccaaaaaatcagcaaaagaagatgataacaagaacgccccttataataaacaaggaatataggagacagaaaaaaaagctacaatgaaacctgttttacttctagcacacttatgtcttatcaggatatacacagagagcacaaacgtcctataaaagataaagaagcatgtccctttggcagtctatcagttgcactcagcatcttcaggagagaatagcgagggcatctgatttcctatccagtattgccccctcctagaactcacagatgcaagttgataactccttttttataacttaaggctgcagctgtcaggaaagagagggagacaggctcaaccactctcagtggccagaaatcaggtaatgtgattatttcacctccttccactaggtatttcagcaaatcataaatgtataatgacagctacatttacttctaattctggacatgagtattactagtttttcagtattgctaactgtcaagacatactataaattgtccccttgacccacctgatattcaaaatatcctactggcatttaatctcttgtgtgatgctctccccttgagtgtaggcaggacctgtgacttgcttctaaccaactgagtatgatgaagttgatagaatatatgtaattacattacataagattctaatgtctttcttgcaagcaaagtttcacccttatggcctctgagggagcaagtgggtatgttgagaagaaagagtgacctccagctaacaaccagcaagaaatggaggccctcaacctaacgtgccacaaggaactgaattctaccaacgaccacatgagcttggaagcagatccttccccaattgagtttcaggtgagactgcagctccatttaacattatggtttcagcctcatgaagccaaggactagaagagccagctatggtacactcaaactccggatgtacagaaactaataagtgtgtgttggtttaaactgctaaaggtgagatgataaatgtgtgttgttttaagctactaagtgtgtgctaatattgttacacagcaatagctaaataatacgctaactataatcttgtattgacttactggcttttagtcctaagaattttgctatttatattgaatacttttaaaccaataaaccatgtggtttgcaaattattggatttgtcattgcctttttgaaatacaggctaccaaatcagccaaaaagtttccaccgacacacaattccttgggtgagtgataagagagaccctggtaatagccagatatgaggaataacttgacaagtcttactgtgcccctgtaggtcagaatcaacctccaaacagaaggaaatatttggtgctgtgagctccatttccctcacacttgagcttcaggagaaatttgagaaagccaagtgtgagtaatgactagctaaagagccatgatttgcaaatgttcaacattattaatcaacagggaaatgcaaattaaaaccacaatgagataccaccatactcctgcaagaatggccataattcacatatacaccatggaatactatgcagccataaaaaagaatgagttcatgtcctttgcagggacatggatgaagctggaaaccatcattctcagcaaagtatcacaaggacagaaaaacaaacaccacatgttctcactcataagcaggaattgaacaatgagaacacatggacacagggaggtgaacatcacacaccagggcctgttgggggttggaggactgggggagggatagtgttaggagaaatacctaatgtaaatgatgagttgatgggtgcagcaaaccaacatggcacatgtatacccatgtaacaaacctgcacattgtggacatgtaccctagaacttaaagtataatgattttttttttttaaaaaagaatggccataattaaaaagtcaaaaaacaatagatattggcatggatacggtgaaaagggaacacttttatactgctggtgggagtgtaaattagttcaaccactatggaaaacagtatgagatgccttaaagaactaaaagtagaactatcatttaatccagcaatcacactactggctatctacccaaaggaaaagaagacattatatgaaaaagacacatgcacactcatgtttaaggcagcacagttcatagctgcaaagatatggaaccgacctaaatgcccatcaaccaacgaatagataaagaaaatacggtatatatacaccatggaatactactcagccataaaaaggaaggaaataatgtcttttgcaacaacttgaagagagctggaggccactatcttaagtaactcagaaatagaaaacaaaatattgtatgttctcacttataagtgggagctaagttatgaggacacaaaggcataagaacaatataacggactttagggactcagggatgagaaggttgggagggggtgagggataaaagactatgtattggttatactgtacactgcttgggcaatgggtggactaaaatctcagaagtaactgctaaagaacatatccaagtgatacggtttggctgtgaccccacccaaatctcatcttgaatttcaatgtgttgtgggagggacctgatgggaggtaattgagtcatggggccaggtctttcccgtgctgttcttgtgatagtaaataagtttcatgagatctgatggttataaaaaggggagttcccctgcacaagtgctcctctctttgcctgccaccatccatgtaagatgtgacttgctcctccttgctttccaccatgattgtgaggcttccccagccacatggaactgtacgtaagtccaattaaacctctttcttttgtatattgccagtctcgggtatgtctttttcagcagcatgaaaacagactaatacaccatgtaaccaaaaaccacctgcaccgcaccccaaaaactactgaaatttaaaaaaaaaatttaagagctatgatttgaaacaaaaagggcatgagatttaaaaaaaaaaagaattatgttcttgaaaaattattgagactacagagcactgaccaagacccaggagaattcaggactccagtctgcatataaacctatctgataaagggtagtcgttaaacaattggcaagagcaacaacattatgctaactggcataatacccttgataatgaaagaagggagttatacaatttattatgaaatgactttactggaatccgttgtaaccacacacagagccgagaggagcatatgaaacaggtcttactctatagtcaagtcatatcatctaacacataacagttgatgtgccttggggtaggcggtagttggtgtctcaggagtgacttctttccttccataaagtcattctgcccaactcctttacaatcgtgggttctttaacattggctcatgaaacatcctctcacagtcacctgtctcatggctggcaagtcctgtgagaactctcctctcacaggaccccacagtccctttagcttttctatgtgcccctccagcgacccccctttttttgtttcagcctccaacgtgattgttagttattcgggtccatatgcgtcctctatggatgaggagcaaggaatcagggtgtcgggaaagtgtgagaaagagttagaagagggtctctctttcattatatctctgagaggctgagatctctcacagctagaggtagtctccttgcagagatgttactcctctgcccaaacaggatgcacttctcttaccctgggcttcccctctgtgagccacgcatcatgccatggagaccactggaggttggtggaagcaaaaggccatcctctacctaacctaactcttgaagcttgtccaaaggatacattctacttcttccccaccacagacacagaatactggggattcttactgtgtagcatgcagcatccagccacttgcagagtgtccactcagtttgtgctcaccttatttcatggattggccaaagagataaaggatttcctgtgagtgttcccgtatggaaatacccattctttttcatttcagatctccatcatcccacactcaattcagaggaaatcagaccttattctccctttcctcaactttcatccaagaagtacccttctcctcatgttcagcctaccacccactcctggatagggaacaagaaggaagaggcagatcctcgtcggtctcctctagagtacaaccaatggagcatctcatggtcagtgagatgagttcctttccctccagtttcttgatggattgaaggtcattgctctaaggtcctgttatggactaaattttgaccccctaaaagtcatatgttgaagccctaacctctgatgtgactatatttggacacaggatctttaaaaaggtaataaattaaatgaggtcataagggtgggccccaaacctaataggactgctgtccttacacaaagaagaaacaccaggggtgagcatgcacagagaaaaggctatgtgaggacacagcaagaatatggccatctgcaagccaagcagagagacctcaggagagagctaaccagccaacatcttaatcttggacttctagcctccagaatggtgaaaaaataaatttgtgttgtttaagccatttagactgttggtattttgttatagcagccctggcaaacaaacagaggtccagttgaattttacaaactggcaaggatcctgactggtctactagctgacaggagatctctccagatgtcagggatcttaggcccacctgggacccccaggtttcaaaacaagacccaatctctacccagaagcttctggcattacccctagatgatgtgtaagtattttttctattgcaaaatttgtgcgctgggctgtcagatagctaacttatacggtttggaatttacctctcagctcagtagcataagggaggtctttgttttctcccccaaaatgaacgtcaaagatcctaccagaaccttcagcaaagcataatgaatccagatacttggttcctaatagcagcagatatatgccctgggagacccatatttggacttcactgtcttttctactccagatgtaaattttctaggttattattaaagtaaggttgtggattctcttgagggtgatataaaataatcatagatattttaatccctctgaatttaagtatttcccattgaaacagagcccctttttctctctcacttgcttataatgactcaaaagggaaccagtgaactgaaatttttcttaaccaaatctacaaagtgtaagctttcttgtcctacagggaaaagcctgcacatactaaagttatctaggttatcttggaaagttttagctgtccagttcccaggacaagaattcaaagctttctaactctaaagctttcttattctgaataatttctaaatgggcttcctttgtaagcaatagtttgtactgactcaattgcttacaagggtcacattttgactagacatttcctgcctttgggctaatgaattacatcataattcaatttgaatgcctcaaagtcatcagccagcaccctcagcattgtggggcagtacttctaaggcaatagtagttactgtctgagagctgaattttttctgcagaatgcaccatcaataaatgatttttatttgccttccctaaagcaaggcttttgtgacgttgaatttgtaagttgtattttccatctcacaaaagatttcacaaggaagtagagtttggggattgcttctctgctcttgtgcatcccacaaatcctcacccacatcctgactcctcaacaggtcaccgtgttaagagttggtaggaagaaaccctttcctttaggatttttcctcttctctataccccatggccacctagtgtaatcaagcccctttactttcttccctctgggctcttcttaggttttccttaccattcaattcaacttgtttccaagtgaagggaagaggatggggaatgaggcttcccaaggatatgtccagtatctttatgatactgagacctttccaagtgctgtcatttgaatgtgtcccccaaagtttgtgtgttagaaacttaatctccaatgcaacagtgttgggaggtggggcctaatgagaggtgattaagtcacgagggctctgtcatcatgtatggattaatgtcattattgtgggagtgaattaattatctcaagagtgggcttgttataaaagcaagttcagctctctctctctctctctcactcgctctcaccttccaccatgagatcacacagcaagaaggctcttgccagatgctgacaccttgactttctagcctccagaaccatgagccaaacacatttatctttgttataaattgcttggtctgtggtattctctcatagcagcatcaaactgacctacacactgagcacctagatcagactcctcttagaatatctcctgagtagcatcatgctacaattctctacctctttctccactgtgagtcagtaccaaatgctgtctctcttccttattctagccatgactctggatggagaaataagattaaaacacacacacacacgcgcaacttactggaatttatagagcagttacttcatgccagacactgtgataagtacttcagaaacattacatcaattaatcctcacaaacaactgttactcccattttataggcaaggatattgagacacagtgaccacacaaatagcaagtggcaagccaaggtttgaatcccagtttgaggtcaccactgtgctctgtgaacaggacttatgatggccaagtactaatattacaatattggaatttatactctctggagttacgattcagggagagatgatttggaagtataaagtcagatattttcatattaaatctaggtcaaatgttctcaaccagaggttatttgcatcactctcccaccaccctgaccaggagacatttggtaatgcccagagacatgtttggttgtcacaactggggactgctactggcacctagtgggtacaggctaggggtgccgtgaaaaattccataatgcacaagatgcaccacccccccccgccaaagaattgcctactccaaaatgtccacagtgctgtgatccaaacaccacctctaggggtttggtttagttgccatattttcctctcccctacccattcttctctttggattttaattctctgtgtccattttaacagtcttgttttaggttaatcttttactatgactttccaaggtccttttaggaagcaaggggagtgtgactgaaggaaaaactgacattcaaaaaatctcctgagaaatagcaccctgcttggaacaaaatcctctgtgaacactattttgggaacagtgaccaaacaagccagtcgtctgccacttacacatccaatcctgcttactaccactgcttcctggaatcctgtcccaagaaaggggctaggggtgaggagagtggttaccctggaacataccatttctatgagaaatcttaaaagaaaaaaaaaaatgaagacaacaaacctgtaacttgatgccagcctgaaatcctcttcactaatcataagtcagagaaagtgaaattatttccatcacactcatacagcatgttctctggggtttgcaggaacagaagagacaatgtggagaaaatgcatcgtctgtggttctgaaatcaaagcctaattagtcagaagacaaatcccatgggcttcagtactaaaacctatgtttcaaccatgcctatgttgggaaagtcctaaaagtcaaagaatgataaggcaactttagtggagaacatctttgtttacattacaggactcacatgtaaactttgaaagcatgcaatcaagtgaacaaaatattttaattggcctttaaaatattattataagagcaagaccaacttgtttaaagtattgcctggctggtctctggttttggcagctcattatactgtcttaatgccgtaagatttattaatggtcacatgcatttctctgaaaagcattccacattttatccaattctgggtaaaggttatttataccttagaatgctcttaattgcttcacattaaagaaaaatatggaataagttataagtattgcctcatttaatgtattttcaaattatagcgttttggcaagttttgctcattgacttctttaagcttgggatatcttttatcccttttacattctctcaaaattttccttatcactcaaaagctaattcagataccaattcctccattaatctgttcctgactcccacatcagcattaaccaaatgtgcttctctgctcccaaccatattgcttctgtattcactaggcatatgtaacaatcattttgctctacattatatttgtctctgtctttcttctttaattaaagtaattaaagtaccttcagtgggaaagacagcatgttattcattttgcatctgaggaaactgatagggtgtctggaattagcatccaataacgattgattaaattacatgtaatcatatgagttttatcaaataaaaattgcttcaagtttgttcttttggtttgtttgaagcggtttgctcattttaataattacatgagacccaagcctcaatctcttagaacaggtagctctagtgcctctcctgctctagacttaattttgtttccattggtgccaggatatgaacaaaacattttctgatgcaaatatagtctcagattgggaccacaccaaataccacagtccaagtaggtgaataatgcactgaatatttggcctggtttggctgattgcaggcaagctagctaataattaattaaagtaggatcttctgtatttacttcatttcaaaactccttgacactctctcactcggcaactctcattatcaactaatgacatttaaacacctaatacatactaggcatctttaacaactagaaatacagagctcagtaaagacacagaactgacttcatatgaacaaatgtagaaacatattaatagaagattctctcttttaatatctaaaagattgaaaagattgtttaacagaaaatattgacctagaatgtgacttgagcaggcaagtagtttgtttccaagagaaacaggtactctcctagtaattgcattttaaatatacacgatgtgccactgagatcccataaataatgcagaccaaggtctctaggccatgcatgggaagagacttgcaaagattaattcaaagacaaggatcatctctgggaaaatcccagctgcaatgctctactggtattctgcatcagattctccatggtttctacctgaaagccagaacctcaccaatctagtttgattttgttttcttatggcctgatacttgatgtcctgtagcaggaaaactgctcccaagctgcaatctgtggcttgaattctgcttgcaaatatcaagaatggtacaagtctttctgaagctgtgagtttattttcacaaaggaggaaataagccacaatgtaagaatagatcccaagttttccttatcatttgcaattcttacacctgcaacactggctggaaacccagagacatgggttttggttctgtttaggcttttcacaagttgtatgagcttgggcaaactacttaacttctcaaacccagttatcttatcttcaaaataaaagagattgacaaggttatctctaagatacactccaaatctggaggcctatgactatttggtttttaagttcagctgtctcacgtttctcctggaacatattgtcaggatatctggagaatcaagcatacctactaaaaactgttaccaatattaagacatgcccataaaagcccggtgtggtggcttccacctgtaatcccagcattctgggggctaaggtgggaggatcactgaggccaggagttcaagaccaggctgggcaacatggtgagacactgtctccacaaaaagtttaaaaattagccaggtgtggtggcacatgcctacagtcccagttactcaagaggctaaggcaggtggatcacttgagcccaggagttcgaggttacaatgtgctatgatcatgccactgtactccagcctgggtgacaaagcaaaaccctgcttctaaaaaaaaagaaaaaagaaatgcccatatacagaactattcagacttcccttgaaatattgtaaattaaattagcaaattaaatttcttattccttctctctagtgatatgatgatctcataaaaaccctaccaaggtcactaagagtagaaatattttcctatttcaaatctatttttgaatacgtaagtattatttcttttgaatctacattatgtattcctgagtagtatgtagcaattaaaagatgagcatctttgtaatatttatttaattttgaaaagattatctcttcaacttatcttcaagatgcatctaaatttagatccatcttgtttttaataatttcatgaggaaaacctggcagaaaagaaccctataagtggaaactaatacattccagaaagaaaggactttccttcaaaatggaaaaatttacagtataaggaaggaggcccttcaggcaaaacacatctcaaattccttttattcggttttcatttaatattttgcatacttgaagaaatgaaagtaacattagagataatcttatgccaccctcttattttggaggttaggaaaatcaaagccatgatttatggctggagcaaatgggtgactgatattggcatttactgaaattgaaagctctagagatgatcatttactgaaattgagagctctagaaatgatgtataggtgaggaggcagacagagtgaaggaagaggagaaatgatgagtcaagagtttgaacttgttgagactgagatgcctgcagaacattcaggaaaacaaagtccagaaaagaaatggatatacaggtcttgagctgaggagaatttaaaacgtgtgtgtgtgtgtacataaaatattgaaatatacacacatgtgtaaaagtatcactatgtaaatcgtaagctttagccatagccatgaatgatagattgatagaaagaatgtaaaggagacaaagggagaactatccaagtgtcagaagaaaaacccagaatgaggctccatggaagtcaaaaaataatgctttttttcccccaacaatgtcaaattcttctgagaagttcaacaagaaagacagtaaaaggtacctgaatttaaggtcctaaaaggtcattgttgacaataacatgagttgtttcagtggagtgatgggtactgaagccagattataaaagattaaataaatggtgagtgagagagaagaaaatggagactaagtgtacacaaccctttcaagttgttatttaagagaaaataaattagagagcaaagtgaagtaaatggaggattttattaagatgggcgtgactgttaaaatgccattggaaaggattcagtagagtggtggaaattggagaggtgagggtaaaaaaaaaagagggaagacaaaatatgcaatggcctttaacagaaattggcagaaaaggatcctgcagaggagttataggttttaaccccttaagttcttaaagggaatgggtccctttttaattcaaggaatggggagaaaagtctagcagacaggcagcgtcaagaagaatttgtagacttctgggagtttcaatggcaatgcctcaagcctgggaacagggtaagcagccctaattaggatttcttctcaaaacttgaagcatgaagaaaacatgaaagaatctcttgtgccttctataggcaacccagctgaagtcaagacatcttttaacattaagagtggatgccacagagccagtggcttatctgcctgatgaatcagttgcaccagcccagaatgaggtgcaattcaaaaaattcttgccccactagtaggctgctgtgtataatcctattctgagagaggcccacgcaagtgtggtgagagtaggagaaaggctgtggactgtggttgtattagtcatgggtctctagaggaacaggactaatagcatagatgtatatatgaaggggagtttattaaggagtattgactcacacgatcacaaggtgaagtcccacaatgggccatctgcaagctgaggagaaggaagccagtctgagtcccaaaacctcaaaagtagggaagccgacagtgcagccttcagtctgtggctaaaggcctgagagtccctggcaaaccactggtgtaagtccaagagtccaaaagctgaagaacttggagtccaatgttcaagggcaggaagcatccagcacgggagaaggatgaaggctggaagactcaggcaatctagtccttccacgttcttctgcctgcttttatcctagctgctctggcagctgattagatggtaccctcccagattgagggtgggcctgcctctcccaggccactgactcaaaagttaatctcctttggcaacaccctcacagacacacccagaacaatactttattcattcttcaatccaatcaagttgacactcaatattaaccatcacagtggttattctatgtattattgaacatgtttttcactaaaatgtgttcattcagttttccttaagcattaagtaatccattagaatgtttttgatgcaagtcacagactatccaatttgaagtagttcaaacactaagaaggcttatgatatggcaatgaagcagcaaagcaatatcatcaagaacccttgtgccttctctatttcagttttgtcatctttagaatgtcatgtgacctctttacagtccaaacatggtattggcagcatcagccaacaactgcagacacaaaaatacccagcaaagagaaggtgaatttcttcctgtatctcaattgctattagcaaggaagtttccagaagctcccaaaattgacttctcctcaggtcttattggctagatgtagtcacatgcccatccctaaatcaatgtctacaaaggaaatgagtccaccatgattgccttagcccaaacataattcactctctggggtccagagaggttgtcacttaccctgaactcatgacaaggtgacaccaggatgaaatcaagtctctgccctcaaggaaaaggggatgaaatggcttaggatagaccagcaactgtcacagcagaattaaagaacacgtttggcaagaggaggagatctggtcacaaatgaaggacctttgttgttagaataaaaaacattcttgtcctccaaaagattaaagataaggtcatcaaacagtgtttgatttcagagatatcttcaaagcctagctagtgaattcatttatttattaaacaaagttaatgggatatttgtatctatgagacatcaataaagttctaaagaaaatttcctaaatttaaataacagatttacttataagcaagtcttccaaaatcccatgagaacctttactttaaaaaataaatgtttacccttgaaaacattctcagtagtagaaaagaattgtcataaattttttggtgttacatttttaattgacaaatatacatatttatggtggacaacatgatgttgtgaaatttgtatacaatgagaaatggctcagcttttatataaccacactcacctctttaccccacccatttgtacactcccagcaactattaggctatcctccaattctaaaattttgtcaaaatgttatataagtgggatcatacagtatttaacctttaggggttggcttttttctatcagcctaattccctggagattcatccaagttgtcgaatgtatgagtcttccatttctttttattgctgggtagtattccatggtatggatgtgtcatggtttaactattcgtttgctgaaggcaaaccaagcttttatacacattcatcaacatgtttttatatgaacatgtttcaatatatctgcaaccaatgtccaaaagtgcaactgctgggtcctatggcaattgcaggttagttttataagtaagagactacgaaacttcttcagagtggttgtcccattttatattcccaccagctatgtagaagtggtcaaggttctctgcatccttgccagcattaggtttcattaccatattttagccatccagataggtatgtgctagtatctcactgtagtttctagttgcattttcccagtggctaacaatgaatatcttttcacgtgctttttgccgtcttatatcttcttcattgaagtgtttattcatgccttttgccctttactaattaaattttttacctgacttttttcttcatatattgggggtttagttgattttttatatatactagaaacaagcctttgctggatatgtggtttgcaaatattttctcccagtctatatattatatttccatccttttcacatgggctttcacagagctagagtttttaatttttatgagatccaacttaatcgatttttcctcttacgcatcacgttttggtatccagatcaacccaaagggaagccataggacaaggagacttgaagctagacattaaaattagcctccttaactccttaaaaaactaaacatagaactacatatgatccagcaatcccacttctggatagatgttcaaaggaatggaaatcagtatgttaaagagatagcttccactcccacattcattgcaacattatttacaatagccaagaggtggaagtaaactaagtgttcatcaatggatggatggatggataaagaaaatgtggtatatatacacaatggaatactattcagcctttaaaaataaggaaattctgtcatttgtgagaacacagatgaatgtggaggatatcatgaggagtgaaataagccaggaatagaaagagtaatactgtatgatctcacttacatgagggattttaaaaagtcaaattgttagaaatagagagtagaatgatggttgccagaggttgggaggagggtgttggagaggtgttgatcaaagggtataaagcttcagttaggcagaaggaataaggcttttagatctattgagcagcagggtgagtacagttaataaaaaggtattgcatatttcaaagttgctaagagtacatttcaaacatcttaccacaaacatataatgggtaagtgagatcttctgtctccttgggtcactttctcctgccatgtttcccagaaactttctctctagatcttttctatcatctctcttcttccagttctcaacttctcaagcaccaaaggacaattccaaggtgtctatttctttacaagatgcaggaatttaactccaaatactcacctgagacttagctcctggcctcctctttcagtatgcaaaaagagtttattgtaagaattttcttgtttttaaaaaaaagccatctacacctgagattaatgctgctgtttcctgagcatttcttttgttgctacattattttttattagacatataactccctctgccaacccatcatctgtgtcactttaaacaaaaaaaaccccacaaactgaaacctcccatagcaggaagagtctcattgaccaacaaagactggattcccattgcaaacactataactcaggtccatgagctatgagcttatgagtagctaatgagacatcactgggttctgcttgggtgactttagaagactgacctaaacaatttttttttttttgaaatggagtctcactctgtctcccaggctggagtgcattggcacaatctcagctcactgcaacctctgcctcccaggttcaagtgattctcctgcctcagccttccaagtagctgtgactacaggcgcgagccaccatgcccagctaatttttggtatttttaatagagacggggtttcaccgtgttagccaggatggtctccatctcctgacctcatgatctgcccgccttggcctcccaaagtgctgggattacaggcgcgagccaccatgcccagctaatttttggtatttttaatagagacggggtttcaccgtgttagccaggatggtctccatctcctgacctcatgatctgcccgccttggcatcccaaagtgctgggattacaggcgtgagccaccgcgcccagccagacaacttttaaagttcattctaaccttgagattcaaagggaccaccataatagtgaactaaagctttgctcactaaagtagtcagacccaatgtctatgaaataaagttgttcaaatccaagtcccaacgccctagacgtcatgggagacttaagaattcctttaagcagccattacagttcttctgcacttctattttatttcaaccccccctcctggtggcctctatcttcccctgctgctctggctcttgaccaccacccctccttggtgactatgatgtcactgctcagggacatcactcatttatcaccatagctcccagataggctacacttatcctgcagtgaagacttttcattgagacaggaagagttctctcatcatctttatagatattaagagtttcccaaaagcattttcctttctctctctggttcctaaataacttctacaaatatggctttattatcttcatttttcaggtttttttcaaagcctctatctcaagttgcttagagtacatgcacccagggccaggacagcagatatgaaagaggcaactcataaaatcaaatctaaaagcactcttttattatttgacttcttcctgcaggtgaattacctatcaactcaaagtactccctgaaaattagaagatagctttgtatgcttctgttctatatcaactttagaggctttcaacctgttcatccatctctatcattcttattacttctcccagaaggatcattgagtaattgggcaaatgagacatatagctacccatgacgccatgccagagttcccaatgcatgttcctgtgttcagagctccccaagatcaccctcaggctcaataatcttgaaggatttcacagaacttcagaaaactgtgatactcacagttacagtaatactacagtgaaaggaatcagattaaaatcagcaatggtaaaaggtacatagagcaaattttaagagaaaccagatacaagtttccagttgtcctctcacagtgaatttgtgtgaacagcttaattctcccagcagcaatgtggaacaacatgcacagagtattaccaaccagggaagctcacctaagcctttaggccagagtttatattgggagtcatttatatgggtatagttatccacccacatggctgatcttcagtctccagtccctctagtggtcacattgatactgtctggcccaatgtcagacataatggaattatttgcatagattttctggccccaaggcttctaggtaaacagacactgttatcagggaggatattctaagggcttagaggttacctccagagtaagggtcatcctttctttggattgtgcaggatgtgaacaatctgctgagctgatcctttactatacagtttcattggggccacctataattcttaacttaaaaaactatttcattcaagatgcaaaaattgcttaatcatcaacataagcatgaatcacattctagccattctcccctttaacttttcaaaactgaatagtcttaatctttgcagtgtgttcccaagtgacagtgactttattcctttggtcatttcccttctttattttaattattttagttgacacatacagaacagaactgcatccagcagtcaaggttcacctaatactataatatacacataatattaggaaaatatattgtgcccaaaatgtttctgtttatatctcaacatttataggcactctaggcaaaaggaatggacctatatcttcagggaacaatcaaggcttaggttcctctcctagctaaatgcaataaatccagtacattcaatatacacatatagttcagaaacgttaactataaatgcattactttgtgccttcactaacccacaaattatacctattcaaaaggaaaaacttcttcatgtcataaaaggagacacgaataatcaaaaaaccttaagtaataactataacatatgtaatagggaaaagttttaatatccttgatatataaagaacccatgaaaagaaaactgttaaatgtttaaatttttaagtggtcatggggataaacggagagtgattgctaatgagtatggggtttcttttttgggtgataaaaaatgttgtagaaatgattgtgctgatggttacacaactctgtgaatatagtaaaagccattgaattgtacactttaaattagtgatttgtatagtatttgaattatctcaataattatacctcagtggttatatctcaataaaactactattacttttttaaatggccaatctctctataaattaaattaacagttgaccagtatgtaaaatgttttttcgcaagtgctggtaacagtgtagaataatgatctctttcacacagacatccctgatacaggttgagtatcccttatccaaaatgcttgggaacagaagtattttggattttggatttttttcagattttggaatatttgcatatatataataagctatcttggggatgggacccaaatctaaacacaaaatttatttgtttcttaaacaccttatacgcatagcctgaaagaattttttttttttaaacagaatctcgctctgttgcccaggatggagtgcaatggtgagatcccagatcactgcaacctctgcctcctgggttcaagcaattctcctgcctcagcctcccaagtagctgggattacaggcacccaccaccacacctggctaatttttgtaattttcgtagagacggggtttcaccatgttggtcaggctggtctcgaactcctgacctcaggtgatctgcccacctcggcctcccaaagtgctgggattacaggcatgagccactgcacccaccttaaataatatttttagtatttttgtgcataaaacaaagttttgactgcgacctgtcacataaggccaggtaagaaattatatacttgtggcatcgtattgagaggtgacagtgtgctggcagccctcgctcgctcttggcacctcctcggcctcggcacccactctggccatgcatgaggagcccttcggcccactgctgcactatgggagcccctctctgggctagccgaggctggagccagctccctctgcttgtggggaggtgtagagggagcagcgcgggcagaaattggggctgcatgcagcactcacgggccagcacgagttccgggtagggatgggcttggcgggccctgcactcggagcggccggccggcaccaccagccccgggcagtgaggggcttagcacccaggccagcagctgcagagggtgcgccaggtcccccggcaatgccagcctgccggcgctgagctctaattctcaccgggcctcagctgcctccctgcggggcagggctcgggaactgttgcctgccatgcctgagcctccccccacggcggtgggctcctgtgtggcctgagcctccccgacgagcgccatcccccagctccacagcgcctggtcccatcgaccacccaagagctgaagagtgcgggcacacagcgcgggactggcaggcagctctgcctgcggccccggtgtaggatccactaggtgaagccagctggcctcctgagtctagtggggacttggagaacctttatgtctagctaagggattgtaaatacaccaatcagcactctgtgtctagctcaaggtttgtaaacacaccaatcagcaccctgtgtccagctcaaggtttgtaaatgcaccgatcagcaccctgtgtctagctcaaggtttgtaagtgcaccaatcagtgctctgtgtctagctaatctagtggggacttggagaacttttgtgtctagctcagggattgtaaatacaccaatcagcactctgtgtctagctcaaggtttgtaaatgcaccaatcagcaccctgtgtctagctcaaggtttgtaaatgcaccaatcagcaccctgtgtctagctcaaggtttgtaaatgcaccaatcagcaccctgtgtctagctcaaggtttgtaaatgcaccaatcagtgctctgtgtctagctaatctagtggggacttagagaacttttgtgtctagctcagggattataaacacaccaatcagcaccctgtcaaaacagaccaatcagctctctgtaaaatggaccaatcagcaggatgtgggtagggccagataagggaataaaagcaggctgccagagccaggagtggcaacccactcagatccccttccacaatgtggaagctttgttctttcactctttgcaataaatcttgctgctgctcactctctgggtctgcactgccttatgagctataacactcaccgcgaagatctgcggcttcactcctgaggccggtgagaccatgaacccactgggagaaatgaacaactccagacaggaggaacgaacaactccagatgcgctgccttaagagctgtaacagtcaccacgaaggtctgcagcttcactcctgaagccagcaagaccacgagcctgccagaaggaagaaactccaaacacatccaaacatcagaaggaacaaactccggacacaccacctttaagaactgtaacactcaccgcaagggtccgcggcttcattcttgaagtcagtgagaccaagaacacaccaattccagacacaatatcattactcaaaaagtttcagattttctgatttcaaatttttaaatcagggatgcttaacttgtaatatagtttggtacttttcaggaagacaatacagcaatatgtatcaaactttaaaattaggcatgttccttaacacagcatttttactgctagcacttaccccatgataaattacaaatatgtccccaattctttacttctccctatatccacaaggtttgccatgtaacattaagtatattcccactttgactcttgcttcagtgctgtaacttcttgtagcaatgagatatcagcaaatgttacacaagaagaggattgaaaaggtgcgcatttctgcttacattcttacacctcagtcatcactatgtgaatatgcccaggttagcctgctggagaataaggggcattagagcaagtcaaatcatcctcatagccccagccgacactcagtcattccctacacataaacaaattcaaatgagaccagaagaaccaccctcctgagcccagcctaaatttctgactcaaaatttatgaccatctcccgtatacaccatattccttaccattagcatattttagtccttctaaaaggacgcctgactcaaaattttatcagtcaactcatactcatgtcttatttgatctgagaaaactttaaaagtgaattttaagatatttgtttatattccttgttcacactttccttgtggtctttcacacttgctgcacccatctacctctagacaacaaattcattatggacaagaactttgcattatctttgattcctggtgcataacccagtgactagatgcttgttaaatgtctgttaactgaatggaaatgagatcaggaccaagagatctaagctctggttctggcttcataacttaggcaaatcacaccgccatgtttcaatcttctcaacctgtgaaatggtacaatatcatcttatctctcagcttcacaaggttgttgcaaaaacaaaatgatctaatttttaagtgtttcgtaaagtctaaaacattattcacccataggtcaagtctgttatctttattaaaacttaatctaataccccattaaggaattgtaattcttgggccaggtgcagtggctcatgcctgtaatcccagcactttgggaggctgaggcgggcagattacctgaagtcagcagttagagaccagcctggccaacatggtgaaaccctgtctcttctaaaaatacaaaaattagctgggtgtgttggcacacacctgtaattccagctacttgggaggctgaagcacaagaatcacttaaacccaggagacagaggtttcagtgagccaagattgtgccactgcactccagcctgggtgataagagtgagactgtcaaaaaaaaaaaaaaaaggaattctaattctctagaaacagagatgttctctgttgccagatacattaatataagaaagactgatgatattattaaaatctattttcaaaacttttctacatagataatagtaataacagtacttttttaaaagaatgaaaatcttgtaatattttcaaccattgatagaagaagctacaaattcaatgcaatctccatcaaaataccaccatcattcttcacagagttagaaaaaacagttctaaaattcatatggaaccaaaaaagagcccacagagccaaagcaagactaagcaaaaagaacagctctggaggcatcacctaggcacatagaccaatggaacagaagagagaacccagaaataaatcgaaatacttacagccaactgatcttcaacaaagcaaacaaaatcataaagtggggaaaggacacccttttcaacaaatggtgctgggataattggctagccacatgtaggagaatgaaacttgatcctcatctctcaccttacacaaaaatcaactcaacatggattaaggacttaaacctaagacctgaaactataaaagttctagaaggtaacattggaaaaacccttctagacattggcttaggcaaggatttcatgaccaagaacccaaaagcaaatgcaataaaaacaaaaagaaatagctagcacctaattaaactaaagagcttttgcacggcaaaaggaacagtcagcagagtaaacagacaacccacagagtgggagaaaccttcacgagctatacatctgacaaaggactaatatccagaatctacagcaaactcaaacaaatcagtaaaaaaaaagaacaatcccatcaaaaagtgggctaaggacatgaatagacaattctcaaaagacatacaaatggccaacaaacacatttaaaaatgctcaacgttactaatgatcatggaaattcaaatcaaaatcacaatgtgataccacctcactcctacaagactgtccataatcaaaaaatgaaaaaacagtagatgttggcatggatgcggtgagcagtgaacacttctacactgctggtgggaatgcaaactagtacagccactagagaaaacagtgtggagattccttaaagaactgaaagtagaactaccatttgatccaggaatcctaccactgggtatctacccagagaaaaataagtcattattggaaaaagatacttgcacgtgcatgtttatagcagcaaaatttacaactccaaaatcagggaaccaacccaaatgcccatcaatcaatgagtggataaagaaactatggtatgtatatatatatgtatactatttcaaactagactataaggccatagtcaccaaaatagcgtggcactggtataaaaaataggcacatagaccaatggaacatagtattccatcatatatgtatatatgtgtatatatgtaaatatacatatatgtatacatatatactccatcatatatacacatatatacgtatatacgtatatatacgtatatatgtatatatacacgtatatacgtatatatgtatatatgtatacatatatattccatcatatatacacacacacacacacacacacacatatatatgtgtatacatatatgatggaatactatgcagtcataaatagaaatgaattaacagcattgcagtgacctggatgagactggagactattattctaagtgaagtaactcaggaatggaaaagcaaacattgtatgttttcactgataagtggaagctaagctatgagtacaaaacggcataagaatgatacaaacggactttgaggatttgagggaaaaatcggagaggggcaagggataaaagactacaaatatggtgcagcgtataactgctcgggtggtgggtgagccaaaatctcacaaatcatcactaccaagaacttactcatgtagccaaataccacctgtaccccaataacttatggaaaaataaaataaaaatctttaggtactccaaaaaaaaaaaaaaagaaaaaatgccactgtcctgggttgaacagtattcatgtccaccagactctcagaacgtaaccctatttggaaatagggtccttgcagatgtaatcagttaagatgagatcatactggattaggtagggccctaatataatgagtgatgtccttagaagaaggccatataaagacacccagtggagacagccatgtgaagacgcaggcatagattggagtgatgcatctacaaaccagggaatgccaaggattgctggggctacagaaacaaggagagaggcgggaaacagattctccctgcaaccccctaagagggaacaaactctgctgactccttgatttcaggtttctgacctgcagaattgtgagaaataaatttttgttgttttaagtttaaaaaaaaaggcaaatatccagttaaatttgaatttcagatgaatatcaagtaagtttttagtgtaaggacgtcccaggtaacattggcagtatttttatcttctatatgtggcaaccttggtaatagaaggctttttatttttaatgccctactgctttctataggtttgaggatgtaagattggctgtgaggtgctgagaaatagctcaataaacggcgtatagctctcaattgtggaaagatatggatgcccaactgaaagccaggaagttagcactagcaaggaaggggaagaagacaagatgcttggcagaggcctaaggggcatgggagaggggatatgagggaaagttatgaaatgttatgctattttcttaaaagataaaataaaatcatccttctaatcttctacaagtgcatttcagtaaaatctacattgctaactaatgccttggggtagaagtaggtaaattctttctagagtggattctttcttggcattaaatgatatcaagtcctacttaaagtttgacacaaaacagccgacatgtagattatacgagtaattggagaaagtcttgcaagcaacagcaagcccacatatgacatatacttgcttcagcctctaacgggcaggtctgcaaaaccaccctgaataaatgtgaaccaaagtagataaggccctgcttagggctagtaactgatagctcctgagcaactaaaagcagagtgtttagactaagaccagactaaaatcactcactcactcactcactcatagaaaacaatacccatatgaagattttttttattattaaacattggtctaatgctaaaaagtttaaacaccaacagagcattgtaaacccactgccttgtgagttaactttaacttacttagttaactaactacatttttaacgtagtgtttccatttttaaaaacaaacttggccacttcacaaacacttcatggctaatcattttataatatagtttatttacagaaatgaaatgaattttggtaatttgaagcaatgaactacatcataaaacatctctgaaatctttttgaattgtcagttttcaaaacaaaaactcagaaatgtgattccattttgatgataaacacctgcaataaactaggaatattttttcaacccactctcccagttgtgttacacatcaaactgctatttggttaggtgggaaggagggggattaattgttgttaatggtttttattattcagaaagaatttaaatccgtgaaacctgcatttgtcaagcatcaagcgtcttgcagactgccacagagagtaccaaagttctggtgttttgctgatcctttgttttggacattgtttgactgttttaaatacaacagtttccattcagcattaactgtgaaagacacagcacaagaataccccagggctggtgtgagaaaaacatagcaggattatctgatggaacaattccgggcacagagtaagggatctatccatagtcactgaatgaataaatacttctgtagcttccctctaactttaggaaaaaatattaatgaaggaaaaatgaattctggattcattgagaacattttggaaatagtttaaatgatattgcatatgtgtgtattctaaatgcttttttgtattttctaaagaatattttgacacaggaaggggaacatcacactctggggactgttgtggggtggggggaggggggagggatagcattaggagatatacctaatgctaaatgacgagttaatgggtgtagcacaccagcatggcacatttatacatatgtaactaacctgcacattgtgcacatgtaccctaaaacttaaagtataataataaaaaaaagaatattttgcaaataaagtaaaagaaacacccttgattgacagtattccatttgtgagccagtggttagacatagaaaatgatggattagggacagcaggtagaccaagagttcccaaccttggctgcatgttaatattacctcagttgcttttttagaatcccaattcccaggtcacaccccacactcatgaaatcaaaatctgtgtgggtagaacacaggcatcaatattttaaaaagtgatttcattatgcgatcaaggttgagaataacagatatgactctaattcttctcttgtcccatggaatagtgtacagaaagctacatttgggacaagcaatggataaaaattcaccctgtgtttctgagatggtggggtattgttcctcctggataaagaatctttcacctttttctacactgtgttttcaactgggaggtgaataaagtggaaacaaaaaataaacataattcaaaaaaagggtgagagagtggggctaaggtaagctgagtgttcaatatttcctcttccaacaagattcctcttatcatgctctatttgacataatcttataaaagttaatgtttaatagaaacatacaaacaattttaagaaatctctactagcattttgtgtcagggaaggtcaaaactgagacccactactctggtgtcttctgctactggatttatttgtgcctgggttgaccatgagggagtcattggcaactttaagcagcagtaggaggattggccaatccactgtgcccaaattaccagagtgactccatcttgaataggggacggggaaaatgaggatgagacctgctgggctgtattcccaggttaggcattctaagtcacaggaaaagacaggaggttggcaggactgttatcacaagatacaggtcataaagaccttgctgataaaccaggatgcagagaagaaaaaaaaagaaagcccaccaaagatggtggctttggccaagatggcaacgaaagtgatctttgatcaaccccactgctcattatatgctaattataatgcattagcatgctaaaagacactcctaccaatgtcaggacagtttacaaatgccatggtagtatctggaaattaccctatatggtctgaaaggggaagaatggtcagttccaggaaatgcccgcccctttcctggaaaactcacgaataatcaaccccttgtttagcatatgatcaaaaaataaccatcaaaatgccaaccagcagccctctggttgttctctgtatgaacatagcctgttctgcctatggagtagcctatcttttatttctttacttccctaataaacttgctttcactttattgtgtggacttgtcccaaattctttcttgctcaagatccgatacccctctcttgggatctggatcagaatcgctttctggtaacaaaatctcttaagcccccacaagtgagagggatgagacttagagggaaaagctcagggactccaaagactattcaatggaaggtcctctgtgccctgctcttgcggttgtaagaaacagagtcccatggtctatctcagatgatgtctttctgggtgaatacttggtacaataagagaaatgtgacttccacaagaatccccaaattgtgaaatggtctaactcagcaacagctgtgtattgaacctctgcccctagagtgacatggcaatgctccgtcttgctttctacctgctcagcaactgctgagcttatcaatactgcgtcttctcttcctcattatgcctgctttctcaagagtacagcttcctatgccttcctagggttctcactgtttttcatctccatctggatcttttcagcatttgctcccaatgcccaggtaaatcaggggcacctaggcatcagtatcttctaaagctccccagaggattcaatgtgcaaccaagcagataaccactgcaccaaagaacagtgggtacaagtaaggcaacttggatttataattaccaccttagcccaaaaggaagaaaactggagaaggtaacttataatgcctgggaattctgttctccttgcattttattttaattcagtgtcttgtttctctatctatacagcacacatttattcacatggattttagtattttaactgtgttgtacttaaaggaaagcaaacatgccttctgaagtgatggtctttgagccactagtcaagagattggggctctctaatgagccaagactcccatctagtggtaaccacctctgaattgcaaatagaaggtttctcaacttttattaatgacaaaactttttgggaagtggctggtcaatttcaataactcatttgcctaaaacgaaatgcacctatttgtcaaaagacctttgccacttccaatctgtgtgtgtaaatatccccgggataaattattgctatttatttgaacttatgaaggaaaaccaacttcacttcacgattctgtcaaataagtgtgttttagtgaattcagaggttgtgtgactgataaaagtaagtggttattatgaaatagttcatacacatccaaagtgaaatgactaatgataaaaccttagaggatgctgtgaggtgagtggtggtccctgaaaaagtatgtcagcatcccaatccccaaaatctgtgaatgtgaccttatttggaaatggggtcttggtccatatcattattatgttatgttaagaatcttgaaaacagatcatcctggattatccaggtgggccctaaatctaacacaagtgctttataagaagcacagagaagaagagaaaaaacagggagaaggagtcaaaggccatatgaagacaacagcagagattggaattaatgcagccagaagccaagaggacatctgaaaccaccagaagctgaaagaggcaagaaatctccactcgagccttcggagagaacatggccctactgacaccttcatttcagacttccagcctgaagaactttgagaaaataattttctgttgttttaagacatccactgtgtggtaatttgttacagcagacttaagaaagtagtatggtttcctcttcctttcttttcagtacactccttcagaaaacaaaaatagcatatttggaaatgacctaggtacctaaagttttttttaataatatacatataaattcattgctctacaatattataggatggtattcaatcaacagcataaatacttcactgtctacctacaattttcaaaggtattttggatagcaaacttttcatttcagaagtttttcactacaaataccttaactgaaagactaatcaactaaaattcttctttctaagatagaacatgaagcaacaagagttttgcctaaatatggatgagtgtaatgagaataactcaaatttcatgtccagttgggacagcacagtcaattcaacaggaatgtttatgagttgtttatcatgtgaagtatttggaaggtatgcaaacactaaaaacaacaatgtcaatacaattaaatggaggcattcataaaactgttgttcagatcagcaggtaatcttgtaactgcatatttgagaatttcaaggaaggaaatgtacaaataatcaaaggcagaaaattcccttcaggaaatgtggtatccacatattgtatgacaagcttgcttttactgaataatgcatgaagatgtctgttttaaatcgttcactgactacagagttgacaaataaccactgaagaacaatgggactgggcaccagatgcctttgtttcatatctgactctgcgaaggctgtttctttcctagggaactgggggttctatgtaacatgagactcaagcaaaaagtgtggattctgtggtatgctcatgggatggttccagtaaatgtgctgatagaattctggggcccaagagttgacgatgggtgccattaaagtccagacctggtgccgtagcactttgatgtgtcaaaggcttaggttctgccatttttctgaacaaatatattcaaatagaacactacataaaaatgtaaagggccttgtagggtcaaatgaaagtctgagcagagaatgaacaatatccctatgagatcaaagtgctgtctttgttgaattaattccattattttttgttctcattgttttcaaaacaattaatagatacactgagaaagaaggaaagcaagagagttactctgataatgatggctctcatttataaatccatgaaaagtaatatcaattttctttcttaatagatgagaaatctaaaactaagaatgggtgaggaacttgccccaatatcacagagccaataactaaggtgcttctctcccagaacctttgctacttcctggctgatgccaaaacactgcctaataaggacctcaaaaaaaaaatctttctaatgaactgaccattggtcaagtgtctcccctctccagttccaacagactctgctggagtcacaaacgacaaggaaccttgtctcttcatctctttatctgcaatacctaccatggtgatcattcataataaagcactcaacatgtgtttactgggtgaacagataaaaggtacagaaaagagggaaagggctcaggaaaaactacacagaacatttcagaagtatttgccatttccatgtggaaatgtcaatcatagataaatatcccaatcatgatgattcataaaatatattcagaggagcccaatgttcaggaaatgcaaactatctgcagtgtgaatttggagcacaaggtttgaaaacttagaggctgatcgaaaaggaaatttggtttacaattttgtaattatcaggtatatgataattaattatcctaaagtgatattgaaggcttggcctgagtctgatgacaatattagaaatctgagtgagaaaatgatcagcagtttgactgtttaaaggtttgttggttgttccttaccttttaaaactgagtctctagccgctagctactgtgtcccagggggccttgtgccctctacctcctgttttctctgaaaacaaatgagattttttatactgccttgactctatacagattttcctgctcttaagagacaaacagaagagtgatacttcaaagctagaataaatgtattttattttattttatgttttcagaccgagtctcactctgtcgcccaggatggagtgcagtggcgctgtctcagctcacagcaacctccgccacccgccccactctctgcgattctcctgcctcagcctcccgagtagctgggatttataggtgcctgccactacgtccggctaatttttgtatttttagtagagacagggtttcaccatgttggccaggctggtctagaactcctgacctcaggtgatctgtctgcctcagcctcccaaagcgctgggattacaggcgtgagccacgacacccagccaaataaatgtattttaaatctgggatatatgttccaattagctagactctgaaatttcagactttagcttcagtcagaggctattagaactattccaaaaaatgcacagaattaataaactattgacggatgagtaagaaaaaaaaactgagtcttactctgccatcaaggcaggagtgcagtggtgcaatcacagtttactgcagcatctacctcttgggctcaagtgatcctcccaccacagcctcccaagtagctgggaccacaggtacatgccactatactcagctaatttttattaatttattttgtagaaacgggagtctccctatgtttcccaggctggtctcagactcctgggctcaagtgatcctcccgccttagcctcccaaagtgctgggattacggacatgaaccactgcacttggcctgttggttgttcctttaggatataacaattaatattaaaggcacttcaatataaatttcaaattgtaatttaagttttttccagggtcactattttgtatatttatatttttagtttattctgttttgttggtagcacccaagtattccctaggctgttggttgttccttccgacagtttctaggacagaaaatgggtctttctcccaatagagataaggaattggtaaactgccttggatgccaagatattcttgttttatgtacacttggcagaagtcatctacaaccatctgcagactctaactcttcactggggcccacagtcatccccactgttgaatgcacattgcactcctgttctgaaggaacaaaggaaggacaggaaatgagtgaacccagtgaggaaaaagcttttaagatatgtatcaaaaagaaaaaggaaggccggaaccagtggcccatgcctgtaatcccagaactttgggaggctaaggtggacggattgcttgagcccagaagatggagcccatccaaggcaacatggtgaaaccctgtctctaccaaaaaaaacaaaaaaaaaaaacaaaaaacaaacaaaaaaacaaattagctgtgtgcctgtggtcccagctgctcaggaggctgaggtgggagaatcgcttgaatctgggaggtggaggttgcagtgagtggacatcgtgccactgtattccagcctgggtgacagtatgagactctgtctcaaaaaaaaagaaaatgagaaacctagagactgaagaatccaattctcagtattaaaagatgggaaaaaaataacttgggtgacagctattaggctgaaataggcacaagataataaaacccaacatcataataatgaggaaaactagcttgtgtaaaacagaagatgacagttggaagattaaaaaggtactgcctgttgttgctaaaaggtaaaaataaggggttctgtgacatgtgggtgcaaaaggagctattgagaggcttaaaggagcatttagagctgatacagataatcaaagtttctgttgattcctatctgcatggctggacttactgatcccaccaaacattcttccctcatgctccatgagttttcaatcctttaacttctaactggaacaccatgcaccctgcctccttttaggcttagtttctgccaacagccagtcctgaggatccaggcaagtgaccctgtgttatctttccgctctcccttctctccttcgttcatcaagcagcaaccgctactttcagtgcttctctgcacacggagtatagacaggttccgagtatgtgaagctcagcttggggtttgaggagggtgtttaaaatcactacctccatgcctcttgaccacttccagatgaaattcaagaacaatcaaaagataaacagaacagcactgaactttgcagacatacttttttcgcatggtaaccctgtggcctggggcaatttaattgatctctctgtgctcagtttactcatctgcaaaatgagcatataggcatacccaccccatagagtttctgtgagaataaaatgagatactgtatgttcagcagtcattctgtgctagacaccatgctaataactgaataagtaagcctgttttttttttattataattgttctatttatcacccataaagtctgtaactctagagcctgagtggaaactaaataagggatgtgtggccactcattttttccttttgatccctgtcctgtgttctttgggggcctggacaggaaaagaaatggtagcaccagagctgtcaattaatagagatgaatagtagtcatggtgggtgtcatagtaggaattgtgccactagtagtagaagctgtagtaacagctaatacagctaatacaactccttgggttgtgccaaggagtgtgttaacgacacaaatctccatgcattgctcattgccactactcttaaagctagagatgtgtgcagccttagggcagttatatctcctgcagcaaaatgcatccctatccctcatcagtaatttgagatgtctgtgccttcctaaggatctttcaggatactctttcaacctactggaatcctaatttgagtgctgtcctaagaatgtaaactgacactgaactggtggttttccaactgcactgtgcacacaacagagatttccaaattccacagcacctccctaggattgccagggctggtggcatgatcaacaatttgggttctgtattagtccatttttatgctgctgataaagacatacccaagactgggcaatttacaaaagaaagaggtttaatggactcacagttccacgtggctggggaggcctcacaatcatggaggaaggtgaaaggcatgtctcacatggtggcaaacaagagaagagagcttctgcagagaaacttccctttttaaaatcatcagatctcatgagacttattccctatcatgagaacagcaaaggaaaaacccacccccatgattcaattacctcccactgggtccctcccacaacatgtaggaattgtgggagctataattcaagatgagatttgggtggggacacagccaaaccctatcaggttccaagactcaaaccctcttcacccagagtgagtctgcattcatctgtttcaacattgtcctctcctcatcatctcactgagaaaactttgtagacaaagagctcacagttttcaaatgactgtgaaagccaaagcactaaacttggtttcctcctataaaatcacaattctaaaccctctgaaggatttcatcaaccatattagtgcttaactcctgaaggtttggaaagccctatgagattttcaaaaatgttccctatttttccctatgtgaatacaaaatattatttttaacttatcctctcattcttctatctgtatctttatttatgcaaaactatccatatttttgatcaggtaaaatgtttggcatgcccaaatttggaatcttcttttatggttttgttttttgtgtagttcagtgatgagaggacccagcttcaagcacataaccagatacccattttttatgtctacaagtaagagcattttccaagaacactcaagtctggcagtatacactttgaaactcacattgtagctttggcaatcctgttttatgcacgtgatgctgcagtttatgtgcaatcgtgctttccaagacacggaaactcctcatggctgtacccatcagtccagacctacgttggttgggaaatcaaaacactgtcaccatgactgagttatctgtctcttgcttccaagtgggcccctttgttttaaagcagtggtgcttaaacaccagacagactcatctcatgctgacgtacatgtgaaattctcgcactacacaatcttggatggcttcacgttgtaacagaaaaaccaacccaaccactaagaaatccagttaaaacaatgctttaatgtaatcttttttttttaatgcagtggaattgaggaaaggatgtgtaagctctgtgttcacgaccctttcagatcacaccctatgtttccctgcatttggcaggtcctgatctgtacccattatattaaaagtgtaactgtaaatgcatgtacatatatatgcttatacacattatatataaatgtatatatatcatatgtatgttttatgtgtatagatgtatctgtgtgtatgtaaatatatattgtgcatgtgtatgcctttgtgtgtatatatctgtaaatctatatatatgtgtatatgtagtggaggattgtgagacctcacaagattgataaagtatcaaacaatgcctgtattttttaaaaggagctgtttttcaacatatagagaaataatgtcaattcctggattaatactcttttagaaaaggccaattttcattgatttcaagtagctcatgttattcagtaacaatctcagccttcaaaagtagccaaaagaaaagcagaataaatggtctcctaaataaaatgacctgtggggcccatcattgactaagtagcctttttactcatctcatacagcctcttcctaataaaaatgaagcagcatcgtgagaacagtagggagaaagggtgaacagacagaggtttacgggtcaggacagagtaccagggttaggacagataccaggaaagaggaaaagaacacactgtggaagaaacagggcaccagcttcacacttgtgcctcaggccagctttgtcaaagtgtcctgagtacatgaggtatcctctaaacatttattaaccaaatgcacagagaggcatgttgacagggatttagcgtatgacaaaggtggcatatcaaacccatgggggaaaggtgctactcaataaatggtttggagacaactgggagccaactagaaagaataaaataaaattggattcatacctcacattttatactaggacaaattacaaatggatcgaatattttatagtaaaaaataaaactataaacattctttttttaaaagggataacttctttataatcttggagttgtaaaaataaattataattttgaactagggaagatctttctagccataattcaaaatatataaatgaaaaaagaaaaaatgataatttgatgacaaacttcttcatggacagaaacattaaaagccaatcaataggaaaatttgaaaaaatatatttgaaatttatatcacaaaaggctactctccctgatacacaaagatcacctagaaatcaacaagaaaagaccaacacaatatagcaaaggatataaacagacagcttagagaaaaagagtataagattaggttaaatcatatgaaactaattgttaaaaatgtttgaaaattggcaatttcaaatgatttaaacaaatagctatgaaacatacgagagaatgttcaataacacttataagaagagaaaggcaaattagaacatcactgttggattaacaaaaaaagaatccaaaaatttggaaactcactatgtggtgagctgtggggaaacagaggctctcacacatcattggtataaattaacttatctttggcggccaatttggcatatctattgaaattacatatatatatataagctttggctaagcaattctactttggagaatgtatcctgtatatatacatgagcaaaatgatgagtgtacaaagttactcatttcagccttgtttataacagcaaaagagtaggaatacataagcaagtgcctagcaatagggaccagttaaaaacataatgagtcattggtacaatgactttctatacagcttgtaaaaaagtaagaagtttcttatgtacagacatatctgtaagatctccaagaaatactaagtgaaaaaattaaatacagaacagtgtgtgttgtatgttaccctctgttgaaaataaaaggaagagaaataagtctctatattcatatttcttctctatgcataaagaaattctggaaggatacaacataaaaaactaataataccagttacatagagagggagctggaatggggaacagaaatggcaaacaggccaggtgtggtggctcaggcctgtaatctcagcactttgggaggccaaggtgagtggattacttgaagtcaggagttcaagaccagcctggccaaaatagtgaaaccccgtctctactaaaaaaaacacaaaaattagctgggcatagtggcatgagcctgtagtcccagctactcgggaggcagaggcaggggaatcacttgaacccaggaaggggaagttgcagtgagctgagataacatcactgcacttcagcctgggtgacagagtgagactccgtctcgaaaacaaataaaaaattaaaaaagaaatgaaaaatatattttcttgtcaagcttttaataattttagcattttgaaccaggtgaatgcattatctattcaaaacaattttaacttaaaaataaataaatgagtcttatgactgatcaacaaaggatttggagtagatgcttgtttatatcatttatacactagatcatctacataagttgtgggactctgagaaaattaaaatatgaggtctcttgttataaactttttaagaacttcaagatggcagcagcacagcattaaaccaatcactggggcccttctaagaatgggtcaggcacctgtgaagttagccctggttgcacacaactgtactcatcagaatataaaattcagaatactaatgtcattcccaaagggaagcaactggcttctcaaaaacccaggcagcagaagtcttggaaaaaatcatttccctcgatttcacatacacttcatgttctgttggttcctaagcaattaacctgaatatatacgggtgctgatcccaagggattaacatacacatcctaaaacctcaagctttggagactaaccatcttcgatcacaaatttgtgatcatgcaaaataatagaatcttaagaaatggcctttgtatacatagtcagttttttgaaataataagtttttattttactgcactcaattaaattgtgaaacccaaataaagtctggagcccaatgtggtccaatctcaatctactgctacagtcaaagaatcatagcttagcagccagaaagtactgaaagaaacttccaaggttttctttttcagcttcttaagaaaatgccaaagaaggaaatatattcttaatgcccagaaaaacacattttaaattctctctcatcactacctctattaggctcctccataaagctattaatagtagctgcttcccaaaactctctcctcccgtttacaccccaccttcacccacatagattttctgttccttacctcatttctttctacctctactactcttccctcttctcacttattcaaatgtgaatcatccatttctatttcttgggtaccccaattagagtaattgtctgaattataagggttgggttaggggaggcagaactttagagcaatgccagaattgtctttcatgggcaagagaagggcaacgagttatgcatactcacaaataatttctgtccttgttacagttgcagttatcaacactgtactgctaacagaatttcttccaaaatgactgtagcatattcctcaggaaattcatactgacaattgttttggaatgaagaaatgaagcacaagtactctatcagtatctaaaaaatgaagccaacattctaaataatcttgttcaattaacatatggtatttattagctttatctccaaaagataaaggctatcttcttatgaaaaacctttttcccatctcttctagaatcaggaagttcagacaaatttacttgattttctgtgctgttccaactagcccaagagttactatctgtgactttggtactgcttatgtttatctaccattgctccattacttcaaaaaatgcaaaacaagacttgaacattttgtaattcaaaataaagacaagaacagccagattttctttttagctgtcaacagaaaaattccagcaatcagtttgaatatctcatataattaaatgttgaggccgggcacagtggctcacgcctgtaatctcagcactttgggaggctgaggcaagaggatcgtttgagcccaggagttcaagaccagcctgggcaacatagggagaccccatctctacaaataacttaaaaataaaataaaataataaataaatacacattgaaatcatttttaaaggtaatacatatgaccctaaaatgatctaccctgtggtaaagagacaatggcacttggtaggctgatggatcataaaccaaaatcctatccaaaagcttcatcactcagaacacttgataatctaacattagacgggccacatggcatgtgcacatttctttcattcctgcacacacaatatcaaaagggctgggaagaaaagcagcattcattgagtgacaattacactacataccctattctagacactttgcatactgtttgtaattcatgtttctcaaagtaccctgagagtttcttaaatctacagaaacctgggttgtcattaaatatacagcttaccaggccccacccctgaaaattctgattcagttgggctagattggggcccaggaatctgtgttttaacaaaatgtactcttcattgcaatgttgtaaaattattttccttgtttctgtcttgcagaagcaaggcaactgtgagaattaaacaatttatcagggcacccagatgacacagggagagctggatattcaatctcaagtaggttggctataaagccgactttatcactgggccatgccaaatcccagtaaaactccatttgcactctgactgaaatagtggcttcagttccccatctatagcagttctagcttctcactgcctgttttccctcccaccacccgcccataaaatccagcactgtataggctcttgaattatattattggttattatatgataaaattttgcattgcaacttgagcaggaagacaaactaatgagaatcacatcctattttctaattgtctcaaaccatacctctataaagtaaaaagagttgattgaaaccaaaatgtttgggaattacaacaagctattcctaatcgacacaacttgtcagaaatttggaggctgccgtcagctcagtagcttctcaaacaaagcagtatcagagtatgttttgagtccctgattctttcaactgggtagatgcttctgtacgactttacattgttttatttaaaagctgtgctttttttttctccgaaactagtgtatttataggtgctacatgctttaaaagtctctgactttgaatccctgattctttcggctgggtagatgcttctgtacgactttacattgttttatttaaaagttctgctttcttttctctgaaactaatgtatttataggtgctacatgttttaaaagtctacaactgtgaaaaatgatgtaacactgaaacaagcaaaaccttgaaggaaagttgaaattgagattgtccaaaaactcagccagtacatagtgtttccgcctactctgatttttcagcagttttgtgatttcttttcccttgtttgtttttgagtacactcatcagtatgtcccatggcatagtgtctgttttccaaaaatccagaaacatgagtcagctgttcaactattatatacaaatttggtaaagtaccgtattcatggaatctgagtgtgttttccaggaattacgtctccagtgcccccacatgactgcctgatcagcctgtgatgcctctgaagtgttctgcacctactttctaagggaaatgttgtcacgacagataattatggaattgtgggcttttagttattcagaataaatctacaaggcaatagtttaatgaatttaatatgctggttcatgtaaaatgtcatatgccatatgtaacatgactgtaacttaaggatattcttttaactcagtaaacttggtagaaaatccttgtatgaacctgatacggattaaactgtgctctctcaaaaaaaatatgttgaaatcctaacctccagtaactcagaatgccaccttatttagaaatagggtaattatagatgaaattagttaagatgaggtcatgaatgaattctaatccaatatgactggtggacttgtaaaaaggaggtattgggcagtcccacagaggctggactgcctggctggtgcatctttcctggtctgcaaaagacaagaaaataaaattaaaaagggaaaatgggacagacatagacatgcagagagaaaaggttatgtgaagagacatccagggagaagatggacgaatgaaaatggaagaagagattcaaattatgctgccacgcaccaaagaatgcctgggttcaccaaaagctaggaaaggacaaggaaggatgctacccagatgcttcagagtgaccatggccttactaaccccttgatttcagacctctagcctccataactgtgagactaaatttctgctgttcttaagcaactcagtttgtggcacttctttatggcagctctaggaaacaaatatagagcccttgaaggtactttcagctggaaaatgtcagaggcaggcacaactaaactgaggttcctgcttaagtgaatttattcagcacaggactttaaatgccatttatatcatatgacttccaaaggtattatctaccatcattaccacttcccgagctccagaatcaaatctgcaaccacccgatgggtagcttctcttgcctaatagcatctgaaaattagcacaaccaaagcaggactttgaattcattgcctgcccatacttcccctagtctactgcatctaagtaaagacatcaccatctactaagttatttaaagaaaaacccgggagtcatcctaattccttcctgcctacccaccatatccaatccatctgtgtgtcctctaaattctacgtccaggtcagtttcctgggagacacattctgaggtggagattagcatgcagaattgttatcagggattgccctcagaatcaacatccacagacagagggagaagctgaactgcaatgcagtcaccatagggacctcagttcatcctacaaagaactctggagctgtgagggcccctatcttgagtcatctttacccccactccactgaccagttagtgagtgcaggtcatccctgataagggaatgtggccttggctgacatggttctttttggcagagagcaattcctggagagagtccttagtggagagccatcagcctccaaatttttcaacagctaaggtaataagtaccttggttcagaaaaaagatctggatggcataccacagcatctgctatactagaagagaaagaagaaatatcctgaccagctaaatcctgtaaaactaaatacctgtgaaaattcaggaaaactaatgattaatttttttcccatccatcccctccattttcccactcagccagtctttctgtgttcttaattacaggaggtgatgtgaaagagtcttctagaatgaatttccatcagctgggtctttctgggatgctaagaaaagtttaggtttataaagaatgtttgagagaaacagagagctagagcaagtgcctcccccaaaaccttgaaacaagattgcccccaagatgaagagagaggagacacaaggaagatgatgacagcagagaagtcatgggccccaacaaaagggcagaatctaaattgggctgcatggacagggacaagggcaaacatctcaacaaaaactcccatgaggagtactgttccagtgatgtttgattttcaaactcatttcaggaccacattaccttgcttgctccaactttatagtaagtcttgaagtcaggtaatgtaatgtaattcatccaactttcttcttcttttccaatatttttgaaatgttctagatcccttgcatttccatatattttttaattcctttgtcaaattctacccttccaaaaaaaaaaaaaagcctactggaaacatgacgaggattgcattgaatcagtagatcaatttgatgagaaataacatctcaacaatattgaatgtttcaatccatgaacatggtatatctccttttatttgggtcttgtttaatttcccttggcattgctttgtggttttcagtgtaaagagcttatatatttatttataaatacattatatctttatgttattataaatgcagttgtttttatttcatttttcaattatgtactgctagtatatgaaataaaattgatcttttacattaaccttgtataccgtgattttgctaaattcacttatgagttctagtggttgtagaactcttagaactatttatgtaaacaaccatgtcatttgctaataaagacaattttactttttcctgtctgctctttatattagtatttaacaaaatgcatttcaacttattcaaatttaatagttttaattaagagaatggtattattaatgttcatcaagataactcatttttcaaagcactcaagaacaacagattaaaactgtcatttcagtcatcaaattttacttttgctagtttgtgcaaaaagagtggcaataaagcaaaataaaattttgtctttaatgaattgtgctagagaaattcacaattgctctatagaggtgacatattcatcataatttcaaataatgagagggattgctgattagtagtataaactgaagaaaacttttggagatcaagatatctaagctagcctttgaagaaagtttagacagtcaaattagtggtaggaaagatagaggcataaagtaagcaaaggtagagggagaaattaacaaaacaagttccaaatatagaggcagagaacaaatcatattgttatgtatcagtaacataataacagaaggtctcaaatgatcggctactgagtttggattttatggtctacttatgtaaaggtttttaagtagtgaagaattacaagaggaaatcttccaactagaccatagccaaagaaaggttgagctctgagaggagataatatgtataaatacttgtacagctaacagttcatgtaagagctgaacagttttcccatatcagtgtttttgcaaagccaaataaataattaatgttcttgaggacaggctactaacttcatttaaaatgcaacagctggaagttcccatgtctaatcctataagaatggcttaatataaggctgatacatagttaacattcagaaatgaggaagcaatttctgctatgtggatgaaatgttccaagataaaaaaaatcttgaattctaatgctttttaaaatgctttgatatatagtgctaaaaactcacaataaatatattaattacagagtagaattcatagacagttgtatctatcttgatgccatccaaagggagtatcacctttaaaatacacaaggaaatgcttcaaggaatgagtagcagttgatccaaaccttgtaaggttatccatttctgggcacaaatttccttgtattctctcactgccttactctgctatataatgtcatggtctacaaggctattgaaatagtataaaacaaaaccatactagtctgaatgcctggagcctccatggccatggagtatccgtagattccctcagcccagtgctaatacactgctctaccagaaatgtgcttctctccattaagcagtatccatgtcttcagctcttggggaaactatctctggtacagtgctagattaggtccccccaataggacacaaatttttcccacccattcaagaagcagtcatttccatttggtcactcagctttccatcaggaaaactgaagccactctaggtatttcaaccagtaataatttaatagacggactcagggacttacaaaactgttaaaaagactgagagagcaacagtcatggaagctttcatttacagtcaataaatcaaaaagggcatgaatttaaagaaatatccgctagtaccagaggggctgactctcaggagctcacccagcaaccatttgcaaacctcacttctgtcacctgcctgctggtgcaactaaagatcagaggccctccttttctgtttttccacattcacatatgtgcctcacattgggataatctaaactggatcttgctgatgaggtaaactgggaatgtaatttttagcattccagccctacaatgtagggtgggacttagacgggcaaggatattgctgaaaactaatagacaatatcgagcacatctttctttacctcataacccatagccaaaaccactccccaaaaatactcattcttccacagtattctcactgtggtgatttcccttcagaggcgcagttcagtcttctttcttttgcattctgtgttctgccagtccttcttataagcatgtctgctccccaatggaaaccagcatcctctacatctgatcttccaaagggctacttttccagagtttgaataacaagtgtatgcattattgcaggttcaaagatggagaaggaatcatgtggcgagactttcactaagccaaagattaagtccctaacatgaaaaggctaagttgtgcaatacacactgaacagtgtttcagtgaaccagcctatgcacagaaaaccaactatgtacagaaaatccagacataggccaggcacaatggctcatgcctgtaatcccagcactttaggaggccaaggcaggaggatttcttgagaccaggaattcaagattagccaacaaattgagatctcatctctaaagagagaaagagggaaagagataaacagagaaagaggaaagaaagaaagaaagaaagagaaagaaagaaaagaaaagaagaaagggaagggaaggggaggggaggggaggaaggaaggaaggagaaagaaaggaaggaaggaagggagggaggaaggaaggaaaggaaggaaggaaggagaaacagagaaggaaggaaggaaggaaggaaggagggagagagggacggacgcagggagggagggagggagagggagggaaagaaagaaaagaaagaaagccaagaaggctgatatatatttaacattcttattatgaataataatcttaacattcatatttaacatactttggcatattccaacccaaagagaatccacagagcagatagatttgggagtagcttatcctcactattcccactcatcctcccctaccctttgaacgtaccagctttacaataattctgtatgtgtctgaatattcatgtgtctgactctctcactaggttgtaggtactttgctaagctttgtatctttgctacataatatgatgccaattatatagcaggatttccatgaataaatggaacggtaagatggagcttgaaaagttttccaccacatctccaactggttgcttaatgttcctgtgaatatattgcttagccattcagacaccacatatctaaaataaaattcatccgttctttaaaactttcttcccttaaggggttagtagtggtttttaacaatgtggttcatcagaaaggtggaaaaatcctaaggtccagatgtgttatggatccacgtgactattgaaaacatttaggaagagatgtggagataaaaacagtagaagtaaatatttttaggaagatagaaacgaaaattgctgggcattagctagcaagtatttgtggtctagccagaagtattaatggcatttttaaagtatttgaatatctgatgctattgaatgatagtataatggcattcccagagttatttaatattgatataaaattccagcttttgcccatttagtatgatattggctgtgggttggtcataaattgctcttattattttgagatacattccatcaatacctagtttattgaaagtttttagcatgaaggggtattgaattttattgaaggcctttcctgcatctattgagataatcatgtggtttttgtcattggttctgtttatgtgatggattacatttatttggtatgttgaaccagccttgcatcccagggatgaagccaacttgatcgtggtggataacctttttgatgtgctgctagattcggtttgccagtattttattgaggattttcacattgatgttcatcagggatattggcctgaaaattttgttttggttgtgtctctgccaggttttggtatcaggattatgctggactcataaaatgagttagggaggagtccctctttttctattgtttgaaatagtttcagaaggaatggtaccagctcctctttgtacctctggtagaattcagctgtgactgtctggtcctgagctttttttagttggtaggctattaattactgcctcagtttcataacttgttattggtctatttagggattagatttcttcctggtttagtcttgggagggagtatgtgtccaggaatttatccatttcttctagattttctagtttatttgcacagaggtgtttatagtactctctgatggtagtttgtatttctgggggatcagtggtgatatcccctttatcattttttattgtgtctgtttgattcttctctctttttgaaaacccgcacaagacaaggatgccctctctcaccactcctattcaacacagtattggaagttccagccagggcaatcaggcaagagaaagaaataaaatgtattcaaataggaacagaggaggtcaaattgtctctctttgcagatgacatgattgtatatttagaaaaccctatcgtctcagccccaaatctccttaagctgataagcaatttcagcaaagtctcaggatacaaaatcaatgtgcaaaaatcacaagcattcctatacaccaataatagtcaaacagagagtaaaatcatgagtgaattcccattcacaattgctacaaagagaataaaatacctaggaatacaacttacaagggatgtgaaccaatgctcaaggaagtaagagaggacacaaacaaatggaaaaacattccatgttcacggataggaagaatcaatatcgtgaaaatggccatactgcctgaagtaatttatagattcaatgctatccccatcaaactaccactgactttcttcacagaataagaaaaaaactacttaacatttcatatggaaccaaaaaagagcccatatagccaagataatcgtaagcaaaagaacaaagctggaggcatcacattacctgacttcaaactatactacaaggctacattaaccaaaacagcaggtactggtaccaaaacagatctacagaccaatggaacagaacagaggcctcagaaataacgccacacatctacaattatctgatctttgacaaacctgacaaaaacaagcaataggaaaaggattccctatttaacaaagggtgttcagaaaactggctagccatatacagaaaactgaaactggaccccttccttacaccttaaacaaaaattaacacaagatggattaaagacttaaacatgggctgggtgtggtggctcacacttgtcttaatcacagcactttgggcggctgaggtgagcggatcacgaggtcaggagattgagaccatcctggccaacatggtgaaaccccatctctaataaaaatacaaaaaattagctgggcatggtggtgcacgcctgtagtcccagctacttgagaggctgaggcaggagaatatcttgaacctgggaggcagaggttgcagtgagccgagatcatgccactgcactctagcctgggcgacagagcgagactccatctcaaaaaaaacacttgaatgtaagacctaaaaccataaaaaccctagaagaaaacctaggcaataccattcaggacataggcatgagcaagggacttcatgtctaaaacaccaaaagcaatggcaacaaaagacaaaattgacaaacgggatctaattaaactaaagagcttctgcacagcaaaagaaactaccatcagagtgaacaggcaacctacagaatgggagaaaatttttgcaacctactcatctgacaaagggctaatatccagaatctacaatgaactcaaacaaatttacaagaaaaaaaaaaaaccccatcaaaaagtgggcgaaggatatgaacagacacttctcaaaagaagacatttatgcagccaaaaaacacatgaaaaaatgctcatcatcactggccatcagagaaatgcaaatcaaaaccacaacgagataccatctcacaccagttagaatggctatcattaaaaaatcaggaaacaacaggtgctggagaggatgtggagaaataggaacacttttacactgttggtgggactgtaaactagttcaaccatgtggaagtcggtgtggcgattcctcagggatctagaactagaaattccatttgacccagcaatcccattactgggtatatacccaaaagattataaatcatgctgctataaaaacacatgcacacgtatgtttacagcggcactattcacaatagcaaagacttggaaccaacccaaatgtccaacaatgatagactggattaagaaaatgtggcacatatacaccatggaatactatgcagtcataaaaaatgatgagttcatgtcctttgtagggacatggatgaagctggaaaccatcattctcagcaaactatcgcaaggacaaaaaaccacacaccgcatgttctcactcctaggtgggaactgaacaatgagaacacatggacacaggaaggggaacatcatacactggggactgttgtggggtggggggagggggaagggatagcattaggggagatacctaatgctaaatgacgagttaatgggtgcagcacactaacatggcacatgtatgcaacaaacctgcacgttgtgcacatgtaccctaaaacttgaagcataataataattaaaaaaaaaagaaaaaaagatagggaagggtctgaaggcagccttgaagatgctaagctggttagtctctcccacatcctactaaacagctgccaggaaaaaatggcaattggagtaaagcaccaatatcagctccatggcccccaaaacacagtggtgtccaggtaaaaactgacccagggaggaacagggtgccaccttacatagcacctttcaccaacaggacattccatgcctccaacacattcactgaaggacagctacagttatcacaatcagcatcttcaagcaggtgacaaagacaaagatgagcaaaacaaaaatgaaaattaccaaatatttgagtaaaagcaacagcatcaaaaaatggcaccaagtccaaccaactaaataactaacatctgagaaaacagaattcatagaagaattgagggaggaaggtctttacagtaaaccatacatatagttgttatggactgcattattatggccccctgaatttatatattgaagctgtaacccctagtacctcaaaaatgtgattgtattttgaaatggggcctttaaagaggttaagtaaggtaaaatgaggctgttagtgtgggctgtaacacaatctgaatgaagattagggcacacaaagagacaccagacaagtgcacacccagagggaagatcaagtgaagaggcagcaagagatggcatctgaagacaagaagagaggcctcagaggaaattaactgtgctggcaccttgatcttgggcttccagccttctgaactgtgagaaaataaatttctgttatttcagccacccagcctgtgatactttgttcctagcaaactaatacaatagtgatattctcagaaagaagtcatgagaatattaactaccaggaaaaacaaactaaatagtttggaaatttagaatgtcagtgttaaaattaatttgtgtcaagatctatatcccagggaaataaaaaataataattttttaaaagttatccagctgggcacagtggctcatgcctgtaatcccagaactttgaaaggctgaagttggaagatcatttgaagccagaaattcaagagcagcctgggccacaaagcaagacactgtctctacaaaaaataaaaatgaaaatgaaaaattacccaggcatggtggcatacgcttgtagtcccagctgcttgggaggctgagacagtaggatcgcttgagcccaggagttggagcccgcactgaaatataagcacaccactgcactacagcctaagagtcagagtgagccctgtctcttaaaaaaattaaaatttacctaagagaagagatacagctgaagaatgaattagtgagctgggagatcaagctaagcaattctcctaaaatgctgcgcaaagaaaagtgaagaaagcacgaaggaagagctagaaggcatgaacggtgcatccaggagcttcagcagctgcctggtaagtgctccagactgaaagcagagaaaatagaagacatgagatgataacttagaagtcactgaagaaatttcctcagagctgaagaaacacatgaatcttttcattcaaatggaccattatatgtcatgcagagtgaataaaagaagcacagtaaaacacatccacgtgaaacttcaaaatccagtgaaaaagaaaatgctaaacacttccagttgggcagggggtggggtggcaattataaactgatgaatgaaaattagattactgtctgtaatcacaacagcaacactgggtgctaagaaatgttggaatattatattcaaaattctcaagaaaaattcacattgaacctagaatcccatttccagcccaatttcaaacacaaaataaagacattttcagatatgcaaggactcagaaagcttatttgtttaccctttctgaaatagtttctcaaggatgtattccaaaaaaattaaagataatgtataatgaagaggaagatatagaatacaataaattgtagaaaacaaagaaaaaagtagctatttcaaaagttattgatgtattatttttatttaattaccttttataaacaaaattacaagtgatctctccatgataggtgtagggttgggcaaagaggacaaaaatgggaacactcttctcttatttggggatcctgtttactaactctagatttcaactgaaaaacataagcttaagtattcatttttgagaaatatatacactttgaaagtcactaagaaaggaagatgaaggatttccttgagagtagtaattataccatgtaactgctaataaatgtctgatggagtgaagaaaatttgtctataaaagtagcagggaacactgacccttctcaattgtgccttctatcccttggccattagtgttgggagacagtgcagtaatcaaaaacacagatgggctcaggtcccagcttcccattcactagctgtatgtccttactcatgacagttactatctcggagctctggtgtgtccattgttaaaatggaattaataaaatcttgtaaaattgccatgtagataaataagtcaaccctcccttggtgaccaaccatctgcacatacagatagtgtgatggttaatactgagtgtcaacttaacaggattgaagcatgcaaagtattgttcctaggtgtgtctgtgagggtgttgccaaaggagattaacatttgagtcagtagacttgggaaagggagatccaccctcaatctgggtgagcacaatctaatcagcagccatgtgaccagaataaaaagcaggcagaagaacgtgaaaggactagactggctgagtcttctggtctccatctttctcccgtgctggatgcttcttaccctcaaacatggaactccaagtttttccgctttgggactcttggacctttgaccacagactgaaggctgcactgttggcttccctacttttgaggttttgggacttggactagcttccttgctcctcagcttgcagatggcctattgtgggacctcaccttatgattgtgtaagttaacactcattaataaactcatatatatatgtatatatgtataacctattagttctgtccctctagagaaccctgactaatacagacaggaatatagagcaatgtctagacagagcctgagaccctcctcacctccaaagcaccttgtgtttttctctccttccccttctttgcccaccctctccttaggaattttcagcaaatccatatcttagaaagctgcagggaggagttggcctgatgggcttgccacacttgggccccactgcagtttccctggagcctcacagggactgcatcacagtccgtggggctcaataataagctctttcagcatcagcctagcttcaccattaattgctaccacattgaggcaaagaactgtggttttcatggcctccccaaatcatgtcggatcattcctacaaaaaagtggaccagaaagaaagaaactaggatttatttcttagtgccagaagtaacataattacagaggaatgttctggctaatgtaaaagttgctctttggtatgttgacctaagacctatatttgctgttttgttttcaatgttcttcctcacatgtcctgtctttaccatttccaagcctaagaactgtgggttatctataatcagtcattaatgttttcgttaccctcagttagtgaatactcaaagaagctggaaattctcaaagctctggtagttgctcaaggaaaagccaacaaataatagggtatagaaaagcctcaagtaaaactagatgggtattgttggatacccatgacgtaaggatacataaagtctttcattttgctgagtcaaaatgtgccatctaaactacacagcaaccatgcagtttattagctcaaaaaaaaaaaaaaaggccctggtcatttaaatctatgccattcatgtgtttatacatatttttatatgctttatataggaagtcttttaacttttttttatttaagcataggtaaaagttatataaccaaaaaattcgattaactcaaatacatgagaatatttgggcaatcttttggcttactgatttttctagttagtggaggatttaccaaagagttctttcagctttccacctttatttttcttttcctttttttttttttttttttcagacagagtcttaatctgtcgccaggctggagtgtgcagtggcgcgatctcggctcactgcaacctctgcctcccaggttcaagcgattctcctgcctcagcctcccaagtagctaggactacaggcgcgggtgccaccatgcctggctaattttttgtatttttagtagagacggaatttcaccatgttggccaggatggtctcgatcttttgaccccatgatccacccacctcggcctcccaaagtgctgggattacaggcatgagccactgcgcctggctccacctttattttctaacgatttctttaccaagtcttcccaggtcctttacttagtacttttatctcacctaaggtacatgactttttaaccaatgagttcttattgtaaaaatgcctcagaaatatcattctggctgtcaatttattaagtgatatgaattcatgggttaacaatttatgtctttttcatagaaagctaaatgtacaagaaaatctccagatttcatcatgatatacaaatgctttaaagtgaaggagttcagggaacttgaccccaaaatatggctccctagtataatgagtattttgaactaaaggcctttagagatcaacagattttagaagatactttttccctatctacataaagaccagagagacccataaagagaggaattgttttcctcccctacctcttgcctctcaatcctctgcctctcccaaacacaagctgaagttccctcatctgcctaaagtctggacctaccaaagaagaaaacaatgacctctggtcccttccctgagttttcattaactgaacccatattgcaagaaggaagactaaagtctgtcaacagacctcgacagacttttgtcacaaaaccttgactgctctgtgggcccaagagaccactgtatgttcttcaagcccactgatttcccctaaaaatcatttattatccccctaaaattatccacacttccccatctccattccccctaagaaatagagtatataaacacctgtatcccattggaatattggacaatcactctgagattccctacatgcacataatagtaataaatctgtgtgccttttcttttattaatctaaatttttgtgagttgatttttcagcaaaccttccaagctttcccttcacccatacaaaaagtgtgtaacttttgggttactatatttctggctcttattttttgaatgtcttccatagggggttttctttgtcttataaaaatgtggggaagctgaaatgcagggaatctgaagcaatcatatgtttttgttttacctcctatgtgaaatacacaagtaaagtggtttctcgacacgtacatcaagggctgaattccaaaggtatcccagttgtctgagcattctcccctacctatcagtgtattcctttcctcttcttacttttccataaaccaaatgttttcatttcttatatttatacttctgtgactcttaataaagatagtaaagcataaacaataaatgcctgaaatgcagtttttgtctgactttggacttactctgttgttcagttttttttgaagatttttcctgccaaccttccactccacccaccatcacccgaccccggccccctccatttggttcactgacaccttccaaaacctattccattgtctagcactaattacactgcaccacagagggagaggctgtgggctccagaatcggcaacctcaatctgaatctccgctgccccactgcgggattcttaacctctctgagcctctattcctttatctgtaaaagtggagataatagcaaaactgggtaatttgctggaaatatttaaatgagttgacctatgtgaaagaaactgactttcaatagatacttagtaaattctagtttctcttccctagtttgaggaatttggaaggaggaataacaatgactgtgtctataaactcataccacttttccaccgcacccctttatcttaacaatctaaatgaaagttcaatggcagagtaccaaagaaaagaagctaaaatgtttatctgaaaaaatcagtagacttctgccaaatttccagtctcacaaaacccaagaatactcttcccaagaatttccagtgcccctcccccaatcgctaataataaaaacaacaattctgacatctgtttgctgctagaatatactggtggctcaatcttcaaagaaaaatgtaatataatcaaatatattcaaattaaagtataatttagaaggtttttttacacatcagaaggtatttcaagaccttgccctttctccatttgttagtggcaacacttactagttctggttattttcactgtccaccgctttggatctggatactggaagtttacctcagtaatacctcctggaggaccaaaaagtgagataaacacaaatatcagtataattgaatgaggcaatatggacaaacaactgcaaagaagagagatactctatcatgtagaatattacattctctgcttcccttttatggacattttattctgctacagaattccaatcactagtttagccacactctgaaaagtcattttcctttttgacttgtagtggagccaatcagtttagaagcactcagggaggtatcttatataccatctgggacaaagaaaataaagtattttttcatttccttagcagttacaaatttacctaatgatatcattccaaattgagcagaatataaggtttgactattttaatcatttggcaattgtggtccaagtcctattacaatattaagatacccacaatttaaatcacacatcatatgaaatagtaatttgctttaaaaatgctgaatttcttggctcatgttctaaaaagatataggagaccaattgcaacaaaaaaaattatagaacatgtgtggaataaaatatgtaaggaatttccctagtttatttccttaaatgagccacaccataaaagtggctacaatgcatatatatatatatatatacacatatatatatccctgagccctcgtaattgttagattgctagactagctttgctatgaaaaagctgaggaactccagctggagccattcctttccccagttattactgaaggttatatttaattatctagctgagctgctgtaattagcatcaacaaagctctgtgccataatgacttgatatataaacttttgggaagcccattacaattcagatggaccttctgaaatgtagcattccacctgatggctaatcccagatattaacgtccattactccattcgatttccattcaccccttctaatgtgtttgtgtactgcttgctgacaactgtagtatgtttgtagtacaaacagtactttgcatttttgaatttggggtttaaatctgttcaggctctctcatgtggctggaatgttggcatggctcagaaaacaaaagtcaacttaaaaaaaagttggttcctccaggaagagagatggctatcaagcttgacaaatgcactgtaatgtgaacagggcagcagggttaattctgttaagtgattgctataggcctttgcttgtcttggacttttggccttttgctgcaaacagggtgggccttgttaaactgccaagttgacaattttatatccaaaggcttttgacagttttatatccaaggctttgcttttctgttgtgatttttcaacaggaaagctcaaagtgctctggggattttcatctctgagtccatgataacacttagaaaactcaatagatcgttgtttgttgaatctgagcataaaaattaggttctaagagaaagaaaaatcattttataaaaacatagatttggatatcacagtgtgctctgctaatttcttttggctggtgctttttgttgttgttgtttaaagtttacatggaatctctgtttccactgaaccatctcagacactgaaacacaaagctgggttacaacctaatccgcaatgtggggttatcttcctactgttggggcattttccaactgggtaaggatctgagcactatagagatgtatactgagctcttatattaccttgtctgtatcagacttaactgagacacagataagttaaaaagtagcccgcaaatcctaggacctagcaccctacaatctaagagctaaaatcattgtctcttggacataaatcagcaaacttcattcagcacatgttaagtacctgccatatgttaaccctctactaaccatgtgttacatactgtgaaaaaaaaaagaagtcacagttgaaggtttctagaaggtttctaaaagttacctgatctgccaatcatctccatcagaaccctcaggtaagcttgtgtattaagcagattcctgaatcccaccccagatctacttgattggaggagggggctaaatttgcatttttttataagcttctcccaaatgatgcttatgagtaatgtttgagaactattctagactcaggattctcaaacctggctgcacatttgaatcacctagtgaatttaagaccaccaatgacctagtaccacagcagaccaattaaatcagaccctctggggtaagggggagcctgagcatcagtcattgttgttgttgttgctgctgttgttgttgtcgttgttaagtccacatgtaactctaatgggcatccaaggctgtgaaccatggttctagactttaggttctatcagaatttacgacaggaagaaatcactcctatctgaagtggtcagatactacctttgatttcctctcatatcttgcaaaagacttcatgttctctttgaaaagtgtgtgtgtatgagtttgttattgttttaaaaattacatatttatatagcacccatgcaagaaacagtttttacagatagcacataatttcatttgtcttcaattcatctactgtaatgtaattagaagaaaaacgtattagtattccaattatagataaagcaaaagattagtactccgcctgagatcacacaacaaattcattctaaaattctgacttcactggagttgcttcccagaaataaaaaaagagagagagagatagagagtctttgaacagtcctagttgaaatgtagcctattcaatactaaaaattattcaaataagtagtccatccacactccataatggacagtcttcctcttggcttttttgttgttgttattataaagaagggaatatcctaaagggtcaataatcctccttctatttctccatttttctgtctccataaggcaacatcactgaatgtattaatgggcttgctcagttagggtttttaatccctcccagtttgcccagaatgttctcagttttagtactgaaagtcctgtgcccagttaacccgtcttgggcaaacctggacagtccctatcagcagtggaaataaacactgctttgaagatctatgcaggaatgggagtttaaggttagttaggaagatcagccaggccagcaatgggcagggagtgggacaatctaaagatccatgaaggtgggcagacttggcttcaggctttgaagtctagctgggaaggcacagtgcatgacccagggaaggggctctcaaacttgagtgtgtattacaaccccctggagggcttgttagaacacaaattgctgggcaccacctccagagttcctgattcagtaggtctggagaggggcctagaatttgcatttctaacacattcccatgtaatgctgatgctgttggtcccaggatcacgccttgagaaccactgctctaggtgctagtctagactttcagctgagcataagtaataggtgtgaaggtgatgtcttggcactagggagctagcaggccacattaggcagagatatgagctagggaccaaaggcaggactcaaagcactgagcaaatgtgagctaacatggcaggaccaggctaagaggatctggagtactaggcagataaacaaaacaggagctccatcttaaagaagtatgaccaagatctttctactggatgtgggtgcaaggtgtggtgttggccttaggaacaaggcaaaattcaatgcgtaagcaatcattgaggagcacagacttaatggtcagtcactggagttcctgaattaggaattttaaagatcccctgacaaccataaaagttgggtgaccaactattctagttttcccaggaatttccctacttcagcactgaaagtgcagggcctagaaacccctcagtcctaagacatctggtcaccctaattgtgctcttagaagactacagcctagatccacctacatctctgggtcagttggctccagccataaggaaagaaagcacacatgagaagaggaggagccagctggaaaacgaggcagagagccaggatgctcattgcaacctatagccttcaagagaggataaaagggcacccagaaatattgtctataaatgctgaaatgcatttgctttaaatgggcaaaacacgttaaatgactcctcaggcctgcagcttttctaaactcatgaaagtggaaaagttcagcacaaacagaaccatccagacaccccgtagatggaagtctctctcactgccttttgacagtcatcacacacacttaagatctcattgtaagtatagccttaaagagccctgataagtacacatcagtaggggaactaaaacccatctgtaaatattagcagagtctcccatgttcttttggtttccttcacacacaaaaataagctaagtggaatgaacacacagttcaaaatgactaaaacactaaaggacatttaaatctggggaaagaatctctctgttgggaatatggatttcacctaagatccttagtgtcattcccagcatgccagagttatttcaaatctctttcataaccaaatattaatattccaccagaatggggagcatgagggccactattgacaggaacacagcctactaatcatgagagatgtttaagatgttcttcactaacgttatccacagactgtataaaaataataacagaaaacgtttaacagtaacaaggatcatcaccagggaaagtacctaaaccatcacaaaatccgaaagcaaacactgaactaatccatcctcccagcaactaactcctgcaaaatgctgcttatgtagaaataatcttctcaatcacacttaaaatattcactatgataatgaactttagccgcagtgaattgagtgtcccaatgtgctgagtcttcatgatcaaggagaacctggcataaccagcatcttcaaaatgcaagtaccctatgtccttctggaatgagccatgtcatccagtaagtaggctgaaacagagggatccgacgaggagactctcccagagctgaagtgggagttcagagcagagtggagaagattgaaaatctcccagataacctgggagaaaatgccagaagaaacaggaatttgcccatccattcaatctttcattcaacagatagttatgatgtgccatctcaatgccagaccccatgctaggcagaaaggctacaaagtctaatggaactgctttataggtatttgtaatcaaatagaacaagcagacaaattaacaagtaattgcagtacctctaagacgttttataataaaaggatatatgcaacctcagagaagcacagatgagagagaattttccccagccttgtattattctcagtgcaactaactgtctttgataccacagttaagtccttccttctcagaagcttcttctttgagtcacttttgggaaaaaaataattattgcttttctgagagatcagagtctcatcaaatgttattgtgattctaagactgtcaacagctaccatttagtgatacctactatgtgccaggcactacactgagtgttttgcacacattactccactcaatcctcagccctgcgtaacaagcagcatgctctctccactttagaaatcaaggggaaatgaatcacagtgggattaactagtttaccctcagtctgtcaatgatggggcaagaagtgaacacagacagtccacttcatgttcaagatcttaaccactatgttgaaatcacttatgtagtgaactattagaatgtctatattgattatttgtattctactgttataattgcatgcatctagtttttgctttgatgagttcttacaagaaattgcatgctgcttttaatacttccttatttgagttgataatttgcaaccattttatttgaacctatctctgtgggacttaaccacaacagctgcaatttattgaaaacttgctctgagccagtatatatcatctctgtcaattcccatagttctctgaggggtatgtatgtaggtatgtgcatatacttatattcttatatatgtatatgtaatgtagagtatcaggtaacttaccccttgtagcttaggctacaagtcctccactagcataggcttttctaaggttccagaaagggttcttagaaacatgtttgcatgttcatacattttcttatctatttttgaaagagtatttcgaaactgatataagcgtaagacccacaaagcctgcagactacaggtgatggaaacaggatttgtgtgcagatgtgcccaactccaagggtttaaaaccccgtgacacagtaagtaaggaggaaggggtggagcagtgggatttagatgcacatgttgggcttatcatgagagatttcaagctaaggaaagaggggagttgatttgaggggcttttctcctctaaagtgaccttgaagccctcattttaatgcttcatgtgccaacaagaagtagagaatgtaggtaactctaatacgaatgaggctctaagaactactaggtgaacactcataatagtggcaccagttccgaacaacacatttgtaaataaattgaagcagccttcagttttttctaaactaagaagctactagacactaagcaggtcaaacagaccaaaggcactttggtgacacttagcttaggtagcccttcgactgccaatccatcattatctgaaagttctgcattgaccaactgctgtcagaaaatgttccctttcttccagaaattccatgccagctcaccttccaaaagtttccagtgggcttgttgatctttcacccaaatagccacctaacactttacgaatatccatctctgtgaagaaaccgactcagctgcaacaacctgttttttttaattcattaagccttagaatagcatctttcttagtaaaatataaatgcaatatttaataaaactatatatacagtgattattataagcagggagaggacaggctgaaaatgagtgattttaacaagagctttaacaatttttaatagacctgcattcctttacattcctggtgtttctcaaactttagtgggtttaaagttcatctggggatttataaaaattgctgacttcaagagctcctcttaaaatttctaattctgaaggcctggagggatcctcaacaatcttcatttttaacgattttgatgaagatggactgcagctgtctcttgagaaatgcttctttagaacaagtgaaattgctaattacacagtaagcacttagtcatctaccattacccaagtcttgttagttgtgagttgccccttggtatctgctaaggtttgaatgtgtccctcagaaagcatatgttggaaacttaacctttaatgcaacagtgtttgttgggaggtaggttccaatgagaggtaattagaacatgagggctctgcatttatgaatagatgaatgtgtggaagtaggttccttataaaataaggtcagtcacctttcctctctcccatcctctttttgccctctgacatcctatgcctttcaccatgagatgacacagcaagaaggtccctgatagataccagtgcttcaatcttggacttcccaactaaagaactatgaaccaataaatttctgttcattacaaattatccagtctcaggtattctgttacagctgcacaaaacagactaaggcagtatcccattctcagctgcagcaattctttttaagacaaaactccatggattttaagacatctgagtagggagagttaattatgtcctctcaaagaggtattttccctagaccaattagtttacaagaacatacactctgtttctaaaactttggaaaacaaagatgtggttcatatcagagtgaaaatttcattgatacccattataatgaacgtgtttcattttggcaaactgtcatgaaatgtcctgttcatttggagaaaattcctggaaagatggtaggcagaggtcccaactcccaatacggaatcctaagagggagaagatctgtctgctcccagtcagagaagggtgggctcttcctacactaagatcttagccacattttgtctccctgaattcttgccagagactagtcctccaggctgagagtatatcttatatctgtataattagataacaattatgttatctaaaactgagaaccctgggtatggtacatccagacacttacggcagaaaatatttgatatggtttggctctgtgtccccactcaaatctcatgtcaaactgtaattcccaatgttgggggagggatctggtgggaggtaattggatcatgggggcagatttctcccttgctcttgcgatagtaagttctcacgagatctgataaatgtttaaaggtgtgtggcacttcccccccttcactctctctctctttctaccatggtgagacgtgcttgcttccccttcaccttctgccatgacggtaagtttcctgagaccttccagccatgcttcctgtacagcctatggaactgtgagtcaattaaacctctttcttcataaattatccaggtcaggtagttctttatagcagtgtgagaacagactctacaatatcttcaaaatgttgtttattttttaaaaaaatgtatggatggaggccaggcgcgtggctcacgcctgtaatcccagcactttgggagaccaaggtgggcagatcatgaggtcaagagatcaagaccattctggctaacatggtgaaacactgtctctactaaaaatacaaaaaattagccgggcatggtggcaggcgcatgcaatcccagctacttgggaggctgaggcaggagaatcgcttgaacccaggaggaggaagttgcagtgagccaagttcgtgccactgcactccagcctgggtgacagagcaagactccatctttaaaaaaaaaaaaaaaaaagaatggtatcagaaagaatagaaggtgaaaggaagaaaggaaatggaaaattagtattctatccatctgtagaaaattttttaaaatatgtattgtcttttattctgatttcttctggattccactttgtagatttatgagcccaggaccactggtattcagtaaaggagtagaaatcaatttgtaggggcaggagggatgccatgtgtcatagctacgcaaacagaagaaacttagtgattaaaactcacaaaaaagaacagtattagctgggagctatggctcatgcttataatcccagcactttgggaggccgaggtgggtggatcacttgaggtcagcagttcaagaccagcctggccaagatggcgaaacccccgtctctactaaaaatacaaaaattagctgggcgtggtagcgggcgcctgtaatcccagctactcaggaggctgaggcaggagaatcacttgaacctgggaggcagagttgcagggagccaagaacatgccactgtactccagcctgggtgacagagcgagactctatctcaaaaagaaagaaaagaacgaaagaaagaaagaaagaaagaaagaaagaaagaaagaaagaaagaaagaaagaaagaaagaaggaaagaaggaaagaaggaaagaaggaaagaaggaaagaaggaaagaaagaaagaaggaaagaaggaaagaaggaaagaaggaaagaaggaaagaaggaaagaaggaaggaaagaaagaaagaaagaaagaaagaaagaaagaaagaaagaaagaaagaaggaaggaaggaaggaaggaaggaaggaaggaaggaaggaaggaaggaaggaaagaaagaaagaaagaaagaaagaaagaaagaaagaaacagtatcacctttcaaacagtgatgggtccctaatacctatatgctgagtattgtcacactcatgttccatagctgtttgtattctgtgtcatttttactatacgtacacaagacagaaaacaaaaaacactgtttaattcagattttgtaaggtatatagtataactgtttactaaaatatcatatttgtaggaggtgaaagttaatatactagcaaactgctaaagagaattaactatttttttaacaaggaatgtatatttatgtagcactctcagactttaaaagcaccattactgtacataaagcttttgatttgcagtttttcatcataaacccaacagagcagagcccagacaccaggcatttttccctggagtcactctgccttattatcaggactggacttaagtatccttccctggaaagggcaaaagatctcacattgtagggcaaatatgcttgaggcagtacaaagaggcacagtcatgtttcaggatgtggttttagccaaaggtgatacaatcacaaagctgggttgagagaggaaataacaatcaggagcagtcttgagtgtgtctctgttacctggagtcttcttgttcttctctctacctctccaagagtctccattaccattgatgtaaataattagtaataagagccggaagcaaaaatgttgaaatactttaactcttttgaacacaaatttaatagcagtagtaaactaacaaatgaatcattgaattgagggtggattctgctgcaacaaagaacttgtattatgatataaattgagaagattgttctgatctagctcctcctgtattcagagttaaaactctctctaaacatcatgttccacctaagaaccattaactctcccattctcacaacctgtgtgacaaatactcatactctaaatatttggcttatctcacttatccattgctagaggatttaacatacaagtgttgccctacatacagactactaagttaaccataaccattcgtgtattgatacgtatgttcaaacagcaatgatgaactgagtgcctgctctgaaggaactcaaattcagattcagctaatatttctggagtaacacccatgcactaggtattgagctaaagactttgtcttatttaggtgcctatcatgtgctaggtgttgaactagttactttaacacattatctcatttggtcttcataacaacctagtaggtcggcattttttattttatagataggagactaacactcagaaaaggtgagtgacttgcctgaagtcataaaattagtcaagacttaaaactggctttttggtcctgagtcttctctctggctctttctaattggtagtattgtctgtcttaggtccacgcttttactatcctcttctatgcaaaagaatatctgatcagaaagaaacaaagccacttatagtttgattagaaagaaataaaaccgcacagaattttagccacctttgtctatgggctgatagctttgtgcacacaaggccaagcaaccacaggctccagagatgtgatgtggagatgtgccaagtggcaggtgacatcacatctttacattcctagaagtactgtgccctaataattttacagcagagacataaacagatggatgtgacaaatccagtaatggcagttacataatctcaagatctttctcaatgactctaagaacatgtccaagaccaagaatgacttaccaggtacatgccagtgctttaactaaacagaaactatttttcaactaaacaaacataaattacattatccctcctttttggctctaccattttgaaatttctaactttgtgaggtttttaacttaaaaatgtttttccaaatttatggaaagaggccacatatgcccacgtttagggaaaagtatggacttcagagttacaagctcaggtttggacaaggccaggcaaggttggactgaatcctgcctctatcgttttctcactacatttgcagtgagtcactaaatttttttaagtctctgcttcctcatctgtaaaatgggtatagcaacgatatctacctgtgcagaaaagagttaactcagcagggctgaattgttcaaaccttgcacattcccaagaaaggcctgttttcatgactgctctttgaccagcttctgggaattaaactgttagaatgttccaagaactaagagtatttttctcacatgggttcttgagccatactataccagtttgtctgcatacgtgtgcaacgtggtttatgcttgcttctgggagcctggagcttcaatggcacaagtcatgtgcctatgtgaatgatccccaacaaaaaccctagactcgctcaatcatggcagatgggaggtaggactagattgcaactccagacagagcagtgtgcaaggtcttgcattgtgaattttagctccagatcaactgcaagaacaaaccagcaatcctgagaggacccacagaccctctgaaggaagcagacagctcctacaggacctgggagaccccccaaaactgtgagtgccccaaccttggaagcagaaaatggagaccctcctttcctgaactcacactcccactggagaagctgaaggtctgtttgcaggagaattttcttactttacctgaagctgagtcaatctagagagctgagtgaaattcaggggcagaggaagtggcagaaaggctctgggaactcactggctcccctagcaggccattcctgcctgtcaccacagggatccaacaggagaggagcaggggataaaactacacaaggagaaggaaatctctagctgaactatgtaacaattagaacgggggttgaagcctcctggccagaactcaggggagggcacaaatccggcatgcagactccaaaggcaagggaagacccaagcccctttcttttgtagcgtggaggtgggtagactgaggcaggttttcaaacccatattgctctccacctggaaatgaatggggatctggtggtgggggcatggtgggagtgagatgggcccttcagttcgcacgggagctgggtgaggcctgtaactgctggctttcccctacttcctagacaacctgcatgactcagcagaggcagccataatcctcctaggtacacaactccagtggcctgggaatctcacccccatcccccacagtagctgcagcaagacccacccaaggagagcctgaattcagacaggcctagcccagctcccacctgatggtccttccctatccaccctggtcacggaagacaaagggcatataatcttgagagttctagggccccacccaccaccagttcctccccatactactacagctaatgctgtctggaaaatgccacctcctggcagaaggtcaaccagcacaaaaacagcattgaaccaccaaagcaaaggaccctcatggagtccattgcaccccacgccccctccaccagaacaggcactggtatccatggctgagagacacatagatggttcacgtaacaggacactgtgcagaaaacccccagtaccagcccagaactgcgtagactcactgggtggctagacccagaagacagacaaaaatcactgcagttcatctcacaggaagtcacatccataggaaaagggggagagtactacatcaagggaacaacccgtgggagaacctgaacaatagccttcagtcctagaccttccctttgacagagcctacccaaatgagaaggaaccagaaaaccaacccaggtaatactacaaaacaaggctcttcaacacccccaaaaaaccacattagttcaccagcaatggatccaaaccaagaagaaatccctgatttacctgaaaaagaattcaggaggttagttattaagctaataagggagggaccagagaaaggcaaagttcaatgcaaggaaatccaaaaaatgatacaggaagtaaagggagaaatattcaaggaaatagacggcttaaagaaaaacaatcaaaaattcaggaaattttggaccacttttagaaatgcaaaatgctgtggaaaatctcagcaatagaattgaacaagtagaagaaagaaattcagagctcaatgacatggtcgtcaaattaacccagtccaacaaagacaaagaaaaaaaaaatgagaaaatatgaacaaagcctccaagaagtctgggattatgctaaacaaccaaacgtaataatcagtgttcttgagaaaaaagacaattctaaaagcttgggaaacatattttggggaataattgaggaaaacttcctcagccttgctagagacatagacatgtaaatacaagaagcacaaagaacacctgggaaattcatcgcaaaaagatcttcacctaggcacattgtcatcagcttatccaaagttaagacgaaggaaagaatcttaagagctgtgagacagaagcactaggtaacctagcaagcaaaacctatcagattaacagcagatttctcaacagaaaccctacaagctagaagggattggggccctatcttcagcctcctcaaacaaaacaattattagccaagaattctgtatccagaaaaactaagcatcatatatgaaggaaagatagtcttttttagacaaacaaatgctaagagaattcgccattaccaagccaccactacaagaactgctaaaaggagctctaaatcttgaaaaaaaatcctggaggaaacacatcaaaacagaacctttttaaagcataaatcacacaggacctataaaacaaaaatacaagctaaaaagcaaaaacaaaaaacaaaaacaaagtatacaggcaacaaagagcacaatgaatgcaatggtacctcacatttcaatactaacattgaatgtaaatgatgtaaatgctccacttaaaagatactgaaccacagaatggataagaactcaccaaccaaccatctgctgccttcaggggactcagctaacacataaggactcacataaacttaaagtaaagcggttaaaaaaaaaaaggcatttcatgcaaatggaaaccaaaagtaagcaggtgtaaatattcttacatcagacaaaacaaactttaaagtaacagcagttaaaagagacaaagagaaacattatataatggtaaaaggccttgtccaacaggaaaatatcacaatcctaaaccctaaataccacaatcataaatctgaaaatatatgcacctaacactggagctctgaaatttataaaacaattactaatagacctaagaaatgagatagacagcaacacaataatagtgggggacgtcagcattccactgacagcactagacagctcattaagacagaaagtcaacaaagaaacaatggatttaaactatactttggaacaaatggacttaacagatatatacggaacagttcatccaacaactgcagaatacacattctattcaacaacacatagaactttctccaagacagaccatataataggtcataaaatgagccttaataaatttaagaaaattaaaattatatcaagcactctctcagacaacactggaataaaactggaaatcaactccaaaaggaatcttcaaagccagcaaacacatggaaattaaatagcctgctccttaatgagcaatgggtcaaaaatgatattaagatggaaatttaaaaattctttgaactgaatgacaataatgataccacttatcaaaacctctgggatacagcaaaggcagtgctgagtggaaagttcacatccctaaacacgtacatcaaaaagactgaaagagcacaaactgacactctaaggtcacacctaaagaaactagagaaacagaacaaaccaaactcaaacccagcaaagaaaggaaataaccaagatcagagcagaactaaaggaaactgaaacaaaaaaaatacaaaagataaatgaacaaaaagctggctctttgaaaagataaataaaattgatagactattagcaagattaaccaagaaaagaagaaagaaaatccaaataacctcactaagaaataaaacaggagatattacaactgacatcactgaaatataaaagatagttcaaggccactatgaacacctttacacacataaactagaaaacccagaatagatgcatacatttctggaaaaacaaaaccctcctagcttaaattaggaagaattagataccctgaacaaaacaataacaagcagcgagattgaaatggcaattttaaaactgccaacaaaaaaatagcccaggacctgacagattcacagcagaattctaccagacatttaaagaaaaattggtaccaatccttttgacactatttcacaagataaagaaagaaggaaccatccctaatttgttctataaaggcagcattaccctaatgccaaaaccaggaaaggacataaccaaaaaagaaaactacaggacgggtgcggtggctcacacctgtaatcccagcactttgggaggccaaggtaggtggatcacgaggtcaggagattgagaccatcctggctaacaaggtgaaaccccgtctctactaaaaatacaaaaaattagccgggcatggtggcaggcgcctatagtcccagctactctggaggctgaggcaggagaatggcatgaacccaggaggtggagcttgcagtgagctgaaatagcgccactgcactccagcctgggcgacagagtgagactctgtctcaaaataaaaaaaaaaaggaagaaagaaaactacatacagaccaacatccttgatgaacacagatgctaaaatccttaacaaaatacgaactaactgaatccaacaatatataaaaaagatctagggccaggcacagtggctcacacctgaaatcccagcactttgggaggccgaggcaggcagatcacctgaagtcggtagttcgagaccagcctgaccaacatggagaaaccgtgtctctactaaaaatacaaaattagctgagcgtgttggcgcatgcctgtaatcccagctactcgggaggctgaggcagaagaatcgcttgaacctgggaggcagaggttgtggtgagccgaaatcatgccattgcactctagcctgggcaacaagagcgaaactctgaaactccgcctcaaaaaaaaaaaaaaaaaaaaaaaaaatatatatatatatatatatatatatatacatatatatacacaatctgccatgataaagtgggtttcataccagggattcagggatggtttaacatatgtgagtcaataaatgtgatacaacagataaacagaattaaaaacgaaaatcacatgatcatttcaatagatgcagaaaaagcattcaacaacatctagcatccctttatagttaaaactctcaacaaaatcagcatacaagggacataccttaatgtaataaaagccatctacaacaaactcacagccaacttaatactgaatggtaaaagttgaaagcattccctctgagaacaggaacaaggcaaggatgcccactctcaccactcctcttcaacatagtactggatgtcctgaccagagccatcagacaagagaaagaaataaagcgcattcaaatcagtaaagaggaagtcaaactgtcactgattgctaacaatatgattgattaccttgaaaaccctaaggactcctccagaaagctcctagaactgataaaagaattcagcaaagtttccagatacaagattaatgtacacaaatcagtggctcttccatacaccaagagcaaccaagcagacaatcaaatcaagaacacaaccccttttacaatagctgcaaaaataaaatacttaggaatatactaacaaaggagtcaaaagacctctacaaggaaaactataaaacactgctgaaagaaatcatagacaacatcaacaaatggaaacatatcccatgctcatggataggcagaatcaatattgtgaaaatgaccatactgccaagagcaatctacaaattcaatgcaatccccatcaaaataccaccaccattcttcacagaattagaaaaacaattccaaaattcatacagaacgaaaaaagagcctgcagagccaaagcaagaccaagcaaaaagaacaaatctggaggcatcacactatctgatttcaaactatactataaggccatagttaccaaaacaacatggtactggcacaaaaataggcacaaagaccaatggaacagaagagagaacccagaaataaacccagatacttacagccaaatgatctttgacaaagtaaacaaaaacataaagtggggaaacgacattctttcaacaaatggtgctgggataattgcctagccacatgtaggagaattaaactggatcctcatctctcaccttatgcaaaatcaacttaagttggattaagtccttaaacctaagacctgaaactataaaaattctagaagataacattggaaaaacccttctagacattggcttaggcaaggatttcataaccaagaacccaaaagcaaatgcaataaaaacaaacataaatagctgggacctaattaaactaaagagcttttgcattgcaaacggaacagtcagcagagtaagcagacaactcacaagtgggagaaaatcttcacaatcgatacatctgacaaaggactaatatccagaatctacaatgaactcaaatcactaagaaaaacaatcttatcaaaaagtgggataaagacatgaatagacaattctcaaaagaagatacacaaatggccaacaaacgtgaaaaatgctcaacattaatgatcagggaaatgcaaatcaaaaccacaacgcaatactacctcactcctgcaagaatggccataatcaaaaaatcaaaaacagtagatactagaatggatgcagtgaacagggaacatttctacactgttggtgggaatgtaaactagtacagctgctatggaaaacagtatggagattccttaaggaactgaaagtagaaataccatttgatccagcaatcccactactgagtatctacccagaggaaaagaagtcattattcaaaaaagacacttgcacaagcatgtttatagcagcacaatttacaattgcaaaatcgtggaactaacccaaatgcccatcaatcaatggatggataaagacactgtgatagatacatatatatattatatatataatatataaataaatattatatattatatataaataaatattatatataaataaatattatatattatatattatatatattatatattatataataaatattatatataatatataatatataatttatataattataatttatatataatatataatatataaatatatattataatatatatattatataatatattatatatattatatattatatatatttatatatataatatattatatataatatatattatatattatatataatatatattatatattatatataatatataatatatattatatataaatatatattatatatataaatattatatattatataaaatattatatataatatataaaatattatatatataatatatatattatatatataaaatatatatattatatataaaatattatatataatatatatgatggaatactacatagccataaaaatgaatgaattaacagcatctgcagtgacctggatgagactggagactgttattctaagtgaagtaactcaggaattgaaaatcaagcatcgtatgttctcactgatatgtgggagctaagctatgaggacacaaaggcataagaattatacgatggactttagggagttgcggggaagagtgggaggggatgagggataaataactacaaatatggtgcagtgtatactgctcaggtgcaccaaaatctcacaaaatcaccactaaagaacttactcatgtaaccaaataccacctgtaccccaataatttatggaaaaataaaaaataaaaacaaaaacccttagactcctaggctaggagagccctgctgaaagacaacatttcacacttgtctcaactaattgctggaggaattaggcacattctgtgcaactccactgggagagactcttggaagcttgaggctgctttcctttggatttagtcacatgtgcctattccctttgctgattttgctgtatatcttttcactacgataaactgtaactgtaactattacaacttttgagttctatgagtccttctagaaagtcactgaacctggggtggtcttagggatagatgcctgacacactatcccaaaggataattgtgaagattaaacagcaacatgcatatcaagcacttgacataatggctagcctaaagtgttccatgggtgttattggcatcattattatatattacattatttattcatataaaattatatcttattatatcacatgtataactacataactcagttttctatacactattaataaaagattgagataattctttcttgtcttatttttccttaaacatttacctctctcaccctttgttgatttagctgtatttctactgaacacatgaactaatatcctaacttctcagactatcaacagatgccatgaaataattggatgcttgttagcaactggcctgatagtatttgattgtgctttctactgttccttcctgatgactcgtagagggtagacccagacgatacctggaaattatttgctcatgtggcagtcactgttgattgcctacccaaagccattactccttctccccacctaacagaagccgagttttgttcagcaacaacgtgcccagtcacagaggataaatcttggctagtctaagctagtgctagtagtcgcatttccttttgccaatgatttatttcaggtgatcatgggacctcgttatgaatgatgagacaaaggtagaatatcccagtaagcaactgggaagatttcctcctctgattgtatacagagaatcaggtagatattagttaggagggtccctttgcctaactttggagatggatatgtaaaaacctgctgctaagtgtgcagttgttatcccaagtctacaatgggagatagcatcaaattactggagatggaagaatgggaagatagacagtttggtcttgataaaattgttgaactgtaactttgtaactacttatatttagacttcctttaaataagaaaagtaaatgttcattttgtctagtcactattggctgagtcttctcttacatgagactaatagtatcctcatgaacttgaaacacatgtggtttcaacacgcgttttgtaaagacaaattatgcacagccctgtattagtccattttcacactgctataaagatagtacctgagactaggcaatttgtaaaggaaaaaggtttacttgactcacagttctgcatggctgaggaggcctgaggaaacttacaatcatggcaaaggcgaaggggaagaaaggcaatcatgagaactcacttgctatcctagaacagcatgggggaaacaacccccatgatccaattacctcccacgaggtccctcccttgacatgtggtgattacaatttggattacaatccaaaaccatattaagtccttatccgggaattctgaaaaggtagcacatgtgcaattcaaacttaatgatcttcttccaaaaaagacatactcagtaataacaaacttcaatcagaacccaattatttttgcaaagaaaggtaggaagatagaaccagaaaattctttagtcttttaaagcatgtcatggtctcctttcagcttaaagaccttcttgattaaacatgaaattttctgtgcagataagccagttctgtggatgtgaagtctgaggagtatattttatgtttataatgtggatattactattcatggttgggaaatgagaaatgaacagtattttacatgccattatcctttgccaatttctctgaagggcatccagcttcacatagtagtaaaatgtgtaattcaggactgggaagccgtataatatgaaattagtgtttttaagaaattttaagggaatctgaattttaaaatgctcaaaaataaaacatatatttatatgcactattagagcacattataagtgtgactgtttttaagtcaaagttttaataatctattgcttatttagggattatataatacctacttccaatatgtgaagcaataagagaaatgacaaaggaattatatatatatacacatttaaacgtaatacatatacacaaatttcaagcatatatatcctccatagtggtcaatttggtaagctttaattgtttgaatttctcattaggaattttattaacagtcaataccatctgattttaaatatcctcaacagtggctgatggtcattctttcaaagcagagaagctatccatctgcttttttctccactcttcatattagcctaattccatacttctctccctgaccatgcaatcctatacagaaatgtgatgtaagtctacatatataagtattattgtttattctacaaaaagggatcctacaatttctatatcttgtctcctcaaacttttgtgtggaataccttgtggaaatcactacaggtcaataggtatagcactaatcattatttttaatgacatttttgccactacaaacacatggccttacatgtgaatatctttctatggaatagagtccaagaactggaattgctgggccaagaagcacacatatatttttaaatttaatagatgttggcaaatggctttcccaaaacctataacacctcatatttttcccagccatgagactaatcccttccctaaatcaccaccagtagtatttattataactcttcaatttttgtcatctgattgatgtaaaattacactttcttttactttaatttgcattttccttattataacaaacttgagaatccttctatatattttttggacatatggattcataattctttgcccattttttaattggattgtgttacttttggccaaatgttcagctatttgaaaaaatcagttacaaatatttgttgaaaattgaatgtctgtctattgttttatttatgatatcctttgtgacatcaaggttcaaatatgtctatcttttatagcttctggaaaagatgctctcagttcatacatttttctacattcaattttctagatcttcttgcaaggcttttacaattttattttgaccatgtaagcttcttagccatctggaatttatatttaaaggtagaataaaatggtgatcctcttttcttttcttccagatggataatcaattgtccaaacatcatttatcaaacaattgattcatttcacactaaaatgaactactactttggaaatatattaaactcatctatactggcttctatttctgcaatttttattcctttcccaaccacatgattatgatgcagtagttttattatttatactaatatccagtaagacaagacctctcactattccccctttgcatattttcttagctattctgaagcatttattcttcagtataaactttaaccttctttggccaatcatacctccaaagaatgccaattctaattttactgccttatgtttatacactcactaggtgtgtgtatttaatgcttctcttcttaagtatttctattcaatgtgatatgcctttccatttgttcaaatcttattttctttcagtaagattttctatttttctttatgcagtttcttttcttgtttgatttattcctaagtattttatatttttccaataattgtaagtagaaatttttttctcacttctatttctaagtattttgttaacacagagataaactaatgctttttaaaaatttatcttctattcatctccttaccaaattctcttttttttctttaaagtttttattttaagttcaaggggtacgtgtgcagatttgttacatgggtaaattgtgtgtcatgggggtttcatgtatagataattttgtcacccagatagtcagcataatacccaataggtagttttagaatccaaaccctcgtcccaccctctgccctcaagtaggcccagtgtttattgttcccttctttgtgtccatatgtactcagtgtttagctcccacttataagtgagaatatgtggtatttagttttctgtccttacattagtttgcttcagagaatggcctccagctccatccatgctgctgcaaagaacataatcttattcttttttatggccgcacagtattccatggtgtacatgtgccacattttctttatccagtctaccactgatgggcgtctaggttgattccatgtctttgctattgtgaaaagtgctgcaatgaacatatgcattcatgtgcctttatggtagaaatgatttctattcctttggatatatacccagtaatgggattgctgggtcaactggtgcttctgctttaaattctttgagaaatctccacattgctttccacaatagctgaactaatttacattcccaccagcaatatataagtgttccttttctctgtaaccttgccagcatctattgttttttgactttttaacaatagccattctaactagtatcttggaatggtatcttgttggggtttcaattcgcatctccctaatgattagtaatattgagtattttttcatatgtttgttggccacatgtatgtattcttttaagaagtgtccgttcatgccctttgtcaattttttttaacctttattttaggttcaggggtacatgtgcagatttggtatataggtaaattgtgtgttgcaggagtttggtatacagattatttcataacccagtgataagcatagtatctgataggtaatttttcaatccttggcctcctcccaccatctaccctcaagtaagctccagtgtctgttgtttccatctttgtgtccatgtgtactcaatgttagctcccacttataagcaagagtatgtggcatttgtttttctgttcctgcattagttcgcttagaataatggcctccaactccatgcatgttactgcaaagaacattatcttgttcttttttatggctgtgtagtattctgtggtatatatgtaccatattttcttcatcagctccaccactgactggcatctaggttgattccatgtctttgctattgtgaataatgctgtgatgaatatatgtatgcatgtatttttaaggctaaacaatttatattactttaggtatataaccaggaatgggattggtatttctgtttaagttctttgagaaatcttcagaccgctttccacggtggctgaattaatttatattcccaccagcaatgtataagcattcccttttctctgcaacctcaccagcatcatttatttcttgacatttaataatagccattctgcctgatgcaagatggcatgtcatcgtgattttgatttgcatttccctaatgattagcaatgttgagcatattttcatatgcgttttggccatggttacatcttcttctgaaaagtgtctgttcatgttctttatccaccttttaacaaagttatttgctttttgcttgttaatttaatttccttataaattctggatattagatatttttcagatgcatagtttgcaaatattttctcctattcagtaggttgtttgtttactctgttaatagtttcttttgctgtgcagaagctctttcatttaattatgtcccatttatcaatttttgtttttgttgcaattgcttttggcatcttcatcatgaagactttgccatggccaatgtgcaaaatgctatttcctagattttcttctaggatttttatagttttaggttttacatttaagtctttaatccaccttgacttgatttttgtgtatggtaaaaggtaggagtccagtttcagttttctgtatgtggctagccagttatcccagcaccatttacagaagagagagagtctttccccattgcttgctactgttgactttgtcaaagaccagatagtcgtagatgcgaaactttatttctgggttctctaacctgttccattggtctgtctgtatgcttttgtactagtaccatgctgtctcagttactgtagccttatagtacagtttgaagtcaggtagtgtgatgcctccagctttgttctttttgcttaggattgctttggctattcgagctcttttttggttccaaatgaattttagaacagtcttttccaattctgtggaaaatgtcattgacagtttgacaggaatagcattcattctataaattgctttcagtattatggccattttaacaatattgattcttcctatccatgagcatggaatgttttttcatttgttcatgtggtctctgatttctttcagccatgttttgtaattctaactgtagaaaattcttatttttaaatctagtaatatttactacggtttcttgaattttctaggcatacaatattatcaacaaaaagagatcatttgatctcttttttgtaagtttatatcggttttttaaattttcttatcttactacattcagtagcccttctgaggtaatgttaaatagaatgataatgagtgtcctcctctagtaactaatttaattaaaatagttttagcattttaaaatttaaagaattttctgaatggctttatgttttctaattttaatacattctcttttacttagcaatgttattagaaacaattcatttctttcaaactcctttaggcatctattgataaaactatagttttcctttaatgtgttgttataacagattatgtttataaaatttcctaatattcaacaactgaaaatctaaaaaacccactgtgtgaaatgcatttttccacccactgctgtgccaccaccaccaactatgaatacacacatggaggccagcagtcttacacccatcagtatcccaccccagtcactgccagtgtgagtgcaagcacagacaccagcaaccctgcccctgcctgcgctctgccactggtatgagtgcacgcaggaactctgcagccccactcccgccagtaccccaccccagctgacacgcatacaccccactgtgctgccccagctgctggcatgtgtgagttagcacagatcctacagccaccaccctgacaacatgctttggctacgaccacccatcagagtgttgtggccagtggactgggaagacctcagcccctccggtacagaaggttcctaactttgaggggccagagaacaaaagccaggggcccagtaccagccccccagagttatagtatgcagaccaggagtgccgagctgaggtttggctccctggtatcttccagcaaagaaaaaaacccagtcagctgaacccacattatactacaatcaaactcccagagcatcaaaaaagataaaagcaaaaaaacaacaacaacaaaaaaaaacccatccaaaggacatcaacttcaaagactgaaggaacatcaggccacacagatgagaaagaaccagagcaagaactcaggaaactcaaaaagccagagtgtcttctcacctccaaatgtctgcactagttccctagcagtgattcttaaccaggcttaaatggttgacagaaatataattcaaaatatggttaggaacaaagatcatcgacatccaagagacagtcaaaacccaatccaaggaatctgaggaattcaataaaatgatatgagaggtaaaacacgaaatcgccattttaagaaaaaaagaaacggatctgatacagctgaaaaactcacttcaagaatgtcataatacaatagtaagtactgacagcagaataaaacaagctgatgaaagaatctcagatattgaagaccagttctccaaaattacttagacaaaaataaagaaataataaagaagaatgaataaaacctccaacaaatatgggattatgtaaagggaccaaatctatgactcattggcatccctgagaaagagagaaagcaagcaacttggaaaacatatttgaggatatcatccatgaaaattctcctaacctaactagagaggaaacattcaaattaaggaaaggcacagaacccctgtgagatactatgcaagacaatgatctccaggacatgtagtcaccaaattcctcaaggtcaaaatgaaagaaaaaatgttaaagacagctacagagaaggggcaggtcacctacaaaggaaatcctgtcagatgaacagccagcttttcagcagaaaccccacaagccagaagagacagaatacctacattcagcattctttttttttttttttttttttttttgagacggagtctctctctgtcgcccaggctggagtgcagtggcgcaatctcggctcactgcaagctccacctcccaggctcacgccattctcctgcctcagcctcccgagtagctgggactacaggcgcccgccaccacgcccggctaattttttgtatttttagtagagacggggtttcaccgtgttagccaggatggtctcgatctcctgacctcgtgatccgcctgcctcggcctcccaaagtgctgggattacaggtgtgatcagcattcttatggaaaagaaattccaaccaagaattttacatggagccaaactaagcttcataagtgaaggggaaataaactctttttcaaataagcaaatgctaaggtgatttcttaccaccagacctgccttacaaaaggtccttaagggagtgctaaatattggaacaaaagaccattactggccaccacaaaaacacacttaagtacagaaaccattgtgttagtcagggttctctagagggacagaactaataggatagatgtgcatataaaagggagtttactaaggggagtttattaaccaggcccttgtcttctcttcctctatcgattgattatagtgaactccccaagaagctatcagtgcaggctggggaagagaaggggagagaaggaagggtggcaggagtggagaccatgggcatttgagccacttcctcctgtaacttacttgtgcccagatgcatatataccacttccatctgataacggaatgatgctgtgcacaccccacctatggctagatgggtcagaaaacacccagttcttgataggcagttcaggtcgcatggtgacttgatgacccataatctaacattcagtttctaccaaagcccagtaacaggccaagaactgtttctcaaaaggagagtagttatctgcagaagatggcagggccttactccaaatcctagaggctgccactgtgtttcacctacaggggcctgccaaaggctccaaacggcatccctatctgccaccgacacctcaagcaccattggatctgatgggtcatatggcccaagtgtaagaacagcttgcacagcagcctggacctgttgcagaaccttctcttgttctggaccccactgaaaaatggcagcctgtcaggtcactggataaatcggccagagtaacacacttaaatgagggatgtgttgccttcaaaatccaaataggcccactaggagttgtgcctttttcttggttgtcggaggggccaaatgcagcaacttatcttttaccttagaaggaatatctcgacaggccccacatcactgaaccattagaaattttgctgaggtagaaagtccctaaattttagttggatttattttccatcctctggcatgcaaatgtctcaccaataagtccagtgtgttcactacttctcactcactggatccaatcagtataatgtcatcaatgtaatagaccagtgttatatcttatggaagggaaaagtgatcaaggtctctccaaataagacaatgacacaaagtcagagagctaatacaccctgatgtaggacagtaaaggtatactgctagccttgccagctgaagggaaattgcttctggttggccttatggacaggaatggagaaaaagttatttgccaagtacctggtacataccaggtaccaggagatgtgttaatttgctcaagcaatgaaaccacatctggtacagcagctgcacttgtagtcacctcttagttaagcttacgataatccactatcattgtccaagatccatctgtcttctgtacagtccaaacgggagagttgaaaggggatgtggtggcgatcaccatccctgcatctttcaagtacttgatggtggcactaatctctgcaatccctccagggatgagatattgtttttgatttactatttttctaggtagaggcagctctaatgacttccatttgaccttttccaccataatagccctcaccctatcagtcagggagccaatgtgtgggttctgccagctgctaagtatgtctatgccaattatgcattctggcaccggggaagtgaccacaggatgagtcccgggacacactggacccactttaagtcagacctgggctaaaacttcattaattacctgacctccataagcccctactttaactggagaacgacaatgacattttgtgtcccctggagtcaatgtcagctcagagccagtgtccagtagtccctgaaatgtctgatcatttccatttccccaatccacagttgccctggtagaagctagaggtgtccttgggaaatgattggagaaagaattaacagcataaattgtcagtagtgtagtggggtccttacacaaaaagacccgacctctccttcattcaaggggttataggtctgtaaactggttcaagtactgaaattgattgacgggccatgattccctgtatttgtaattcagattagtcttttgtttactcgatctgaaagttctctgcttatataaattaagtaagaatgcagtaggcttcgtatcaatttaacttctaggaacaccatgattaattagccaatgtcagagctcaacataagtcacactattctgattgcgactttgcatctgctgtccattctggtagctacacccaccttgcctttgatggttgagtgctgccacctggcccctgccacctcgggatctaatttttcccattgcatttaaattttgcagttgaatggctgcagtttccactgttagatctggcatatagagaagagcaatcacagagctcttcaaagatggcaggtccaccctcacaaatctatttcacaaagtattggtcaaggatatatcttctggaccctcccagctgggatgagtaagtctaaagtgactaatccactccagcatcccaatctccctaagcctttggatccctttctttacattaaaccaaggaagatcaggcatttccagctcgctcacagtgggccatcttttaatccacatttcagctaaccaagcaaataaactattagaacctcttttaactccccaagctacaacattaaatgcagagtccctgtttagtgggcccaaatcaataaattcagcctgatccaactatgttttttccacaattatcccacacccttaatgtccattcccatgactgttgttcagatttctgtttatataaattagaaaactcaagcagttattttcaggtgtagcacaccccctcatgggtcacactctcatcctcacctctaagggcctactgggactttagactagttataggtctagaagcaaacaggagtgttgggggtggctcctaaggagaatcaacattatcttgcctggaaactgcctcaggggaggccatcactgttgcctcaggcaatgtagggtttatctcctcagacaaaggtggaaaggctgagagcagcatgggttggggaggggatgttgccactattggagttgaggaaggtatttcttcaggcaaaaaaaggtttatcagagtttacacgctcaatgtccccagcttcatcagggtcctctcacacatccccatttcaagttgcagggtaccattcttttccaatcaaggccctcactttaacagtagacacctggtgaggttgtacatgcacctttcactgcaggtcagccatatacacgataagagcttgtgtctgtttttccacaatttcagctctttctcgacaggagataagactctcactcagggctatcttagcagatttgaggctcagtatctgcttctgaagccaggagacagaatccctgagttcattatatattttcatcattttgtccaccaaacttaggagcaaccaacaagcttcattattttccttggttccccacatatgatcaaaggtattaagtatacagttgctaagttccttgcctctaatcaccaatgcatcaggaatgtcaaatgcatttattttgcataactttctatacagttcatgccaaggattataagtgttctccacactattagaagtagagtccttaacatttttgggtctaatcatattaagcagccaagtccagaaaccctaaaaccaatgaaagaactccaaccttaatattttgttcctctagaaccactcctggtaccaaaatctgtattagtcaggttctctagagggacagaatggaatagatatatctatatatctatatctatagatatacatagagatagagatagagatatataaaggggatttactaagtattaactcacaatcataaggtcccacaatacgccatctgcaggctgaggagcaaggagagccagtccgagttccaaaactgaagaacttggagtccaatgttggagggcaggaagcatccagcacaggagaaagatgcaggctgggaggctaggccagtttctcttttcacatttttctgcctacatatattctagtcacactggcaggtgattagattgtgcccatccagattggggttgggcctgcctttctcagtccactgactgaaatgttaatctcctttggcaacaccctcacagacacacccagaaataatactttgtatccttcaatccaatcaagttgacactcaatattaaccattacaatcattgacactataaagcagccacaccatcaagtctgcgtaataactagctaacaacattatgacagcaacaaattcacacataccaacaccaaccttgaatgtaaatgggctaaatgcctcaattaaaaggcataaagtggcaagatgaataaagaagcagacccaactgtatgctgtcttccagagactatttcttatataatgacacctgtaggctcaaagtaaagagatggagaaaaatataccaagcaaacagtaaaaaaaaaagcaggggttgctattctaatttcagacaaaacagtctttaaaccaacaacattcgaaagagacaaaggaaagaattacataagggtaaaggattgaagtcaacaagaagagctaactgtcctaaatatacatgcattcaacacaggagcacacagattataaagcaagttcttagagaccttcaaagagacttagactcccacacaataatagtggtagacttctataccctaccgacagtattagccagaccattaaggtagaaaactaacaaagatattaattataagtgttgggacctgaactcaacacttgaccaaatgggcctaatagaactcttccaccctaaaacaacagaatatacattcttctcatttgcacatggcacatactctaaaataaaccacacaatcagaaaacaactctcagcaaattcaaaaaatggaaaataaaattacatcaaacacactctcagaccacagtccaatgaaaatggaaatcaatactaagaaaatcatataaaaccatgcaattacatggaaattaaacaatctgcttctgaatgacttttgggtaagcaatgaaattaaggcagaaatcaagaaattctttgaaactaatgagaacaaacatacaatatagcagaatctctgggacacagctaaagcagtgttaagagggaggttgacaatgctaaccacccacatcaagaaattagaaagatctcaaattaacaacctaacattacatctagagaagctagagaaacaagaccgaaccaaactagcagaagacaaaaaataatatgttttttaaatacattgcagatattattaggtaaaatgtattcagaattattctctatattcctttgttagagtgatatattattttatttgttgggcacctttggcagcttttttacaagttattttgggctgggcacagtggcttatgcctgtaatcccagcactttaggaggccaaggagggtggatcacttgagggcagaagtttgagaccagcctggcaaacatggtgaaaccctaactctactaaaattacaaaaattagccaggagtggtggcaggttcctgtaatcccagctacttgggaggctgaagcaggagaattgtttcaacctgggaggtggaggttgcagtgagctgagatcgtgccactgcactccagcctggattgacagagcaagactccatctcaaaaaaaaaaaaagaataataataattaaggttattttggcttgataaaatccatgtaatgaatgaaaaatctggtggtccaagatggccaattagaagcagctgcagtctgcacctctcacagagaagaatgaaagtatcgagtaaattctgtaccttcaattgaggtatccaggtatccaggttgtcacattgtgactgactaggcaattggtgcaacccacaaagagtgaggaaaagcagggtcaggcgacagtccacccaggagcagcacagagccagggatcccccacccctagccaagggatacaatgagtgattgtgcaaccctgccaaggaaagtgtacttttcccatggatctatgcaacctgcgtatcaggagatcccctcgtgggcccatgctaccagggttttgggtctgaagcactgagctgtgcggactcccagcagctgctcaggcatgcatggagacacaggagtttttgcatactccagccccgggaattccagtaaggcaggagatctgttcattcccctaggaaagtggctgaagccagggagccaagtggcatcattcactgggccccactcccacagcacctcacaagttaagacccactggcttggaattctagccagccagcagcagcagcaggctggagattgcccaagatgaccatgtgttttacacagagtttatagtttcccttttaaatttgttttgattgaagagttacccagaagtatgcttattaatttccaaggagattaaactttttagcaaactttgtataaagttctttattttattgaatttgttatttaattttattgaatttgattaaaaaaaaacacaaactacaaaatttctaccttaaaattgtagaggttttcctgaaaccaagcaccatacaagcacaaaacgtattttgtaaatgttcaatgaacatatacaagaaagattcttcgttgaaaggatgtaagttttaatgtacatttattaaagtttattgattgtatgattcttttctgtataacttttttttgcttgtttttaactagacctgtgtaattctgaaagagaaataatttgtctctcatgatagttttattttcccaaattttttcctcatgtagttagctgctgtatcatttaatacagatttataaatgtaatatactcttcataaactgttcctttcattattatataacatgcctcttcagtgcatttaaccttacatttaaccttgtctgttattaatattgccatttgttatgtaaaattaattgcaatcctgccagaacatagatgttctgggtcttattaagaataaccaaagatttccctcctttagggaaagagattatatgagctactctctatgttaaatctactctctatgttaaatctttctactgtttaacacttacgtcacaaagctatatatgttctaagaacagggtccacacagtccactgttcatacaaacagtatccagattgtgtcaggtgttaaggttggctttgacttttcaacaggaacaggcctcttgtttcataggtcatgctgacccacttagcctacaatcctacaataaagatcttctatccttggtcttatctttatgcgactgaacaacaaaacagctgcaaggttctaccacatgctcctttctttttatttgaatatgtctcttatctcttcactcaattctcaatttaagctgttaacactgcttaagcggggtttattttcttgtacatagcaaatagctatgatttgtttgtaccctagtctacaatctgtcaactatgtccctaaccactcttttcccccatcagtatgccctacttcacctctacttcttccttaaccccaataagttgaagcccatagactaccttcacttctcctttctcctccccaacttcattctctgcaccagttataaccttgggaagcttctactttccattgttaccacaatcaccagctcctaagttttctgaatttgggtagtacattttagaaatgtcttatccttcccgtttcaggagacttgcttatagatcacattttgagatactatgttgttattcagatagatgtatagatgaaaacaggaaggagggagggaggaaaggaggaagggagggaggaaggaaggaaggagggagggacgcagggagggaagtggggaaaggagggaaggaaggagggaaggacaagtattgctgctcaccactgtggccttgttgccttgcctctttattttctccatcctaaggtttctgctctggttcatttattgctcagttagagtattttctcaagaaattttttaaaagggaccatgccaggagttcaatgtcacagggagctatgatcgcaccactgactccagcctgggtgtctgagcaactctctaaaacataacaacaaaacaaaataaaataaaaggggtacatggctgatatactctgaatttttatttatcctcacatatctctctgtcactctgacaggtcaattatcttatttgagaagactctgggttccaattctttaattgatgctatttcactatcagccagctttcagtaaattaattaaaaaataacagaggattccattgcccaaagctttgttcatatttccctttgttggttgtttgttatttctacctagaagcctataatattatcttcattattaaagttccaggattcactcaggacatacctggtgtgtatctcgtctcatcagtaaagcccgcaacttggaaagctcttacactctagtctcaaaactgtatttaccttagataaattgttttttagtatttgtttaatgattgcctatcttccatctgctcttttttttccttaagaatctccaattatttttatggtagggatcctcaaatcttgcattcaagttgcctacaattttcatttgtgctttgacgttttccctgcacctggtcatccagtttaccaattcagatgtcaataatcaccatccttatcttaaatgtatctactgagttatttgagaaatcatggcattaaagtcaaagaagtcttttaaccactgccttaagtgtggttactttttttcaattcagccattcttctgctcttctaacaattctcttctactgggtttgtgctctaatttttgtctgatattttcatctctcatctatggtaccctcacatttgtggttatttatctctgatagttatggggacctcaggtgtactgtggagaattctgaatggctggactcccatggatgctggaaggagaagcagcagctgccctcaccaccccagacctgagtgtggaaacctcaggctcacatccccctcccccagctctccatatagaaaaaaagtaaccaaatttaggtcactatgtccccaaaaatgatactgttcatccttttccccaatatttgtctttaattagtgaataaatgaactatctgagcttcatcgttggaaacaagatatactgagtgtgatggttaatatggcgtgtcaacttgattggaccttattattgtctttatttgaagataatgcatgatctcagcacatgtgtataggctcaagttgacaaggggtggacttgcgatggttaatactgagtgtcaacttgtttggattgaaggatacaaaggattgatcctggatgtatctctgagagtgttgctaaaggagattaaaatttgagtcactgggctgggaaaggtagacccacccttaatctgggtgggcacaatctactcagctcccagcgtgcctagaaaagaagcaggcagaaaaataaaaggagagactggcctagcctcccagcctacatctttctcccctgctggatgcttcctgtcctggaacactggactccacgttcttcagttttggaactcagacttggctctccttgcccctcagcctacagacagcctatgaagggaccttgtgattgtgtgagttaaacttaataaactcccctttatatatacaaaatatatatatataacatatataatacatatataaatatatgtatatatagaacaaaatgaacctagttggttgctcctaagttcactgaacaaagaaattttaaaaaattatgaactcaaggattctatctcctggcttcagaagcagatactgagcctcaaatctgctaagattgccctgagtgacagtcttatctactgtcgagaaagagctgaaactgaaaaaacagacacaagaattgcttgagttttctaatttatataaacagaaatctggagaacagccatgggaatggatattaaaagtgtgggatagtggtggaaggaacatggagttggatcaggctgaatttattgatttgggcccaccaagtagggactctgcatttaatgttgcagctcagggagttaaaaaaggttctaatagtttatttgcttgattagctgaaatatggattaaaagatggcccactgtgaatgagctggaaatgcctgatcttccttggtttaatgtagaaaaagggatccaaaggcttagggaaattggcatggtggaatgaattagacactttagacctattcgtcccagctgggagggtgcagaagatatacccttgaccaatgtcttgcgaaacagattcgtgaaggcagcacctgcatctttgaagagtcttgtaattgctcttgtctgcatgtcagatctaacagtgagaactgcagacactcgactacaaaattaaaatacaatgggagtaactggatcacaagatggcaggggccaagtggtggcactcaactatcaaaggcaaggtgggcatacctgctgtaataaacagcagaggcaaagcagcaatcagaatagtctgactcatgtagagctctggcattggctaattaatcatggtgctcctagaagtgaaattgataggaagcctactgcattcttaatttatataagcagaaaacttctaggtcaaatggacaaaagactaatttgaattacaaatacagagaatcacggcccctcaatcaatttccagacttgagccagtttacggtttacttccccttgaggaaggaccccaccatattaccaacactttatgcagtgattctcccatccttccccaaggagacgtcatggtcatggaaatcactggtcttaccatgttccccatcatcctgaagcagctgtattgatagaatggtggattagcctttcaaagtcacaattccaatgccaactaggtgacaatactttgcagggctggggcaaagttctccagaaggccatgtatgctgtgaatcagtgtccaatatacggtactgtttctctcacagccaggattcacaggtccaggaatcaaggggtggaagtggaagtggcaccactcaccatcacctttagtaatcagctaccaaattttttgcttcctgttcccgccacattacgttgtgctggcctagaggtcttaattgcagagggaggaatgctgccaccaggagacacaacaattccattaaactggaagttaagattgccacctggacactttgggctcctcctacctttaagtcaacacactaagaagggagttacagtgttggttggggttactgacctggactttcaagatgaaatcagtctactacttcacaaaggaggtaaggaagagtttgcatagaatacaggagattaattagggtgtctcttagtattaccatgccctgtgattaaggtcagtaggaaactacaagagcccaatccaggcaggactacaaatgacccagacccttcaggaataaaggtttgggtcactccactaggaaaaaaaccacgacctgctgagatgcttgctgaaggcaaaaggaatacagaatgagtagtagaagaaagtagtcgccgggcgcggtgggtcatgcctgtaatcccagcactttgggaggccgaggcgggtggatcatgaggtcaggagatcaagaccatcctggctaacaaggtgaaaccccgtctctactaaaaatacaaaaaattagcctggcgcggtggcgggcgcctgtagtcccagctactcgggaggctgaggcaggagaatggcgtgaacccgggaagcggagcttgcagtgagctgagattgcgccactgcagtccgcagtccggcctgggcgacagagcgagactccgtctcaaaaaaaaaaaaagaaagtagtcatcagtaccagctacgaccatgtgaccaactgcagaaagaaggactgtaattgtcatgagtatttcctccttttgttaaaaacatgtttttgcatgcatacacttgtactaagaaaatatcttcattttatttcctttctcctttatcatgtgacataagatttattgacttcacatcagcatttaagtactgttaactttatgtatttgggtcggggattggtgcgtttctggttgtacgaaggatagttgaattatgttacgtgtcattatgaccttattattgcctttatttgaagattatgtgtgatctcagcagatgtgtataggctcaagttgacaaggggtggatttgcgatggttaatactgagtgtcaacttgtttggattgaaggatacaaaggattgatcctgggtgtgtctctgagggtgttgccaaaggagattaacatttgagtcagtgggctgggaaaggcagatccacctttaatctgggtgagcacaatccaatcagctgccagcatggctagaatataagcaggcagaaaaatgtaaaaagagagactggcctagccttccagcctatatctttctcccatgctggatgcttcctgcccgtgaacgcgggactcctagttcctcagttttggaacttggactggctctccttgctcctcagcctgcagacggcttattgtaggaccttgtgattgtgtgagttaatacttaataaactcccttttatatatatatatatatatatatatatatatatatatatatatatatatatatatatatacttcattagttctgtccctctagagaacgctaataaaccaaggttccgttttactgtattctactacaaggctttgagaaaatggtaagtggtgttaacttacaggagatcacagacactggtgaaaacctaaacaaagctagacatactttctctagaaggaaaaagcccttacgtatacacagagggtggccaggtttctggaagtccataaacttcagattaagagaccaccaaggagagactgtctgtcatttctctgtttttcagagtaagattatcaggaccgtagaaactgttcttattccttggcctcactgaacacttgctgctctggcaccagaaacagtcttttctataatttatttattttttgagacagagtcttgctctgtcgcccaggccggagtgcagtggcacgatcttggctcactgcaacctccacctcccagattcaagcaattctcctgcctcagcctcccaagtagctgggactacaggtgtgtaccaccacgcctggctaattttttgtatttttttagtagaggcagggtttcaccatgttggccagggtattctagagcttctgacctgaagtgatccacccaccttggcctcccaaagtgctggggttacaggcatgagccactgtgcctggcccccagaaacagtcttaatgttccttttgaacagaatcctccccttggctggatgaaaggattataagttatagcaacataagagctggcattcccaacctagaactttaaccacccacctccttttgcataaatctagagatgagagagagagagctataaaaccaaaggccttctaaagcaaaagacacctttggtaaatagctaaaaagatttctacagcttcaaatattagacactttaaaaagtgtattaatttgacccctatgggtcttacattagcatttaagatgtatgtccaaaagagcattgcaccagcttaatctttcctgaaaacttgttgtcccatgaagactgtcctttgatgagctcattcaatcacatgacttcaaacgctcctcatatgataatagctcctatttcaataactctagttcatttcctctctcctcaacccggacccatatgcataaacatttggacacgtccacttaaaaagtttcacttcaatcctaacttgcccccatgttgtccttatcatcttccccctattccattttactctccctccacaaagcttgctccttctggttttccattcctgggaatggcactattattctctcagctgcccaagttaaaaacccacaagtcacctcgactcctacctctctctgaaagacagacagacagatagatagatagatagatagatagatagatagatagatagatagatggatgataggtagatatagatgatagatagatatagatagatgatatagatagatagacagacagacagacagaatctatagatacaggtattcaatcagttaccaagcgtcgtcccttccttaccctatgcagatatgttcccccttcccattcccacagccttaacctcagttcaggccactaccatctcttcatttaaccacagcagtctcaagagggtcctccatctcctgattaacctgcctctagtccattccccacagccagagtgatcttttagtttttcttttgttttgtttttgtttttgttttcaagatggaattttgctctcttgcccaggctggagtgcagtggcacaatctccactcactgcaacctccgcctcctgggttcaagtgattctcctccctcagcctcccgagtagctgagattacaggtgcacaccagaatgcctggctaatttttgtatttttagtagagatgtggattcaccctattggccaggctgggtctcggactcctggcctcaagtgatctgctcaccttggcctcccagcatgctgggattacaggcgtgagccaccacgcccagcctagaatgatcttttgaaagcacgtttgattttgttgactcctcgcttctagaagcacatcttcagaataaagactacatcctttcccataatttgtgagcactgaatgctgtttcctgctctatcctagactcctctttgactagtcctccacctgaaccctggacctagccagactgagctacttgcaactccctgaatatgctggactctgactctgaagtctctaggcctttccatgcactcttccctctgctgaatgccctctcacctcttttgcacttgcctgaatcccattctcctttctagactcaatttagccattatcaattctaggatgtattatatacttcacagtctccaaaactctctgtgcgttcctctatcatcaaactgtagccacatatccccactgtttcaggcttccaaaattctaaagttgcccttttcttttcttttttgaaacacggtctcactctgtcacccgggctagacagcagtgacacaatcaaagttcactgtccttttattggccaataagaatagtataagttttggcaggcacagtgactcatgcctgtacttccagcactttgggaggctaaggcaggggtggatcacttgagtccaggaattggagaccagcctgggcaacatggtatggcaaaagcctgtctctacagaaaaaacaaaaacaaacaaaaaaaaaaacacacacacacaaaattagccaggcatagtggcccgtacctgtaatcccagctactagggaaactgaggtgagaggatcacttgagcttgagaggtcaagtctgcagacagccgagatcacaatactgcactccagcctgggcaacagagcgatcctagctactcgggaggctgagtcaggagaattgcttaaacccaggaggcagaggctgcagtgagccaagatcatgtcactgcactccagccttggtaacagagtgagactccatctcaaaaaataaataaagagcacacattcttctctacagtctaataagcattagtttcacatggtgaaactcccctctctactcaaaatacacgaattagccagttgtgatggtgcacatctgtggtcccagctactccagaggcttgtgtgatggcacatgcctataatccagctacttgggaggctgaggcatgagaattgcttgaaacccggaggcagaggttgcagtgagccaaaattgcgctactgcactccagcctgggtgacaaaacaagatgctgtctcaaaaaacaaaaaaaggaaagaaagaaaattgacacgattgagtagaaaatgtttgcaaaatgtagagattagtagccagaatatatgaataattagttcttacagatcaacaagtaaaaagacaacagaaatctgatacaaaatgcttaaatgacaataaagcaaaaatacctaatggctaataaacatatgaaaatttcaaccatattattcattaggaaaatataaatcaatactatattagacctactagattggcaaaatctaagaagtctaacagtcccaaatattggtgaagatatggcgctacagaaactcatatacactactggcaagtaaactggcatctttctggaaaacaatttggcattatcaggtaaaatgaaacataattgtaccgtatgatttagaaattccacttctaggtattgactagagtaccaacagacatgtacagagatgtttatagcaacattattcataatagtgaaaactggaaacaacctaaaattcaatgaccaaagtatgaataaatgaatagtggaatatattggtgaaaatgagtgaataactcttcaacatggagaagttgcacaaaaatattaagcagaaaactcaatttgagacatttataaaaatctttttataatctataaaaaaatcccaatgtgccatcaccaagggcaagtgaaaaattgttgactccagtgaggcagaactaaaggaagttctaacaagggaaaattgcagcacactgcactgtcgagaaatgtaaaggatctgagattttactccacttgcaacccaaattagtctgccacagtttcactgttggcagaaaaaaacaaggcttttgggtcagagacaaggaactttattactcatagtattcatacaacaattagcatgagcaacagcatgtttcatcagtttccccttgcctcaagtcttatgggggtaacatggatgggcccagatggatctgacctccttggcctcccacagtgcagggattacatcacgtccagcctcaattttctttataatgccttttgacgaacaaaaccctttactgcaactggatttatcagtcttttagggtctgtgattcttttttattttatagatactctttcccattccattgtcataaaaatattctcctatattttttccaaatttaaaattcaacctttttatttacaacttaatcaattttagtggacttttgtatatggtgtgaggtaagaatctaatttcattgtttccctttgtgtataatcacttatacagtactattccatttgttctgcagttccatttcatcatatacacatttctatatatgtacatgtttctttatggactttccattctgtttcagtttatttatctttgggtcaatataaaactatcttaattactgttgtttaataataagtatttggcatctgagtagctcaagctctctcatgctcctcctattatctaggagtgtctaggctgttcttggtcatttgttccggttttatgaaaaacacttttgagattttgactggaattttactgtaagtataggaacaattggtatctttataacagtgaatcttcctagtcatagacataaaataactttccatttacttaggtatttaaaatatcttttaggctgtgcatggtggctcatgcctgtaatctcaccactttgggaggccgaggtggaaggatcgcttgagctcaggcgttcaagaccagcctgggcaacatggtgagacccccgtctctactaaaaatacaaaaaattagctggttgtggtggtgcacacctgtggtcccagaaactcaagaggctgaggtgagaggattgcctaagcttgtggggtggaggttgccgtgagccaagttcacgccactgcactccagcctgggtgacagagcaagaccttgtctcaaaaaacaaaaaagtattttaatcaaattgcatgttagtcctgtacacgttatatttattccatgatgccttatttatcatttttagtcgtattattaaaatacattttcctgctttgggggactaacgcatagaaatacaaatgatttctgaatattgttattacaggcaaccactttcctaagccctcttattataataagtcagtggttttttaaatattttcttggtaaataatatcatctgttagtgatgacaattttgttcgtattttcctatccttttccctttcatttttttttttctttattttgctggctaggacttccagtgaaaatgttgaataggagtggtaataggtggcaattttctcgtttctgattcttatagggaatgcttccagtatttctactttcagaatatttgccacagttttttgtatacagaccatgttgggttaagaaagttccttctcttcctagtttgccaagtgtattgaatttcaacaaacgtatatccacatctgttgaggtgataatgtgttatttttcttccctttaacctattagaatgataaatggaatttatagatttttctattaaaccgtggttacattcctgggataaactcaacttggtcacagtgtatcatctgttttatatatactgctagatttagtttgttgaagttttcttcttttttcctctatgtgaatgtggttggcctgtcactttcctttcttatataacccttatctggttttgttatcaaggtttttgtctaacacaattatttaggggaaagaattataagaaccacttcttcttcttgggcatacagttcaactatattggaaccacctgaatgagccctggccactggaatttgaagtcacttatgctacttccaggactggctcgaaaatctctcatgcataatcttcctcttttttccatatccacgctgacttagaggttacaggctgactgtgatggtggcacaaaacagagggatcctcagtctccgaatgactaaatggaatagaacactttctatgctctggacaaagcacattagattataaaatgcataagcaataaatttttagtgtgtcactaataaagaacttggtacatcagttgaacctctgcacatgagaataacatagactgtaagatcgtggcccagttcacatgaatttaaaataataaaatgtatacccaagaaactctctggccaacttcagaactggaacactgccagtccctttatgctgtttatctgggtgcctggttctcctctagcctttctcccagtcatccttacctcctctcatccaaccggttagcactagcctgaattttttgtttatcattatgttgttgcctttttgtttgctttgttttggttttctcttatactaaaagacttttcaaatatattttagaacagttttagctttacaggaaaactgataaggaagtacagagagttttgttgtacacacaggttaaaaaacaaaaaaaagtatggactttacacaaacctcctctccctgactgcacaaacacaagcacagttccccccaattatttgcatcttgcattagtgtggtatatctgttacaactgatgaaccaatattgatacactattactaactaaagttcacagtttatatgagggttcaccctctgttcagttaattttcaaaatgtcatttcttttttttttgagacggagtcttgctcttgttgcccaggctggaggtgcaatggcatgatctcagctcactgccatatccgcctctgaagctcaaacaatgctcctgcctcaacctcccgagtagatgggattacaggtgcataccaccacactcgctaatttttttattttcagtaaagatggggtttcatcctgttggccatgctggtcccaaactcctgacctcaggtgatctgcctgcctcagcctcccaaagtggtgggattacatcgcacccagcctaaaatgtcattatttcttccttgacatatgaattgtttagaagcatgttttaaattttgtaaatgtatggggactttaaaattttatttttgttattaatttataacctacacactttatagtcagagaagattagctatatcatattgattctttgaattttacagggacttacttttggtctaatacgtaattatgtttgtaaacatcccatgggtgcttgagaaagaatatgcattccctgattgttagtttcagagttctatattagtctattatatcaaattcactgctattgttcaaatctcctctttgcctttttggtctccttgatgtagtactaattgagacagacaatttgaaatcctcctgtatgatcaatttgcaaatttatacttgtatttttctttattttacatagtatgaagcaattttcctggacacaattttagtaaagtgtaaacctttatcattctttagtgtctgtattagtctgttctcgcattgctataaagaattacctgagactgggtaaagaaaagaagtttaattggctcacggttccacaggccgtacaggaagcatggctggggaggcctcaggaagcttaaaatcagggcacaaggtgaagaggaaggaggcacgtccacatggttggagcaggaggaagagagcgaagagggagtgctacacacttttaaacaaccagatctcgctaagaactcactatcacgacaacagcaaggagcaagtctgcccccatgatccaatcacctctcaccatgcacctcctccaatactaggggattaaaattcaacatgagatttgagtggggacacaaatccaaaccatatcagtgtccatgtctattcctaattagcttttaactttgtactcagcgtattaatttctgagagctactgtaacagtgtcaccaactgggtaactgtttgttgtaaaacaaacacatcctctcacagttttacaactgtttgttgtaaaaccaatgcattctctcacagttcttgaggctaggtgtctgaaataaaggtgtgggctggaccatgctccctctgaagccttgaaggaagaatccttgcctgcctcttccagcctctggcagttgctagcaacccctggcattcctttactcattgactcatcactccaacctctgcctctgtcttcatatggccctacgtctctgtttctgtgttcagattttcctgttcttacaaggacacaagagatattggatttagggcccatcctaatcaagtacaaccttgtcttaacttgattacatctgcaaagtccctaattccaaataggagcatattcacaggtttcagttggacacgaattttgttggggggacactactcaatctagtacaatcagctattaatgtagctgatgcaggattttttgctccttagttcagttaaatttgggttatcacatgaccagaaaaaattaggcacgcgtacacactgaaaggcgaggagggcagaatttattaggcaaaaggaaagctctccacaaaaagaggggtccttcatgcaggttttacacctcacaaattgaatgccaggccaccacacacgagctgaagaggcacggcttctcccctgcataaggagcaaactccttgtggctccaccccatgtgtgggcggttagtttgagccacattgatttatttcccttactgcacatgtgttgagaaatggaatctttcacagtgggcatgttcattcaggcaagccacgtgtgcacaatgacctaggcaagtcagaggctgtccaggaacccttctctatttgcctaggcttgtgcctgtcacctttctctttcatagctatctgttttatagattggtttaatatatcttttaccagtactacaagaaagtggcttacatgattatggaggctaagaggtcccatgatctgtcatctataagctggagacccaggaaggcctgtggtataattcagtctgaatccaaaggcttgagaaccagggaagccagtgatgtaaatccatctgaggacagaagatgagatgtcacagctcaaacaatgaggcaggaaaaaaaaggggggggaattcttccttcctctgccttttattttatttacgccctcaacaaactggatgatgtccacccaccttggggatggctatctcctttactgagtcccccagttcaaatgcaaatcttgtctgtaaacacactcaagacacttcagaataatgtttaaacagatatttggcaccctgtggcctattcaagttgacatataaaattaaccatcacaagtttacccttgtcaacttggcacccataaacatctctttaaaccatacttaactgccacataaagacaacaacaaggtcataattccatctaacacgattaacaatccagcattccaccagaaacactttaacccgtttcccagaagaggtggtaaagtcttcatgtgatgtttactctctccttgatatcccataacttaaatactatgatgtaaaattaatcaaggttgaacactggagccagttaaaaaaattaacaatatttaaacactatgctataaaatcaatgcatcttatgttacagaataaggaaatgagaagaaaacaaagctacacacacacaaaatgtagttatagcaaaatatggaggacatacttatgacaatcacagtctgtgtttctgtaactggtcatatgatcaaagctagtatttattccaccatttattctgtattccctttgccttcagcaagcacttcatctggtcatggtacttacctggtggtgacccaaaccttcattcctgaaaggtctggatcattagtggtcctgtctgaattaggctgtagttttccattgaccttaatcacagggcatgataacactaagagatgccctaaggaatcctgtgtattcccaacatactttaccttaccaccattcggggtagtccagtttctacttggtagtcaggaacaatcacccagccagcactgtaactcatttgtctattgagttagaggcataagaagccccaaatggctgaggagcagtcttaaacttccagttcaattaaatcatgattgcgtctctcagtggaaaatattccaccctatgtaagacctctaggccagcagtgcataagtcatgggaacaggaagcaaaaattttgctagtgggtcaccagggctaatagcgaatggtgtccttcctattctgaccccttgattcctggacctgtgaatcccagtcataagagaaatgcaccatatactggatgttgattcagagcatagacagtcttctagagaaccttgtcccagccctacaaggcactgctatatagctggtgttattactgtcttcaaaatgccattccactgctctatgtagccagttgattcaagatagtagggaacatggtaagaaaattccatgatcatgggcccactgccacacttttgctgtgaactgagtttcttgtaatgctgtgtggaataccatggtcatagatgagacattctgtaagtccacggatggtagttttagcagacaccctgcgcgaagggaaagtgaatctgtatccagagtaagatctatttcagtaaggataaaacactatcccttcaatgatagaggtggatcaatgtaatgaacctgccactaggcaactgactgatgaccctggggaatggtgtcatatcaggggctcagtgttggtctctgttgctggcagactgggcactcagagatagccttggccaggtcagccttggtgagtagaagtccacgttgctgagcccatgcataacctctattcttgtcaccatggctactttgctcatgaaacaattgggtgatgacaggtgtggctggagaaagaggcctactagtatccacagaacaggttatcttgtccactttattaaaatccttttttgctaaccctttggtgagcattcacatggggcacaaatatcttcaccctttttgcccattcagtgtctatccacatacttcatctccaaatttctttgtcaccaattttccagttatattgaactccctgaccatccagccaaaccactggccacggcctatgaattggcatataattgaatatctggctatttttccttctaagcaaagtcaacagggggactgctcaaagttgtgtccaccaggaggatttcccttcaccactgtccttcaaggtagcccagaggtgagatgtagtgctgcagctatccactttagggtggtacctgcatatcatacagaacactctgtaaaccaggcctaagtcttctctttctctgtcagctgatcacagggaagtccccatgaagccaccgatgcaggctggaagagagaaggcaggtagcagaagtggggactacggaaatttggcctacttcttcatgtaacttccttgtgccttcagggcctctcaggcccaatcatgtgtataccacttccatctgatgacagagtgttgctgtgcatatccaactttgtgcgttggtggctcagataacatccagttcatgatgggaagctcaggttgcacggtaacttggtgactcattaagtatcagtctctactaaggcccagtagcaggccaagagctgtttctcaaaaagagactagttatttgttggtaatggcacggctttgctctaaaatcctaaaccaagattcacctatagggacctgccagaagcttcaaacagcatccctatctgccactgccactgaaacaccactggatctgctggatcatatgacccaagtggcagagcagcttgcacagcagcctggacctgttgcagactcttttcttgttctgggccctactcaaaactagcagctttttgagtcaattggtaaacaggctggtataacataatgaaattggaaaatgttgcctccaaaacccaaagaggcccactaagtattgtgcctctttcttggttttaagagcagcaagatgcaagtacttatccttcaccgtagaagaaatatcctaacatgccccatgtcactggatccctaccaatttcactaaggtagaaggcccttgaattgtagtcatatttatttcctaccctctgatgcaaatgtctttccactaagtctaatgtagttcctacttcttgctcactaggtcaaatcagcataatgtcatcgatataaccaatcagtgtaatattttgtggaagggaaaggtaatcaagatccccatgaactgaattatgacatagagttggagagctgatacacaccggagatacgacaatgaaggtgtgttgctggccctgccatctgaaagcaaactgcctttatggactggtatgaaaaaaaagacatttgccagatcaattccattgccttaccacataatgctgaaataaatatttcatacataatttttatatttaaaatgcaaactataaatataatacacatatttacttgtacttgtgcaaataattctataggcctgactgaaagggaatgttccacctttctacctttttttaatgacaaatttctgataaaattccttgttacctaatgaatgacttcagtttcaaaatatgctaaatgcattcagtttccagtagttctgggcacacactgtatgctaagacttggtgaacttgaggactgaaagagtttcttggcctgcttgtctggaaagtgcagtggttccttgcagaccttttgtcttcattattttcaaaatttcttctaaaataaaaatcaaaaggtaaaatccattaagccatttggtagtgtgcatgatcaataagcaatttaataagttaaacacagatgatttataaattgtattcatctgacaaaacaatgtatatcaaataaatgtctactaaagtgaacttggtcttcagctaaatgggagcacttggtattttcaaagtgttgctggtgagtctaatcagaataaatggcttgctttgcagtcacagcctacttttgactcagcagaaacattaattgtcattgttattatagcaagtgatcagttttttagttgattggctccaatctctgccctatgtctttctctttggatgacaaaagccaatgaaggtgtggacaaactgaatagtgacattgcacagtgagagtgaaagaagtagcttatttctttcaggcatattgaaaaaagaaaaccttccttataaataaataaaactaagaagactgaactaagacaatggagggagggagggagggagggaggaaggaaggaaggaaggaaggaaggaaggagggagggagggagggagggagggaaggagggagggaagggaagggaagggagggaaaggaaaggacgcatggatggacagaaggaagaaaaaaagagaagagaagagagagagagaaagaaagagaaagaaagaaagaaagagagggagggaggaaggaagggagggaagggagagaaaggaagggaaggaaggaaaggaagggaagggaagggaagagaagggaaggaaggaaggaaggaaggaaggaaggaaggaaggaagagagagagaaagagagaaagaaagaaaaagaaagaaggaaggaaggaaagaaaaaaaagaaagaagagaagggaagggaagaaagaaggaaggaagggaagaaaaaaaagaaggaaggaaagaaagagagagagaaggaaggacagatggacagaaggaaggaaaaaaagaagagaagagaaagagaaagaaaaagagacaaagatggacagaaggaaaaaagaaaagagaagagaagagagagagataaagaaaaagaaaaggaaaggaaagaagaaaggaagaaagaaagatggagagaaggaaggaaaaaaagagaaaagagagaaataggaaggaaggaagggagaaagacaagagaaaactagcaatcatgtgatttgaagggctgaggacttttagtataagctgaaaatcaaacttgaagtgtacagaaaaagagaggaaagattatggtcaatttagttataaagcaatctgaaaacaaagatataaaaatctatacaattaaatagctttcatgataaaactcctaacgaactaaagagtacagcacaattgtcaagggcatgaagactagagggtagagagaaaattcataatactgagagtgaggtgttagaaaaaaacattagagatttttatacttgaatattaggttataaacggggaaaagagaagataatactttttaaaatcagaaatatttacctctgaaaacctcttttctctttcaacataaatttatgcctgtattagttactgtcagtgattaactgttttaagtgattcattaacatgccaggttatcttataaattaaagcattttacattattaacttttgatttcagcaacataaatgcttaaacaataaattggtctgtattacctgggttgttttctttaatggtaactaaatagaataatccttttggtgaaaggagatctggaaccaggggaaaaaacctgtccatgacttcccgaccatttttgccaccagcccaagctgcctctattccgtgacttcctacctgtgaacaattagaaagaatgttttcttttaactcaagtttgatttagatcacaaactgaatctttttgacaagtaatatcaccaaaaaagtatatattttgcattttactgctgacgaaggagcagtcaagttgaatctaagtttcatcattttttagtgtgtaaccttggataaattagtaatcctgtttgtgaattactttcctcttttatctgtaaaattagaaaaagaatagttccatatgtacaattagaaaaataataagtggataaaaaatgtttttattaataaaaaaatatttttatccactgttaggaataaataaggaagtatatttaaagttttgagaacattgccctgcgtatatcaagggcttaataagttattactattaatacaatgcttaacattgagagacatgggtagcttttgtacttaacacagaaagaagctagaaggaacagcttgttttataagagacctactgtacagaaacaaagtttcaaaatgtcccaatgcatctggccctcttgtagtttaaagtgtgaaacacatagatcttttctaaggaatgcatttatttattatatttatatattattaaatatatatatttattatatattatataaaggcacactgaagcatgtttcctctaacaatctaattatattttagaaataatatccaggagtttatataatattaaaaaatctttagatccttatcattgtagattgtttctttttttttttttttttttttagagacagggtcttgctctgtcacctagactggagtacagtggtgtaatcatggctcactgcagcttccaccttgtgggctcaggtgatcctcccacttcagcttcccaagtatgtaggactacaggcgcaagccaccatgcctggctaatttttttttgagacagagtctcgcactatcgtccaggctgcagtgcagtggcttgatctcagctcactgcaagctccgcctccagggttaacgccattctcctgcctcagtctccaaatagctgggattacaggtgtgtgccaccaggcccggctaatttttgtattttcagtagagatggggtttcaccatgttggccaggctggtcttgaacccttgacctcaggtaatctgccgcctcggcctcccaaagtacaggattacaggcgtgggccattgcactcggccagttaaaaccttttgttttgcaaattttttattcatgataaaggatacatgtaatatatatgtacatttatatttgaatatatgaatataaataccatggcctgatatgaatgtgatttttagggatagatatgtgtcacagtttgtatttccatcatttaaggttcctttcctaggtcttttaataggactcaattactgacaattaggagtaaaatcagagtagactgtgatagcagcagctgactgatgtcataggatgacattcatttgattttacaaacaaaataattgaaaatattaataattaaattttgttgtatgttttacctcttgaggtggagtcactacataggggggattaaacaccagaagatcaactttttcggtcaatcttggtagcaagcctttgacctaaatgtattcaacaacagtaagaattttacattaaactctgaattaaataactgacaaattaatctttaaaaataatctcccatgtttttgggaaaataatgtgttacgggctacgcttgtagacagaaatgaagtatttttatgttttcattcagaaaaataatacatgcaattaaataaaaataaggaaattaaactatcagaatgaatattaaaaagcctatactcctcaacagcacatatatttatattctgggttcacttttagaaaatgaaataagaaagcaaactctaattctgtataatctgtatagacttggatataagtttacaactatatatgctaacattttcacaatttttccgatatctgtacagatacctaccattatttactggatactgttctatagtctcttctatctctggtgtttcaccattctatcaaaaacacttacttatactaattatggaaacattaaagaaatttttaggccaggcacactggctcatgcctgtaatcccagcactttaggaggccgaggcgggcggatcatccgagctcaggagttcgagaccagcctcgccaacccatggccaacatgatgaaacccagtctctactaaaaatacaaaaactagtcgggcacagtggtgggtgcctgtaatcccagctactggggaggctgaggcaggataattgcttgaacccagaaggcggagtctgcagtgagccaagattgcgccactacactccagcctgggcgacagagtgagactgtgtctcaaaaaaaaaaagaaagaaagaaattttttaaataaaaaaaaaaatcaccacgttgatctcatgtaaatcactggagtacctttcttgatattctagcttttattagcagtaacaacttctaataatatgaaaataatttcttatctctttggcttaattccttctaagctacaaaatcatttatttaaaaaaaaaaaaaaaaaaaaaaaaccggaaagctacctaccctcgtcattgtaagaaaagtgcaagttaaggagcacagaagtattttgcctttcatatgtctacctggtgcatgctattattatttttgcctataaaaaggtatttgacatatataaattaaaaacctacaaatttaaaactgccacttgaaaatgtgtgctgttaacttcttaaaacaatggttgtgcagttgtcatttgttgtttttacctactgaggacccactgcccctttcttctgatttaatttccttgacttttgttagggaagctctacctcccatcattctcaatctaagtggcctgagtagggtttatcccaatccagctcctgggatggaactatgaggcagtttgaagccaatcatctccacattcaaatctcctttggccacagcaaaaggttgagagataggcacataacccaagttgatccagataacactcattctggggcctcttctagagtaactgaatagaaagggcctctttccttgggaaggtgttcagaaataagatacagatatgcaaacatcttgttaccatgaagggaagactgcctaggaatagagccaccagagagaagttcagagataagaaaaagatgtctatagcattcttagagttcctggaagtagctgtgctgaagccatcaattttttttttttttttttttttttgagacagggctttgttctgttccacaggctggagtgcagtggcacgatcatggctcaaggcagcctcaacctcccagggtcaagtgatcctcgcatctcagcctcccaagtagctggcacgacaggtgcgcacaaccatgtccagctatttttttaatttttattttttgtagagacgagttctcactatattgtacaagctggtcttgaactcctgggctcaagcaatcatcccacctcagcatcccagagtactgggattaaaggcgtgagcctttgcacccggactaattttttaaatttaagccagtttgaactgggttcactatcacttctgactgaaagaggcctgaattgtggaaaaggtggattacatcaacaaagaatttactttgtacatggtatactgcttagtgggtcaaaagttaattacttaccaaagtttctttgacctaaagcatcttaactttatttgaaaagaaaattattactggacaaagattatcttaccaaatctgtaataactggttgaatgtgaactttgttacagcgtgctgtctctagggtacaagctgctgcctcagggttgatatcagtgcacctataaacagaaatggaaggaaactatatcctatgtccataaggcaaatctgttactgagtaatatcaaggtatgttccattaattctacacagaacagatttagaaaaaaaaaaattagaacgtattcaataatggcaaagaaaaagagaacaaggatttgttctattgatgaaaaagactgttatattgatacaatgtccaagagtagaagaatacacatacatgcacagacatctgaaggaatttatgaattatacatccaatgaaggagtactatgcagccaccaaaaatgaaatttaaaaggaatttttgataggaaaatgtttatgagacgaaattaaattaaaaacacaggaaatgaaaaaaaaacagaaggaaacacagttggaccatgtatggtaaaatttataggtgattttaattttcttctttatacttttctacattcccaatcttctataaatttaagcaactttaaatgtcttatgatatcaaattacttagctaagaaatcaaatttagagatgatctaaaattatgctgcttctacaattacgtagtatgatggagcagtttgaacatgaataatttttagggaagcatagtttgtaatctgagtttttgctatgcttaaatactataagatacatactgtctctttaaaaattatttcattagagttatcatagttaacctgtcagtggaagatctagatgaatatgatatacttacatgtacaaagcctgagggcctatcatagaggctaggaatgcagatactacaccagaccctgaccctacttccaggcatatttccactctgaaaaaaaaataaataaatattagtatagtagaatcaaaatactcttcacagaaaactctcatgctagtgttatttctagcatatatatttctctagcatcatcactcacctgcaaatatatgaaaatagaaatttataatttctgacaactactttgtacttaatattgcataactcaaaattactaatattttgggtacgtaatataagtccataaaagttatctattaccaaacatggctttcagttaatttcaacaaaccattacattaaaaagtatggaaaaatgttaatctagggttggaaatattaatgtgaaagacatcattccttcgcacaaggagctcctagcttagtatttcctaaaataaagtttgtattattacaaaatttatttttgaaaaaagttcctctatcatttttaatacctaacattcatagagccatcagtatatcctagagaattaaaagaataattctttgtcctgccccaataatagagcaggacaaaaattctttttctggacagctatatgctaattgggaaaatagtatctgatctttgaatgttaaccatcttagaatgctgttaactataaaatcttcattctactgtactttatctttccattaaatttattttcttgcctataatcttggaagttgcttcttttttagagacaggctcttgctctgtcacctaggctagagtgcagtggtgccatcacagctcactgcagcctttaactcctgcgcttgctcaagtgatcctcccacctcagcctcccaagtagttaggactataggcacgaaccacagtgccagccctctataatgttatacatgcatcaaaagcataaatcatccccattaaaaagatcagcttgatggcatttagggaaatttttagcactgaactcccaaaacaactacccagtgacaagctccagaggttttaaacttttggaaccagtctacacatctgacaagtctttattaggtggtagtaaggtctgagaatctcaccaggtggcttctctttgaaaataactatcatggtctcataaataattagaattccaaactagaaataacccaagactttataacaaaatcagctccttttacagcatactttgcagtgcaatttgtgcttgtaaatctttctgggctatcttgagaagaaaagacaagttataaaacagtactgttccactgtatattccagtagatccaaaagttccatcatctacaatgaaagactagtttaataagagctgggacattttatactggagaaatatgaccaagtttaagagggataaataaatacaatatagatctttgaaacctgaaagctgtttgttccatcctgagaaaacccagttcatcttatcttcaaacaaatctaacaacccaaattccttacatttaaaaatcacaatgtcagtattcattccttctgctattaatttaaaattgatggcgatcacttcaataaatccatttaaataaagtgctagggtagactattgtctgctagctgcatgtaacttttttttggtaacaattaaatgaaaaattcagttcctcaatagcactagccacatttcaagcgctctgtagccacatgtgaggactggctggtgctagagtatgctattcagtgggtttaaaaatatttccccactccagtaacacaactttctttcatgtttgttaagggtgctttctatgtgctgagtaaatcaaataataccatgcaattttaatatgtaatactttaaaaatattaataagcaatgtttccggaatattttgtttccaaacgtgttatactatcgcttctctcagggacatgtgttcttcagattaacaggcgacaggaaaagatacgcctttgcatggtaagcagtcagggagctcatgagacagagcagccccctggcaaaggagatgcgtccccggcacactcattacttgtagctacaggaaaattctcaattacggcgtcctggctgtcaatcatctgcaaatggaccccgcctgctccggctcagggcggtgatagtcaccgttccggccctcctccaccgcacttcttcagaaagccgcaaccctttcccgtcagagcccctcccctcctcgcaccctgccagttcggcagccgctgcctccagcgcgtccaaaagcagaaacgtgtcctccgcgggctcgtacacgtcgctgaaggcgccgcggcccacgtgcccgtggaacggcgtagcgaagttctcccctgccatagtccttcgctgcgttccatgcgcgtgcgcagggcgtgcgcatgcgcatgcgcatgccctcaccctcatgcgcaggcctaggagtggggctggcgtcccgggcgaccagtgtgttgttgttgggtcttaattctaaatttgtcagtggctctccttgaaattgctaagtagacagttgtataatccgtgactattgacatttgctttcttctttggaacatttaaattttattctgtgaactagaacctgatagtgggcattctgagttgtttttgactaaggtgaatgttctttcttcattctaatgatatttggaaattctgttttattcctagtttgcaaggatttgaaaaaatacataataaattttactgtttttttgtcagctgaactttaagctttacgctataaagatgaagactttcctcgtttttttactgtactttataaattgccttcctgatgaatcatgaatgcactctttttataaaccttaagcaagatgatgcggtttaatacactgctgaattggggaggctaataatctggctccgttttttttttaccaagattacgctaccctcgttatgtgagttaggacactgtttctggaacattaggtagaaagccttaaaactggctgggcttggtgcctttttgagtgaatggatctttgatgttttggaacatctgtaagttattagactattcaagtatttgcattctttttgagtcaatttctgaaatttgtttcgcaatgaaacatttttacagctcgttttttaaatttgagaaataaaaatacagaaaagtatttgaggtacaaattttattttattttatttctacttatgtattttttttttttttggagacagagtctcgctgtatcccccaggctggagtgcagtggcgcgagctaggctcactgcaacctctgcctcccaggttcaagcggttctcctgcctcagcctccggagtagctgggattacaggcgcctgcagccacggctgcctaatttttgtatttttagtagagacggattttccccatgttggccaggctggtctcaaactgctgacttcaggtgatccacccgccttgggctctcaaagtgctgagattacaggtgtgagcctttaacacacccggctgggttacaaatttcaaaaccccaagttttaaacccagaaatgacagtattttctcatgtttccttaaaatattttttaaatacaagaactaaaatattacaaataagatggatgttctttctctatttgccttcagtttaattgtgtaacattctctccaaggctcttatggatttagtgtatgtccatctaatccatgtaaaaacatggatcttgcatttatacgtttataaacattcatatctttataagcaacatacggtgtattttaaaatttacataactggtactaggttggacatatttttcaaatttctttttcagtcaacattatatgagatttatgttttgatatatggttaggttactcctcttaactgccatatagaattttattatgtaaaaatatgaaaaatatatatatatagaaagagttgtacttgatctcctgggttcaagcgatcctcctccctcagcctcctgagtagctggaactggaaccataggtgctctcgcacccagtattaggaatatacaaatgtctttttatccaaaaatacaaaataaattatctgtaggcatggacagtgacagcagtaaaacattatatattttgtcacttgaaaccagtaactgattgttatagtgatttcctaaacatctgctagccttttcttcagtcgttttctccagctgacttctctgaagttattggtgaggaatactgccttgggcttcctgccacagttcattaattaaagtaaaacgctattctaatcattagaacttgccatttcccataacacctcccgttccacccattgcacccaatacagggtccttctctttttttaggaatttctttgactacaacttctgctgtagttaacaggccaccccagcagcatccagtaaagcacttctcacaacctttgttttgtcaataattccttttttccaccatattcacaaaatctgaccgtggcatcacaaccagcttctcaggaactgcataattttctggactatcaaagatccttcaacacccgcatttttagcaatagtcattgcaggaattttgagtgttttcttaatagtttctgtaccaattttttgatcttcattagctggagtcaatgagtccaaggcaccaattcatcgaagtagggtacaaccccctcccagaacaatgccttcttcaacagcagctcttgtagcattaagggcatctgtaactctgtttttcttttcattcacttcaacgtgacttgtcccactaaccttcagcacagctactccatctgaaagttttgccagctgttcattcagtttttccttttcatattcactagttgtgacatccaactgctcaatgatttcttgaatacgtttttaaatttgagccttgtcaccttttccttttaagagcatagcatcatctttgatcacagtgacctctccaacttctcctaagtcatgaggctgaacatcttcaagatttgaggtcaactcctcttctccaaacactgcaccaccagtagcaattgtcatacctttaaggtggttctttctattgtcaccaaaccctggagctttgactgctacaacctgaagaccaagttttcgcctattcaaaatgagtgtacttagagtttctccatcaacattttcagcaattatgaccaaaagcttacggtgagcattggcaatttcaagatcaggtacaatggactggacactagaaattttcttggaattcacatttccgaccttttgatgtattaataaagtatggagaaatatatcctcaaactttcatgccttcaataatttcttttttttttttctttttttttagatggagtctcactctgtcacccaggctggagtgcagtggcacaatctcggctcactgcaacctccacctcctgggttcaagcaattctcctgcctcagcctcctgagtagctgggactacaggtgcatgccaccacacccggctaattttttgtatttttagtagagacggggtttcaccgtgttagccaggatggtctcaatctcctgacctcgtgatccgcccacctccgcctcccaaagtgctgggattataggcgtgagccaccacacctggcctcatgccttcaataatttctaattcatcggtagcgtttttccatctttactgtggtgaaaccctttcttctgacctttttcattgcatcggaaattaggttgccaatttctttgtctccatttgcagaaattgtagcaacctgagcaatttcttcaggggtggtcacaggtttagactgctttttaagttcagcaattacagcatcaacagctaacatcacacttctcttgatttccactggattagcacctttgctaaacttcttgaagacttccttggcaacagtagcagtggtagtgccatccccagcctcttcatttgtgttattggcaacatcttgaacaagtttagccgcaatatttttatatttatcctttaagtcaatggaccttgcaacagtcacaccatcttttgttactttgggacttccccagttctgctcagtaatcactgtttttccctttggccccattgtaatggctacagcagtgagtaaaaggtctacaccttgaagcattaagactcaggcatctgaaccaaaaattgtacatctttggcataaacccgagtgagatgaggagccaggaccctcgacactggtgtcatctgacttaagactgtgggtaattgaatcatttctgcggggcagtggcagggcttgcgcacgctgaccgcaggctgtcggtgatgagtgagggggcttgttctaattcttaaaggaaaggctttcagcttttcctcgttgagtatgatgttagctgtggatttgtcatatatacccagtttgcgtgtatttttttacccacaacatgttcaacatttttatcataaaggaacactgaattttattgaatgctttttcagcatctattgaaatgattacatggcttttgttcttggttctgttgacatgatgtatcacacttgttattgatttgtgcatgctgaaccatccttgtatccctgggatgaatcccacttgatcatggtgaatgacctttttaatgtgttgttgcactcagtttgctaatattgcattgaggatttttgcatctatgttcatcaaggatattggcttgtagttttctttttttattgtgtccttgtctggttttggtatgtcaggtttgtgtgtgtgtgtgtgtgtgtgtgtgtgtgtgtgtgtgtgttttaacattagtgactccattttgattctgacaactttcacagtagttagtgaaataataatctaagatagataatttttttcattatttttattttttcttttgagacagggtctcattctgtcacctaggctggagtgcagtggtgccatcatggctcgctccagccttgacctcctgggctcaagcaatcctcccatctcagcttctcaagtagctgggactaccgcacatgccactgcacctggttaatttttaatttttttgtagagatggagtctctctatgttgcccaggctgatttcaaactcctgggctcaagcagttctcccgtcttggcctccaaaggtactagcattacagatgtgagccattgcacccagccaatagatcattttaaatgcatcttcaagaatggttctaaagctttagaaccatataatttgttcaaattgttttttgttgctataaagcctcaaggttgaccaacacttaaaacactatgatacagagtaggagaaaatatttgcaaaagacatatctgataaaggacagctatccaaaatatgcagagtattagaactcaagaataagaaaaggaacaacctggacagacacctcaccaaaaagaaaagacccggacagacacctcaccaaagaagacatgtggacggcaaatatgcatgtgtaaggatcctgaaaatgatatggcattaggaaattgcaaattaaagccacaatgagatactgttacacacttattataatggccaaaatctaaaacactgacaacaaatgctgaagagaatgtgcaacaataggaactttcattcattgctggtgggaatgcaaaatggtacagctactttggaagacagctgggcaatttcttacaaaactaaacatacttttaccatacactccaacaatagtgctctttggtatttactcaaatgagttgaaaacctgtgtctacacaaaaacctgcacactgatatttataacagctttgttcataattgccaaaatttagaagcaatcaagatgtctttctctaggtgaatgggtaaataaactgtggtacatccagaaaacagaatattattcaaaactaaaatgaaatgaactatcaagccatgaaaagacatggggaaaacttaaatgcatattgctaagtgaaagaagccaatcttaaaaggctatatactgtatgattctaactatatgacattctgcaaaacacagaactatagaggtagtaaaaagaacagtacttgccaggggttaaggaggagtgagagataagtagatggaacacagaggattttttagaacagtgaaactattgtttatgatactataattgtggatacatgtcattatacatttgtccaaagccatagaatatacaacatcaagaatgaactctaatgtaagctatggatttggggtcataaatgtgtataaatgtaggtttgttgattgtaacaaatgtaccactctcttgtatgaggctgatagtcggggaggctatgtgtgtgtgtcagggggtgcagagtatagatgggaacaccctctactttgtactcaattttgctgtgaacctaaaacttctctgaaagataaattttattttgaaaaacactatgggccgggcgcggtggctcacgcctgtaatcccagcactttgggaggccgaggcgggcggatcgcgaggtcaggagatcgagaccatcctggctaacacagtgaaaccccgtctctactaaaaatacaaaaaattagccgggcgtggtagcgggcgcctgtattcccagctactcgggaggctgaggcaggaaaatggcgtgaacccgggaggcggagcttgcagtgagccgagatcgcgccactgcactccagcctgggcgacagagcgagactccgtctcaaaaaaaaaaaaaaaaaaaaaaaaaaaaaaaaaaaaagaatgaactctaatgtaagctatggatttggggtcataaatgtgtataaatgtaggtttgttgattgtaacaaatgtaccactctcttgtatgaggctgatagtcggggaggctatgtgtgtgtgtcagggggtgcagagtatagatgggaacaccctctactttgtactcaattttgctgtgaacctaaaacttctctgaaagataaattttattttgaaaaacactatgatacactaaaacttcttttgtccttatttggtaatacttagaaatataattttattaagattatatttaaaagtagagtcaaaagatatgcatgttttagtgaaatatcttctattgttattactatcatcatagttattattatttgacttagaaatcctcagtagacattatgaaattagagatcagtaatgttctagttgaaaaagacatatacttgataaaattgcttcttattcttttggcgttactgtggttaagagtcttgtgctgtaatgatctcagttaaaaatagtaaaaagaatctcttgaatattgtggtggactctgcacagttcatgcaacaagaggcatggttacctgcccatatagctttgtttgtatcagccagttgaaatgtcaacatggttccttatccactgaataatttcacaaccctcctcttaatttggttgctttggacacattctatcctggaaacaaaatctaggcttcataatacattcggaaataatagattcatgttctttttttccagctggtactggtagagtttacacatttactcctgcaccataggaacagctgcttaaaaagctgaagtgtgtatttgattccattacattggcacaatagaaagtcacgtaaaagagggagactctctcagcttctccatatttggaaaattaattcttttaagtgctttaaaaaaaatctctacaggtggtcagactctatgaacttaggaccagaaatgacctcatcaccttcagctggtctaaagttgtctttggctgctgcacacttcacaaaatcttgttaattatgattgtttttcctagttataagtccttctggatacatttttatagcatttatttttatcgcttacataactacataaaatattttcattggtgtcaaaatgtcatgttattgccaaatagattccatttcaatttctagaaattattggaaagttaatacccacattttaatggcacccttgctgtggtattaaatcatgttttattgaaattcacaagaatcaaaattacactgcgtttatccagaataaagcactagaacagttactttttggccgtcttgcccattaatttctatgcttgcactttctctttagacaaacaatgaatgaaatttagtgtctttctagaattgaattctcatgaaagtgattgtcatatacacactcatcatctacttctcttttcagctcagtgatatttagttcaagaattggtaggtgaatcttttccctggcttataaaacttcaccctatttatttctatttcaagaaaagtaaaaatattttaaaaagtaaaattaggcaagaaagtcatcttgctagctaggcatttggtttctccttagaggtgttatttaagaaaactcagtcccctagacatcatttcaagaacataattgtttagctgcaaagctacagttttgggtagaaaattccctttgagggttgcacattgaacccatatttagagaacctgagaaatgagctttcagcagcaatcccatttactcttctccccacagcctggggcatctggaagaagccaccaggaaagctggaggatgactaaagggctgagtttgatccagtttgccagattaggtccatcgccctgaggcccttttttgcctaggtcctgcatattccatgctatagactgaattacgtccctgtaaaattcgtattttgaagccttaacccccaatgtcacagtatttggagatggggtctttgggacataattaagtttagatgaggtcatgaggccatgggattaatactcttaaaagaagtggcatcagagagcttgctgtgtctctttctgccactatgaggacacagtgagaaggcagacatctgcaagccagaaagagggatctagctccaaccatgctggtgcatgaagacttccagcctccataactgtggaaataaatgtctgtcgttaagccactcagtctatggtattttgttattgcagcatgagctgaggaatagaaatggtccccaacctaacaatggttccacttaatgcttttttgactttatgatggtgcaaaagtgaaaagcattcagtagaaattgtaattggagcatccatacagtcatcctggtttttactttcagtatagtattcaaaaaattacatgagatattccacactttataaaataggctttgttgttagatgatgttgcccatctgtaggctaatgtaagtattctgagcatgtttcaagaaggttaggctggctgggcgcggtggctcacgcctgtaatcccagcactttgggaggccgaggcgggtggatcacaaggtcaggagatcgagaccatcttggctaacacggtgaaaccccgtctctactaaaaatacaaaaaattagccgggcacggtggcgggcgcctgtagtcccagctactcgggaggctgaggcaggagaatggcgtgaacctgggaggcggagcttgcagtgagccgagattgtgtgccactgcactccagcctgggctaaagagcgggactccgtctcaaaaaaaaaaagaagaaaaaaaaaagaaggttaggctaagctacaatattctgtagattcggtgtattaaatgcattttaaacttaagatattttccatttatgattagtttattgtgacataaccccatcacaagtcaaggtgtatctgtccatcccccaaggacaaaagacttggagcctgagcacacagggatggtgcaaactcagatgttggtccagacagttcaggaacacatgttttaaaattggaattgttgcctcaattttctctttcagtgtgtaaatggaacctccaaataagattaaattgaagagaaagcattaaagggcagtattccagtggaatccatgaacagtttgtaagtaaaattacttgtttgtttgcactgatttgctaaggaaggaaaattttaaaagtagtcgttgttcttaagaaagttaaatttatagtttaagttatggtatattttatactgggcactgtgccttcctcataatattcttattaaatatttgttgatttaagatgttttttacttcatcacatgtatttagcagagtaaattcttataaaagaattttatcacattcttgtgacaaagtatactccatgctaaatgtggtactaattacttgagtgtgaaggtgaagatttttcctggcaaatttggaacagcagcttaaaaaataggtaatacacagctgaagagtctttctttccagattcaactcatatacctactatcttgactttctctaagcctatatatttaaattctagaaaccaccacattcacttattaaacacaaatgccaagcatgcatctaatatttattacattacatttttatttttatgaaatactgattgaaacaaatagtcacccaggacaggggtcccgaacccctggaccacggactggtattagtctgtggcctgttcgtaactgggctgcacagcaggaggtgagtggcaggtaaatgagcattactgcctgatctccgcctcctgtgagatcagcggcggtgttagattctcataagagcacaaatcctatggtgaactgcgcatgtgagggatgtaggcggtgtgcttcttatgagattttaattaatgcctgatgatttgaggtggaacagttttatcctgaaactatcccctctgcctcctggccatggaaaaattgtctttcacgaaactggtccttggtgctaaaaaggctggggaccactgatctagggcatagctagtttttgccatagctatgtcataactagatgtgttgtgataaaatctcacctgtagatctgagttgagcatatcagcctatttcactgtggtagacaattctgtctgccgtggtcctccaaagatattcacatcctaatccccagaacctgtgaatatgatgctttacatggcaaaagggagtttgcacacatgattaagttaaggatcttgatgtggggagactgtcttggattaaccaggtgggttcaatgtcatcagaaggctcctcctatgaggaaggaagagagtcagaaataagagtaggatatatgatgttcaagcagaggagagagaaagagagagagagatttgaagatgatatgctgctggttttgttttgaagatggacgaaggggccctgagccaaggaaagcaggccacctctagaagctggaaaaggcaaggaaatgaaatcccccaagagcctccagaaggaacacaaccatgccaacctgttttagacttctgatctcctgaactgtaaaataataaatatgtgttgttttaaggcaataaatttgtgataatctgttatagtagcaataggagaagaatacagcaaatcaacactgattttattttcttaacatggtgcaactaataccaacttaaaagcaatttaaactttacacactagttgtcaaattctctaaagagacaaacctaaatgaatatgagactaatttaaccttctgacatctatgggcacactgaagactgggagaactggtagtgttcacgtggtgtttgtccaaccctttaacccagcaccctctagacctgcactgtccaccccacctggagctactgtgccctggaaatgtatctagaatgtaatgggatgtgcaggaagtctaagatacactgtggattttgtaaagaagagtgcaaaataccttgataatttttgttttgtttcgtttttgagacaatcttgttctgtcatccaggctggagtgcagtgacacaacgtcagctcactgcaacctcctcctgggtttaagtaattctcctgcctcagtctcccaaaagtagctgggactacaggcacgcgccaccatgcctggctaatttttgtgtttttagtagagacagggtttcactatgttgcccaggctgatacaaactcctgacctcaagtgatccacctgcctcagcctcccaaagtgctggaattacaggtgtgagccactgcacctggcaataattttaaaatattgatcacatgttgaaatgatactagtttggatatattgggttaaataaaatatattactaattttaattttaacttgttttaactttatgaatgctgttacaggaaagcttaaattacatatataagtcatattttatttctattggacagttgctctaaacagatgaattctatgtaatgatgtaattaatataatgtaggttacttatgtcaattgatagattattgattaatcattagactgctgcagttgagagagttaatggattttatatatatttatgcagtttaaaactagcatctccattttttgtagtcatattttgccagagtctgacctctacaaatctcaaattaaattgtggtgagttaagtcagactttgaaaaaaatatctggacgaatgcctaaggaatagtgagaaatcctgttggcagctcaaaggtggcatttttggatggcgggaggtagggttttctgtggtgggtgaaagtgacctttgtggatgttttgttgcttttttttttaaaggaaggaaaagtagtccatacctatgaagacattgttactataaaaaccttaatttaggtaattttttttggtaaaatgaaaaacatattttttccttttagtgtaggaatacttacagggaagacacagaattaaaaagaggaggcagcttgctgggatgaaaatcacccagttgaagacattaggaaagacctaaaccttgtggcttcattaacacatgtgtgtctggttaggaatagaatatgctaccaatagaatgattaggttagagcttcctagaccattggcaaactaattttttttggggggggaacaaatttattttgatttttctgaaaatatcaggaactatgaaaaacaaggttgatatttggctgtaccaaaagcaaagtacaagtaaaaataacatttgaaaaccatgtttaaccttagagaaacatgttttaaaatacaaagtttaacattcttttctctacagatttaaacaagttttctaaaccacaagactgcaggtttttttttttaactgacataattttttagaagaaaaaactaaaggggaataaaaagcacttacctcctaccctggaatctcattatttataaaataacatgctcaaatatcagtgaaaataaacagttgataaacctgaaaaatcttttaatgagttcaggttacaaccgaacgcaggattttgtagctgggaaagaacagcttgtataacaaccaagccttaccaaatacaaatagagataaaaggcaattaaaagcaaattataaaatcaaaatatttccgtagagtggcagccttcacaaagtaaaaacaacttcgttccacagaattgtatgttctgtaggcatatggtcaattcttttccgagtccttttgtcttgcactatcaaaataaaagaatctttgtcttggagcaagtctgctaaagaaggcaccaaaattctatcctccctattcccctaaataatattaataaacctcttatcaatcctttcaaggtaacttcaacgccattaagaattaatattctaaatatgtaaagctatagaaggaaggtcctgcctattctctttgcccctctcaaatcattctagtctggtttaccaaacagaaccactagctaagaggatagaaatatgttcccgtgttcactagccattaaataaacatagccacttgtgcaggaagcctaacgtttttactacttcctaactttttaaaacttaaggataagcccatttccacaagctaactttacagctccttaatattcttaatctggatggtttactttgcagactttgttggtgtctgcctttttcaattattttacccaaaaataggccttgaaaaaactttcaaattcaggaaacccctgcagggaaccctcatggtgtgtgagtgtgagcactaagttgaagaatactcttatttcacagaaatgtaggactgtcagactagggctgagttcattctcttccttcagagacaaaatttcaagctgagcagatttggagaaagggttccccatacagtcatatactagtgctgggaaaaggagagaaaatactacttaattgtgttttgtggttcctccaggtgggttatagcaagatttgagagttgtactcttcattttcaagtccaagtggctgcagaaacatttcaataattcccctggaaaggtagcaaatcagtttcctttttgatctaagactcttgtcactttaagaaaaaaaattttctccaggacctttcagagacttgttcatttgttcatgtgatgaaaatcgtctgctaaatcggctagtttctgtagctatttttcatttccaaagcattcagcaaaagctggctattttcttgtaactactctggcaattcacctttcaactcaaaagtcctgtagagaactcttcctctgaaaagccactggatatctgtatggtacaggaggtttatgcgctgtttgtccaggtttttgttttgggtgtttttatttttttaacatttttgcataaatgggtctttgatacaggtaaccagttttgtagcattattcagaatgtcattgtatcttcaagtttttgatatcagcatctctgtgaagaaagcagtgtgctatagcgtcaacatcaggatttctttcttcttttttttaatgatgcaaaatgacttatggagacaaccactgatggggcaccaggagtgtagataacagacctctggttatcagatatgatatcacaacattgtatattggcctttgttttggcaggctcctagcaatagaaaaagttttctttgaatttcatcacttacaaatcttacaaatgctacagcatgacaaatattagtgaaacccgttgactcatcatcctggatagagaagctgctgcttttctctttttttgagacggagtcttgctctgtcatcaggctggagcacagtggcgtatctcagctcactgcaacctccgcctcctgggttcaagcagttctcctgcctcagcctcccgagtagctgcgactacaggcacacgccaccacgcccagctaatttttgtatttttagtagagacagggtttcaccatgttggccaggatggtctccatctcttgaccttgtgatcctcctgcctcggcctcccaaattgctgggattacaggcgtgagccactgcacccggcctgaagttgctgctcttcagttaatgacacaaaacctttgtagcatcgtatgagatatcatcagtaaatcaacttactgagaataaagtcttttcaattttgtactgcatcctgccccagcattttaatgttattagattctcatcaactatgcatatttttctttcctgagataagttctgctagtaaataatttgctttcaaaacattttgactaaacgtgatttttgaacagaagccgtactgttttgatggtccaaaagccaactgaagataatgaatatcctttcttgtcaagtgcctgtgatttatagttacaatttttagttttgtaagttgcatgccacagacaatgcacagtgggacaggacagcttggactgagtccatattaaacccttaaggagcagctttcattataaagacagaatctctttgtgtcccttgttgtactagaatactgaagtatactcagaagaccaaaattcttcatcaccaaccttttcagaaatgtctgtagctctgtgcctaaaatgcctctcttctttctcacatcttaccttccaaaattgcagcactgaactgtcagctttgttacacacaaatgttaatataatataaaaacaggccaggcgtggtggctcacgcctgtaatcccagcactttgggaggccgaggcaggtggatcacgaggtcagatcgagaccatcctagccaacacggtgaaaccccgtctctactaaaaaaaaaaagcaaaaaattagccgggcgcggtggcgggcgcctgtagtcccagctactcgggaggctgaggcaggagaatggcgtgaacccgggaggcggagcttgcagtgagccgagatcgtgccactgcactccagcctgagtgacagagcgagactctgtctcaagaaaaaaaagaaaagaaaagaaaaaatatatatatatatatgtatatatacacacagacataaccaaacaagaaaatcacaaagtacaaaaacttcaccaaacaattcaattctaacctacatgatccacacttttgcaatgtttacaacaaagtggcagggggacagctgagctgtggcatgtaaacctccttccttcaaatgaaaactcccctctgatttcctactttacagtcagttcactacagtaagtcagctggcaccacataagaggagcctgggagaggccaacgtccccctctcctcccatcctcccctctttgcaatagtgtggcacatgggtctgcctctacataataccataagggctgaaagttccctaacaaaatgattaacagggctgtgcaatcattgttcactactgcgagaatagcataatgcagcacacaaataaaaaactgtttttagtcacaatttaaggtggaaccccagcaacatctcatagagacccagttgagaaacccacctccagcacgaaatggcctcctatgacagatcattttcatttgatttggacccttctgtggcttgacttgcaagttcaggtttggctcctccctcatttatcacctgcggattagacgttcttttccgccctagctcttcagtattctctggtacctgctggttatttttcccttctgctgtattgttttgatctgatttgtcagcagcttccagtttaccttccttcccatttctctgctttgaattaagctgtgatggacccttagagctctttatcacctcctggagattgaatttttttttttcctttttttttttcctaatgctctgttgccaggctggagtgcaatggcaccatctcaccatctcagctcactgcaacctccgcctccgggttcaagcgattctcctgcctcagcctcctcctgaagaggtggaactacaggcccacaccaccacctccagctaatttttgtatttttagtggagatggggtttcaccctgttgcccaggatggtcttgatctcttggcctcatgatctgcctgcctccttggcctcccgaagtgctgggattacaggcatgagcctccacgcccagtcggaaactattttctaaactacatgtaatctttcaggacactcaggcaacataatttctactatcaccgtgtactgtggattgctgagagccactttactttctgaattgagggtgcacactattcctgccaattttttgataacttctctattcatgtgactgtgtccgcagttggttcctttcagtgggttcatagtctcactgacttaaagaatgaagacatggaccttcgcggtaagtgttacagcccttaaaggtggcacagacccaaagagtgagcagcagcaagatttgttgtgaagtgcaaaagaacaaagcttccacagcatgtaagggtaccaagcaggttgccgctgctggttgggggtggccaccttttattcccttatttgtccccgcccatgtcctatttctgccctatcagaatgcccttttctcaatcctccctgtgattggttacttttagaatcctgctgatttgtccattttacagaggctgattggtccattttacagagctctgattggtccattttacaaacctcatgctagctacagagcactgattgatgcatttttacagagtgctgattggtgcattttacaaacctcttgctagctacagagcgctgattggtgcattttacaatccccttataagacagaacagttctccaagtccccactccaccaggaagtccagctggcttcacctctcatgactgctatttcaagatttgtacacaatctgaaatgtccctttgtttggagctttaaaccagggttccaaaaatgtttctgcatattttttcatatcttttaaaaaagctttgcatgtgcctgagatgggtaacattcgtagaataacttgagtcttcttggttttgtactcatcctggagaatatgatgcaccagtttctcaggttctttcccaagtgtcctgatgaaggcgacgttatttgctccactttccactgactggaatcctcttaggctcatctctgtagatgcctcaatgtcaccaacttctttcttcaagacagcctccacatcatcatcttctccctcacttccagagggctgctgatccttgtctgtaaacttttctggcccatacatgtcatcgccatattcgttgagcagggtgtaagcctcctccacacacttggcgctggttcatgttgcaggtgatgaggatgcccatagcccgggctctggctgactgggcccgccagattcgcagtgccgagctcgcttgaccagcacatactgagccttgcctctgtgcttcccgccgccaggctgaggaggctgctgggcagcagccgccatgatgtgtgcaagctgagaggaaagagaaacgtttctccactgcagttggcgtcctcacctcccggcgaacttctccacggtttacgggtgtgaatagaagaagtatgatggcttcaacatttggcatacatatgcctttttacctgcagaccatgagtagttttgaatcacttcagtgttttttgtcttctcacagagtcttcatggacacatctttctctttccgaagaaacaaatttcttttgaaatcctgttagtgtttcatgaaggcatctagctagtgcagcttcctggaccagagttatgtttgtatgatcaagaaatcttaggaaactaaacaggatccgaaagcaattatgttttgtgtggcgaccaccttagagttcagtgtggaaaaaaacatatatgtatattaggcgtgtgtatatacgtatgcaaagcaaagtgatgtatatttggcaaaagacaaaacatttgccttctgggcactccataccattttgcgaatgctaaatatcacctaggacatgaggctcatggtttgacactcagcatgaaaaaatatatattaagaaaatttaggctgggcgtggtggtttacaactgtaatattagcactttgggagattgagatgggcgaggctagaggcaagcagttcaagaccagcctggccaacatggcgaaaccctgtctctactaaaactgcaaaaatgagctgggtgtggtagtgcatgcctgcaatcccaactacttgggaggctgaggtaggaggattacttgagcccaggagacaaaagggttcagtgagctgagatggtgccactgcactctagcctgggagatagagcaagactttgtctccaaaaaaagaaaagaaaaagaaaaacagaaaatttgcacaaactttataatttcaataagtaaataagtggcataaatgattattagtggaaggatttctctttaaattacttggatcatccctcccccaacccatcaccagttttttactttattttgtaggggctgccacactcatctaggggctgcatctactaattgatgtaagtattgaccacttgcggtgttttaatgaaatagtaacctctgaaaagtttccccacttcctgacaaatccgtgtacacttatcattgtggtataagtgtaccacatgcaccagaatctggtgcatgtgtttatctcaaatccaggactgtttttatgtttacagaccatgcactgcaagtctaagtgttctcaggtaaagctgtcaaggcaggaggctgagtgaggacacaccagctttacctgccttggggcactcctgggattgattggtttccccagagccataaaattttttattattcttctgcatatatcaggccacggaactgtgtggccttctgggacttctgctgcttgtaaaatggcacaacatttttgttggctgaagtgcagggtgagaattgctcatcacccttgcagagcaactggagacctcttttagggtcattggttaacctgcaccagagggcagttaatgagccaatgaaggaaatgctaacattaaattaaatatgtgaagaaggattcctccaggcatcagatgagctagatggggtaggaacattgagagtgaaaatctgggaaataaccaagtgctttgttcttttctaaggcatgcagaactcattactgttgatggaagcaaaaacaacaaggctgagtgccttgactaagtcagaggttagaaaccctctggctcaactttattggccaatcttcattaggtgagcaaagaagcctctaaagagaagaagcttgtttgccctactggaagagcagtcattgcttttataaataatcaataccacatatctttacatagagtttcatcatacttaaaatatttcagcttcttcctggtgtagaagttatagatggattaaaaccaaatgcttaaaattcaccccccagagaatagggaattggtcttagaaaatggtagtctttgagctgagaggtaagttgcatactagatatctcttactggaaagtcctactgaattcttctgacctaaatgagtacgattgagccaattgcagtagcaaaaagaatttcagatggtataatgcagcaattatatataaatcaggccttggaactgacagaccaggtgccaaatccctactaatttcagtgttatttaacagagtagaattacagtatatagtttaacaaaatagttgtacagagctttattcagttcttttggttttaaagaatagagagtcacctgttccaacaattaaaagaattttaatgtatcagtatgatatatatgtatagataaatgcacacacacacacatatatatatatttgagaaagatcatctcttagaaatccaagaacaggatttgtaatagaataatttctaggggaagtgatttggaacccaagacaagtctgggatcctcagaagcagaagtccattaatttcactctgagtgccccatgttaatgtgaagacactatgcatctgttgtcttctctgtgctcccctgtccaccaaagggcttgtgttttctgtatttcacaattcaggctctcgaaacaggcattctggcctgtttgagcacagacttattggccaggtcacattttagcccaactgctagtttatggattggctggtgatgggacagacaggcctttactcctaatccaattaaagatgttcattaagaaggctgcccttcattgaggggaatgggtggacaacttccttttgctagggtgtgactggcataatgaatgatatgcctgacagtccttgagagttggttatgggtaagttagatctgcatgccatcttactttctgattacacttcttcacaatcattggaacacaagtggaaagaagataaagatcccctttatttgagagcaaatcttctgaatatccattcaatgaaactcagataccctctctaggtaagacttaactttgtaacctattcaccacagaaatgtaaacataaaaaaattgtcctatagttaagtgacagagcagagtgaatcttaagcagaagggtcaagtaggcaatgagattttttttgtcagagtcattctttcttttcaaacccagagctatttcatatactagcaaattaaaggcagctgtactttgggaggaagaggatgtgatttagttggcagataaccttaaatcacacctttgccccatagcctatggccttgggtaaataaatgagcttctttgagctttaatctcctcagtgtcaaatgtaactatctgctatggtctgaatgtgttcccccaaattcatgtattgaaaacttaatcccaaatgcaacagtgctgaaaggtgagtccctttgggaggtgtttaggtcatgagggctctgcctttataaatagattaatgccatcaaactaggacttgatggagggagttagtttctcttgaccgtctaacgttccccatataaggacacagcaaaaaagccctgccagacaccaaatgctggtgccttgatcttggattcccagtccctagaactgtgagaaaataaaattctcttctttataaattacccagtttcaggtattttgttgtactagaacaaaacagactaagacactatcgtacaaagtcgttgttctaaacattgtatgaaagaggtgggtatatgatggataattatttcataagtacttaaaaaaacaatggaagggacacctaagaactctcattttacagatgtgggaactggggcttgagaattatttccgttgtttaagttcagtcagcttacttagtcaaaactagaactcagatctcttgacttcctaggccagtgttttttcaagctacctctaagttattctacaattctaaaaacttgctcttaagactatggatgtaggtaaagttatagcttccagttgcctacaatgaacaagggaaactatttttattattaggctgaatttatttatttatttatttattttttgagatggagtctcactctgtcgcccaggctagagagcagtggtgcgatctcagctcactgcaacctcagcctcctgggttcaagctattctcctgtctcagcctcctgggtagctgggactataggcatgtgccacaacacctggctaatttttttttttttaaactagaggcagggtttcactatgttagtcaggctggtctcaaactcctgacctcaagtgatccacccgtcttggcctcccaaagtgctgggattgcaggcgtgaaccaccgtgcctggccaaagttctttttttttttaaaaaaagagaatatatctggtccttatttctgtgaagactgaataactgttaatagcacaaattactaactgtcctagaggaatgtgtttttgtttgttgttgttgttgttgagacgaagtttcgctcttgttgcccaggctggagtgcaatggtgcaatcttggctcaccacaactcctgcctcccaggttcaagcgattctcctgcctcagcctcccgagtaggtgggattacagggatgtgccaccaagcctggctaattttgtatttttagtagagatggtgtttctccatgttggtcaggctggtcttgaactctcgacctcaggtgatccgcccacctcagcctcctgaagtgctgggattacaggtgtgagccaccatgcctggcatttgaggaatgtgttttaatagtaacccaagtcttaaagaagtgaaactctttagccaggcacccctgagcctccctggcctcccgcagtcaccctggccacatggctaacctcctgtagctctaagatcaaggagccaatccaaggcttccaactggcaatcaagctccagactgaaaggccatgaaacacaagtaacctgagctcacctggctgagcatcatagtccagaaatatttttcatgccatgcacttctccgccacgcgagcaaagcgtggcgcggtgcagtggaaattttgtgtaatccatcctattttaaattaccaaggagttgaattttatgaaatattaaaggactagattctagaagaccttcatagaatacagatggtttgttcacataatttttttctttgtgcaggagtgcaagattttccaagcacgtcttccttcttccacttagaattccttcacagactcttgttgtctattttgtgtaaagcaccataggaaatacaaaatgatattttatatgctgtctttccccatagagcttgttttctggttgacatatgaatggagactccatgaggtctggaactttgtctgttttacccactgttaggatctagtgcctagaacagcatcttgcagagaaaaggcacccaaggaacatttgtggaatgcatagatgaacattagtcataaccaacaaacatttatatgtctaatatttattccccccacctcattttttctttagagatggggtcttgctgtgttgctcaggttggactcgaactcctgggctaagctgatcttcccgccttggccttccaagtaagtgggattacaggcttgtgccacagtggttgactgtgccccctagtgttttttattttttatttttttagacagagcctcgctctgttgcccaggctggagtgcagtggtgcgaccacagctcactgcaacctccgcctcccaggttcaagtgattctcctgcctcagccacctgagtaactgggattacaagtgtgcaccaccacacccagataatttttgtatttttagtagagatggggtttcaccatattggccaggctggtcttgaactcctgacctcaagtgatctgctcacctcagcctcccatagtgctgagattacaggtgtgagccaccacgcccaacctgccccctagtattttaagtacagttgctgcctcatttgattctcacaattccatgaggtaggaactattaatatttccattttgaagatggggaaactgaggcttagaaagatttaagtaacttttccagtgttccccagtggtgatcctgggatttgtagcaaagtcagctggccctgaaatctgttctcttgaccactttgttctgttgcctctgcatactaagctgtcttctccctcagagtaaaatacactcttttcctgtttttataacccaaatcaagaggtgcttataatggcctcacatctgtgatataaacaacaacgggctggaaagttttggagagtctgaaccagatgtgggactaacgctgcccttgagggataggaaggatttgaacaggtgagaggtagagctcctctcacttagacttctgggagaagatggcttgaaaatcctctccataatattgttatattataatctcataaaatattatagttattgtcgttcatctttaacccagcttcatcatcttaaacagcttgtgagggtgagcatacagacttgttcatatttctacacaagctcagcacatagcatggcaccttctctttgatttgattgaaattgaattatcattgatggtaagctggatgggcttgggaaagtattcttgccaaaccttgaattccgataagcttttctttttcatgtttttctccagcccttcctctgcttttgaagaagtcctaaagaaaaaaagaacacaactcttcatgtgaaatcatttttgacgtctttggagatttctctaggttctggcccaagcctgactgttgttctgttccacctacattcttcctacacttgagggatttgaaaaaatgtacttaatgatttggacttattttaattttctctaacttatttattttctctgaggttaagaacattttgtaaattcactaaccaaagatattttgcacacgatgaaagagcttttaaaaaacattggatcggagttagcatatttccccaaggaaaggaaatacacaaactagtcacatgattgattgaaaaaaacaaagcaagagaactaaaatatcctcctgaactagttcctaaggtacactctttttccattctgacacaacaactagtctgcactgtttgttttttgaagtgaaactttggtgggaaaatttataaccaaaatttctgtatatttcacactaacattctttctcttgccagacattttgctgtgaactcaggcatttatccccatatgttttccagcctgttcaggtgttcatctctcttgttctcagtaaatactaaattttcaagtcaagcttctggaaaggtagtttggtcaccatgtttttgtagagagtgattataatgcacattttctttcatttgttcataataatgaacacaaacccctggtgtgaatttcactttattagtagagtctttacagtctgaggatctgatattagtaaagaagtcaattttgaaaatgttggctatctgaagaagagtgacaaatcatgaatgacctaattgatattgacaaagctattgaaattgttaaactgacagaccaaaattgacagatagaccaaaattgataaattgataaacatatttttgagcagtgactatatatatgcaaagccaaacttccatttgaaatttgctctctactaaacagaagcaaagatgtaggggcttggagtaggcacctagttagcgatatcattccttattcccgccagtaaatcactgacaagaataaactcttcccatccgtttcctctttctaacttactgtaactgggcagtactgtaactggactgatctcacacccagatcagtcaatttttataactgacattttctaatgcattcagctccattaccagtgccaccaactattacttctgatttactttggaattaattcaaacttttttctccagatttcatcatgctaagaaacacttctcatgcctgcaacacctagtatctatttccgtaagtcaaatttaaaaatattcatagacttatctttgccccaatgtcagtagctgtcagggactcaggagactctaaagattcatgaataatagtagtagaagtagcaatcgtaatagtaaaagtagtaaaaatagcagaaattatattatttactggatgctttctacccaggcactgtgctaagcactttattttcagttacgatttcattttacagaagaagaaaccaaggctcagagaggtgaaataaccttatacagtccaagtggtagagccagaaaattcattgttttttaaaagtttaatagaactcaccaatgaaaccatctgggtgggctttttttgagaggggaagtttttgactataatttcaatttcccacttttagttgaatagtttgaaattttttctctgggcttatttatttttgagatggagtctcacatggttgcccaggctgtagtgcagtggtgtgatcttggctaactgcaacctccacctaccggggtcgggcgattctcctgcctctttttgtatttttagtagaggcagagttttgtcgtgttgaccaggctggtcgtgaactcctgaccttaggtgatccactggcctcttcctcccaaagtgctggaattacaggcgtgagccactatgcctggccatatttatttgcttctattgagttcttatattttcaatgcccttatttcccctgaactaaataatttagtgggctttatgtcactttgttctctttcccactgctatctcacatcttttgcttatactgataggcttatctttgccccaatgtcagtagctgtaggggcatatattatctttatttggtaagaaactcactggtgagtcctactaaacttttaagaaacagtgaattttctggctctaccacttggacggtgtaaggttatttcacctctctgagccttggtttctccttctgtcaaatgaaattgtaactgaaaataaagacaatatatgcccctatagctactgccgctataatataaacggacatgtattatctttttctttgtcttggtcctagccctttaaagatgactttcacattgtttgaaatgtctatgcccttacttatctatttttgtctgcttgttccatcagttacagagagaggtgtgttgaagtctcccgctatgattgtggataattctattttttttagctgtttcaatttttgcatcatagaattcaaacttatgctagtaggtgaccaaatttagaataattatatcttcctggtgaactgaatttttatcattgtggaaatgttcctttttatctttagtaaagctttttacctgaacacctattttgtctgacattagtataggtatagtaggtgtctgagtcagtttgctctgctataacaaaggaccatagactgagtggcctctaagcaacagaaatttactctttatagttctggaggctggaagtctgagttcagggtgccagcatgattgggttggagtgagggctctcttccaggttacaggctaccatcttcccattgtatcctcacatgacagaaagagagctggagagctctcttggatccctttataaaggcatgcattctattcatgaggattccaccttgatgtgctaaattacctacgaaagatcccacctcctaataccatcacattgggggctaggatttcaacgtatgaattttgcatggacaaattcagtccataacactaggtttttttggatttatatttagcatattttagctttttccatcattttactttcagtctttaaaaaaattaagttgtgtgttatgaactgaatgtatccctccaaaattcatacccagaagccctaacaccttcaatgtgtctatatttggagatgggcctctaaggaagtaattaagcttaaatgagatcataaccacttacctcctaaaaggtaagagccaaaataaatgaccatttgatctcaatttctatttttttcagaatattctacccctaaatgcaaataaatttacacagagcccattaattttatatgaagtaggtgttattcttattttgataattacacaaagataaatgggagctagaagcaattttcaaaacaaaataagcaggagggaagacagttctgttttcccagcctctgttcctggtctctcatttctggctcaaggactaccacactctggagccctgagaatcagctttctggagttttggggtatgctgcgtgctcctgacaagctaattgcatggacaaggaaaatgggataaaagttgggaaaatggggattggctaagggaataaataatagataaaagtgataaaggagagataaaggaaggcagtatgatgatgagaaagagatcagaaagtagtattttgtggaaagaaacatgtgatgaccccacataaagtaggcagtatgctccattaaaaacaccatcatattaaattctgttaagagggcatttcaggaatatcaggttctagaatgatgagaggtacaaatgctttaactcgtttgctttattggttaaattttatttattatcttatttaatattttaaatggtatacgatgtgatattttggtatatgtatacattgtgaaattattgaatcgaacatatctgtcacttcacagttattttatgtgtgtggtgagaacacttatctactgtcttagcaagtttcaagtctacaatacatcatgactgactgtaatcaccatgctgttgaatagatatccagaacttactcatactatctgaatgaaactttgtaccctttgtttttgttttttggggggtttttttgttttgttttgttttttgagacagggtcttgctctgttgcccagtgttgcccaggctggagtacagtggcaccgtcacagctcactgaagccccgacctcctgtgctcaatcaatccgcttgcttcagcttcccgagtaaacggtactacaggcacgcatcaccatgttgggctaatttttaatattttttgtagagataaggtctcactgtgttgcccagactgatcttgaacttctgagttgaagcgatcctcctgcctcagcctctcaatgtgctggaattacaggcgtgagctaccatgcctggccctttgacttggtttgatctttaagggcatgagttatcagataagaatctacctcttcctagctctgtggccttaaccttttttttttttttgacaggatcttactcttacccaggctgaagtgcagtggcttgatcatagctcaccccagccttgaactcctgggctcaggcatcctcacacctcagcctccagagtagctgggactatagacaagccactgccatgtccagctaatttaaaaattttttgtagagacaaagcctcactatgttgcccaagctggtctcaaattcctggacttgggcgatcctctgcctcagccttccaaaatgctggaattacaggtgagccaccatgcccagcccttaacgtctttaaactgtcattttctcatttgttgaatgaatatcacaatagtacccacctcatagggtagttctggggattaaataaaatatttagttaaaatcttggcacattgtaagcactccataagtgttacctacttttggtattatcattgttgttataacgattattattattggcgtataggttggcaatagaaaattataaccctcatgcttaattcagccctaattagaaattataactgaatctagcagctgcgagcggcagcagtttaatgaagaacgagttgtcataaaatttaaattatatctatccatagctagtttctatttgtaattgagttttttccaagtttgtttgttacaaatggaaaagagctttgctgtaatcataagagatttgatttaacagttctaaagcccgctgacctgattgtggaggttctgactttaaatatgtaaagcagcctgtgtgcttgccatccttgtttgttgcttaaaaaaaattatattttcttattatgttggttaaggaaaattatatttgttagaatatgtttgttgtagaaattaaacttacccatcaagccttatgctgtacaccccagcactccaaccattaacttgctatccgcagtttttgatttgcatctgtgacttcactagaatcttagtggcctttgtctctaccagtgtatttgtaataaactaaattatcctcagagacttaattggtaacataagtgcaagactttgcctctgaaaatacagcttttagaaataacattatgcctttataaggtgtattccaaggaagacaaatatgtaaacattcttcatgtcatcagagtttatagtatttttctggagtggaaggttattattcctattttcccaaaaagtaccagggggtcagtgacttcttccaggtcaatagcttctgtctggaattaccaagaccataacttgaatcacctattgcaaattccctttctagtccataacattgttgtgcaaaattgaaatacttatgtgacaccaaaacaaaaacgaaaaccaaacaaacccaaaaaccaaaatcccaaaaccccccaaaaaactaacacaaaaaactaaactaaaaaacctaataaatcctaagtcaggtggaaacacttcaaatagtttctggatgtgagagcttctcagaagctaataaagattcctggctctattggatggaatgctaagaagctattttggttggattgggaacatttattaatgtcttcatgtgagcagcagtaaaagtgtactacctattaaaagttacctatttgcttattttgcccaccattttcagatatgagcttctgacatttcaacaaaactaatgaccagcttgttttgggtaaccagtttcttgcagttgattattatcccccagaaatccctctgtgccaagtcttgtagccaaaacagttatttaacccaagtacagtcatgtgccgaataatgatgtttcagccaacaatgaccgcatttaagacagtggtcccataagattataacagaacataaacagaaacctgatatgtaacacttgatattggcactgcagattaagcaggggaaatgaccgataattcagttaaggttctgagacatttggttttccatatgaaaaatatgtataaattaaatatatatgtatacatataccatcaatgtttgtgtaagtatactctgatatttgcacaatgacaaaatggtctaatgtcacatttctcagaacatatctccatcattaagcaacatatgccaggaataattatgaataggtataataactgcaaaaagtcatgtaaaatagatggaactgccagtgctgaacaaatgaagaggataaatgaatggtttctatgtaaaaggtaaatgaatgtcagtaagaaatagcactctcatgcttccatttgccagaagtatcacctttggttggttgtgggtaatgtcaattattgaaataattaagtgaatatggaatccagagactaaaatactgagcgatcaatcagtgtgtatgacaaacccttctgtgtatagaaacatagattctatgggaggtgaaggcatgtctgaggcacagctatggtttcaaaagactttatagtttgatttataaagcaatatttgatacagaaataccagaactttagagctggaataaaatagaggaagtttctgtttttgttttgttttttgacatggagtcgtctcactctgtcacccaggctggatggagtgcagtggcgtgaactcggctcactgcaacctctgagttcaaatgattctcctgccttagccacacgagtagctggaattataggggtgtgccaccatgcggggcttttattctttgtatttttagtagagatggggtttcactatgttggtcaggctggtcttgcactcctgacctcaagtgatcccccacctaggcctaccaaagtagggattacaggcatgaactatcgcgcctggcctaaaataaaaagaaattgtaaaactagaagagaacttagagatcacctagcccgagaaattgtaaaactagaagagaacttagagatcacctagcccgagaaattgtaaaactagaagagaacttagagatcacctagcctaatactcatggttaaagaggtaatttagtgagaacttaaaatgcaagctataattttagcttatatcacaggcccattccttctcttatatattttttattttccgccttcatattgagcatgtgccagttcattgatgttaccacttctcaagctaaaagtatcatctgcatgtcacccagtgatggcaatggacccggtcacagtgattcaagggtccccaaaaagggtgctgtccttgtccattgatgactgaggaaggggtgcttcttttctgcctattctgacaccatattatctgtggtggtaccaaagctactggacactcctgatggcaagaggtgtaaacccaaatgcagatgaatgaaggaagaaaaaagacaatcaaagctgtgctgtaaaggagacagacagcccccaaccccctgccctgaaaaggagagctatattgtcagccacccgaaaaaaggcatgaccagtggacttcaggatcaatgtggtcagatgtctttttttttttttaagagatggaatcttgctgtattgccccggttggagtgcagtggctattcacaggcactattatagcacactatagccttgatctcctggtctcaagttgccctcctgccttaacctcctgggtagctggaactacaggcacatgccaccacacccgaccagaatttttttttttaacagagtctcaccttgttgcccaggctagagtgcagcttgttttaagtgttctatagctccattagtatgaaatatctgtgtgtaaattgataacgacaaagctattttgattgacaaagtatcagactttggataaaatcataaattatatagatatcgcaatcaatttcaaattcattttggcatcataactttcttaagttagaaagaacaccatatttagcatataatctatacatgcattacctgcattgtggggattttaagcatgtccatacattctttgacacctctctgtccaaaatgtgaagtctacttctctagcacctgagtgtgagatagacttagtggttcatttccaaggaatagagtatggaagggagaaaacaataaccacatgaagtacatgtagacatttatttcaaaaaataaaaacaaaatgacaaaaaacaaaaaattatgaatataattgaaaattaatctcacttatgaatatacagaacaagaaaaattatagtttatttgtaaatgaagattcaaaatttgaaaaataaaatattttaaatctacaagtatattattagtaatactactgatcatgaccaatttgggtttatcccagaatgcaagggtggttcaaaattatgtaatccaccgtaatagagaggaggggaggggggaaacacttgccatcttaatagaagtaggaaaagcattttataaaactcatcatccactcaggacttaaaaatataagcaaatagaaacttcctaacctaatatattggaagtagctcaaagctggggtacatcacatttaatgacttaaaatattccattttaaagtcaatcaaaagacaaaggtaactgcttactaagaagtcttcccagctaagacaagaaaacaaaataagatgtgaaatttataggcactgtcttcaaaactactgtcaagcagactatgacaaagctcatgttatgcaggcatgagagggagtacgtattgggataaggggatgttaaatgaagggaagtgctttccaaaaatgtaactacttaattataatcttgtgacaaacagctacaaaaccacttttaataatacattctttctgtgatagaaaatgtaatcttttcactttgtaaaagctgtcagttctattactagggaagaattaggctttgattacatacaatttctatttcatttctcccttttttccagcagtggctagattcctagcaacagagtctctggaagatctcacccaaggagtaaggcagttttttcaacatttctagcattaggacttggttggctcacctgcaagacagtgtgagattctattcatgatagattccctaacaccaaatctaaagttgagagatatttttaaatttctataagatagtcaataaagatctgctggtgtgtttaactctggtctgggaacctgctaaactttcacttaccatatttgccagaagagtatcttcaaactttatcacctacatacctctaaataaaatttaagaatgtacactttcatgtatttttaagttgataactaacatttatcatcataaatttaagtaagtgcaaataagataatttcaagtggcatactgtaaatatttacattttcaaaaataaaaacttttgtcattcttttaaatgtatctaatagaatctaagtaccatagcaatttgattcccaccattatcaacataatacataaacaagctcttcaatagtgagacattaaacatcattcactggatctttgtttatattttgctttcctcacagaattatagtatattttactgcttaaaatatttatctcctaaggtacttctctgaaacgaatataaattgaaatttaaaaaatttcctataactaaaaggctataagtattaaaaataacttttttctaaattattacagtaactattagaatgcagtagataatatcacaaacatgaatatttttacacacaagtattacacataaaacattaaaaatcttactggaaattcatctgagaatcaagaccaatttgtagtgttttttttagttcatctttccgtgggtatatatgatttataactagcatgacatagcagtcaacataaattacattcccatttttcctatctatagatgagatcatttttaatgtaaaacaaatagatgagaatgtagttttgttccgtttttgttttaacttttaattttcatgggtacatgggtgtatatatttatggggtacatgagatttttgatacaggcaagcagtgtgtaataatcatatcatgtaaaatggggtagccatccccacaagcatttatcctttgtgttacaaacaatacaattatattcctctagttattctaacttgtaaattaaattattattgactatagtcaccttgttgtgctatcaaatactaggtattattcattctatttttttgtacctattaaccatccccacctccaacccccaccccaccccctgtgtcattacccttctcagtctctggtaaccatccttctactccctatgtccatgagttcaattgttttgatttttagatcccacaaataagtgagaacatgcaatgtttgccttcctatgcctggcttaagtcacttagcgtaataacgtccagttccatccatgttgttgcaaatgacagaatctcattcttttttatggctgaatagcactccactatgtagtacattttctttatccagagaatggagatttgtaataattcaattctttgtcactcagtgccactgcatccatcaatttttttagtaatacgtcaaaaatgaaataaattttaatgatttaatggctgacagcctgcctaggcttttgtttaattttattgaaagcaaataactgaaaaccagtgagttgcaaaaaagggttagccattattggagtctctttctcaacacattttcaaatgacctgtatagactggaagggttttttgtttgtttgttttgcttttcccaccttgacaatggtgaaactgagaaagatgggtgaaaattatgcctttcttttaaaaaaggacatatgtgaaaggggcaggtgggaaaagagaaccagtctgagacaggtatataaatgggaagatcaaattttggaaagagtatcgaggaagtggaggaaatgaaaatggattaaaattctccttgcacaagtacctcttgaaatgtcttggtgtgcactattgtgctaacctctcttttagatataagggtacatactgcatctaggatttaagaataaatgtgtatcaattagtatttctgctaattaattaaggtgcattcacttgtgtatattggatgaagttaaactgatgaacttatctggagagtggaggggtgtacagtgaagtgaaaggcaatcgttacttagtcaggaagcccttttaaagggtgtcctagtcttaataaagacaatggtgacgatttggccaaagaaaaactttagcccacggattgacttgtttatgttttcttaccctgcaataaattgagtattataatgtctcttaaggtgagtctcttttgtgaattaaaatagtcataaagtcagccaaagtatcgaaggttaaaaaaaaaaaaaagttaaattcaaactaaagtatacagtgaaagtttctgaaccaagccagatggtatcctggtttgaagagatcagatagaaagggcatgtgcgatccacagctgacttaaccagtgctttcacatcccagcctctgtgtagctaagcttgagttggtgactgcatataaaagcttgtgaaagtaaaataaatctagggaccccaaaatcactaagctaatgggaagagtcaagctgggagctgcttagggcaaacctgcctccccttctattcaaagtcatccgtctgaggctcacctgaaacaaacgcatatctgattgcttcctctctcctattgtttctgtgaaaatgcagatccactgaaccagactaaattgtgtattcagtggaaggctgatctacgacttaaaagaatgcaaccttttgcgtcttacctacttctaacggggccacttcgagttgtcctgccttaccggactgaactaatgtacatcttacacatagctgtctcatgtctccctaaaatgtataaaagcaaactgtacccccaaacaccttgggcacgtgtctcaggacttcctgaagctatgccatgggcacatccttaactttggcaaaataaacttcctaaattgactgagacctgtctcacatattttgtgttcacaagctctacatggatttaaggcacagatggtaaaggttttccaaaagtgctcaagcagggataccaaaacattgtatgtgcatatatgactgctataaaggttatacattatccacaaaaagcaaagagaaagaatggaattgacattctaagacttatctaggtaactgcttctctctagtggagcttttgtcattaaacaaattgtggggacttctcttattttggctagaatatacttttgtcaggccagtgactctactcaaaaatgagatacacttacagatacagaaacatagatgaggatatccgcttaaacaagagagccaccaaggtagtaagaaattgaagggtcaagaccgtgtccaaaagggaagtgcaaaggtgagaatgacatttagcacctgttttccccttgaggcaactgccaattcataagcagtagcctaaggctaagaagctaaatagtgggaaataatgagcagaaaacagaggaccagaggttgaaaaggtgagcagaattttaggctgtcttacatgtctgggaatacaaaaacaagttcaggatcaatcaaggtgaaagaaccttgaatgagcagaaaacagaggaccagaggttgaaaaggtgagcagaattttaggctgtcttacatgtctgggaatacaaaaacaagttcaggatcaatcaaggtgaaagaaccttgaatgaaaagtaaatataccaaccctcaaaaggactaaagctcagctgtttcatcagctaattgccacactgatctgctcttatccaaactgtttgctagaagcaaaaagaaaactgtctgtgaaaaaaagatagtatcaagagttaatgtcatcaactcaataatttttcattcacatgtcaggcattcagacaaaaattattgaccatgctaaaagataagaccaaatgactgaaaatagaaaagtggaaactgtattaagaattatcaagcatgggcttccaaattacttgtaagtaactgtaattaatatgctctagaaaatatacaagatgatgaatttcagcagagggtccaaatcagtaaaaataattaaatggaacttgtagaaattaaaaataatagaactgaaattaagaacgcagtaaatgagttaaatgacagcttagacatagctgaagacaagttcagtgaattacaaaataggtcaataaaaatccagaatgagcatgaagagaaaaaacgaataaaacaacaaaacagaaaagaatctaacacacgtatggctaatggtgaaaagccctgagtaggcgaggaaagagacaattggggcaaaagtgatagaagaagagattatgcctgagaattttccaaaaataatgaaagacaccaaatcacagattcacctagagacatcatagtaaaactgtttaaaacccaaaacaaagggaaaataaaagcagctgggggtagagtggggtagggtacacattttcttaaaaggaataagattcacagatgactttgcaacagaaacagtagaactccaaaagaaaagtaatactgccaagatgatgaaagaattaccagatgcaaaatggaatgaagaaatatacaaaggggtaaatgtgaagaaaaatataaatgaatatatagattcataaaacaataataatgtcctgtggtgtttaaacaacagtataaaaaatcatagtactggagcgggcatcatgattcatgcctgtaatcccagaactttcggaggccaaggcaggatgatcacttgaggtcaggagttcgagaccagcctggccaacatcgcgaaaccctgtctctactaaaaatacaaaatttagccaggcatggtagcacacgcctgtaatcccagctacttgggaggctgaggcaagagaatcacttgaacctaggaagtggaggttgcagtgagccaagttcaccccactgcactccagcctaggtgacagagtgagacttgatcacaaaatatgataataataataataatagtactgaagttattctaaggtccctgaattttttgtttttgagacagggtctcccactgtcacccaggctggagtgcagtggcatgatctcatcttactgcagccttgacctcccagactcaagcaatcctcccatctcagcctcccaagtagctgggactacaggtgcacaccaccatgcctggctaatttttgcattttcttttgtagagatggggtttcgccacattgcccgacctggtcttgaactcttgtgctcaagtgatcctcctgccttggtctcccaaagtgctgggatgaagggtgtgtactttgaattttccaggaagtgacaaaaagaatttatatgagatgttgataagtcaggtattaatgttggaatctctaggataaccttaaataatatattctatgatgtgaaagaaaagaaactaataggaggggaaaatagaaataaaaaagagaaatggaatacaaaacagatggaaaaattagaaaacgaattataaactatcttagtaattacattatataaatgaattaaatgttacaattaagaagaaaaattatcacactggatagaaatgattgtacatcttaaaggcatactttagaaaattgtggtcttcaatggaacagaacagagacctcagaaataacaccacacatctataaccatctgatcttcgacaaacagaacaaagacaagcaatggggaaaggattccctatttaataaatagtgctgggagaattggctagccatatgcagaaaactgaaactggatcccttccttacaccttatacaaaaattaactcaagatagattaaagatttaaatgtaaaacccaaaaccataaaaaccctagaagaaaaccgaggaataccattcaggacataggcatgcataaagacttcatgacgaaaacaccaaaagcaactgcaacaaaagccaacattgacaaacgggatctagttaaatcaaagagcttctgcacgcaaaagaaactgtcatcagagttaacaggcaacctacagaacggaagaaaatttttgcaatctatccatctgataaagctctagtacctagaatctacaaggaacttaaatttacaagaaaaaacaatcccatcaaaaagtgggcaaaggatatgaacagacacttctcaaaagaagacatttatgtggccaaaaacatttgaaaaaaagctcaacatcactgatcattagagaaatgcaaatcaaaaccacaatgagataccatctcatgccagtccgatggcgattattaaaaagtcaagaaacaagaggctagcaaggctgtggagaaataggaacgcttttacactgttggtgggaatgtaaattagctcaatcactgtggaaaacagtgtggcgattcctcaaggatgtagaacccaaaataccatttgacccagcaatcccattacttggtatatacccaaaggattataaatcattctactataaagacacatgcacatgtatgtttactgcagcactatttacaacagcaaagacttggaaccaaccctaatgcccatcaatgatagactgtataaagaaaatgtggtacatatacaccacggaatacaatgcagccataaaaaagaatgagtttgtgtcctttgcagacatggatgaagctggaagccaccattctcagcaaactaacacaggaacagaaaaccaccgcatgttctcactcataagtgggagttgaacaatgagaagacatggacacagggaggggaacatcacacattggggcctgttgggggtggggggcaaggggagggacagcattaggacaaatacctaatgcatgtggggcttaaaacctagatgacggatagacaggtgcagcaaaccaccatggcacatgtatgcctatgtaacaaacctgcacatctgcacatgtatcccagaacttaaagtaaaattaaaaaaaaaaaaagttaatgccaggtaaattaggcacattttgaaatttaaaacttttaacaaaatataacggaattttttaaacctcagttaaataaaattttaaaacctaacataaaaaaggctcaatcataaaagaaaaaaaaaaaggtctgattaaatttaaccgaaaaattctgtgagattaaagatagtcacagaaaatgttaaagacaagccacatattagaagtcctatgagctaaagcattatgatcagtaagaatacaagtaacctagcagaaaaataggtatagattatggacaaaaatctgtcaaataatgaccaatatatgaaatgaagctaggcttcttaaggaaatataagttaaaacaaagagctactatctcatagctttcagactgcagaacttaaaaattctgataagactacgtgttggtgacaagataggaaaaccagaattctcttaaactgcagctgggagagcaaacttgcatatcactttggagggcaatttgaagacatctaaagtgacagagtatacacatcctactacctggaaatccatttttatttattttatatatatatatatatatatataaaatttttttttttttttttttttttttttcagactgagtcttgattgctctgttgcccaagctgcagtgcagtgccacgatctgggctcactgcaacctccctaagtagctgggattacaggtgcacaccaccatgcctggctaattttttttttacttctactagagacggggtttcaccatgttggccaggctggtctcaaactcctgacctcaggtgatcctcccacctcggcctcctaaagtgctgggattacaggcgtgagccaccgtgccgggctgaaattccatttttagacatatgtctagaatatctagcacatctgcatgaggtgacatgatcaagaatgtacacttgcagcactgttcaaaatggcaaaaaaataacaatttaaacaatctttagtaagggaactggtaagtaaactgatatgacactaaacagcattatgttgagtggaaaatcaggttacaaaagattacatacataaaacatcattaacataatttttgttaactattatacattgtttctggataaaaacacatggtaaagtataaaatcttaaacaggaaggagtcacaccaacttcagaattagtacgttagctctagggaaagaaggaggagaatggcgccagggagaagtacaaaagagtaacattttatttatttaaaaatcagaagcaaatatggcaaaatagtatgtgaagggtacaagggcatttatattattatttttctgcatatttgaaatatttttaattaaaaagaattttaatgggcacatatggtataacaatcaaataataacattaattacttgcaccacaaaaatgtatcaaataacaacatattatttaagccacagacacttatgtacatacattggagcatgtgataaaagagtcaaaaataaattttaaaatttgcaatttactttggggttttaaattaataattttgctaatctcatgcaattttaaaatgtccttaagctaaaattttaagggctgtaatccttttagttagagttgtcaacgctgtacagatgtggtattctgaatttcagtcttatcttgtaaagctttttctttagtatataaacagttaacaagctttacaattatacttacaagtcttaaagaaatgtattaagagtcctaagtatgaagaacagttatttaattataactacttaattatagtgtttcaccaagaatctgatgccctaatactaatgtggaaaaacaatgctccattattccattttcttttctgcttggggtttgggccagaagccaagatgtaccaatactggaaaggttttaaacagtcttattataaaaccatttttaaaggaaaagtaataactttcacggggagtaacacaatcctttgggattactatgtcagaaagagacatagaaagatagagaatattttaagaaaagggttaacgaggtagtaaaattttgctatctgtacttcacttactgaccctcagaggctcaaggctagaagacaataaatattttacagtaaaatgtaggaggcaaacaaaactgggcaggacactgcatctataaatataattcgagagatctataactcacacatagtacttcactctcaactataatcctctgaccacattcatactatttcaatagtcattttacccagtagatggaaagcagtaattttatttatcatgaattgctttttgccaattaaacatgtgcaacagagatgattagctggtctctcaagtaacctagatattagatatgctatttccatgtaatggaagactgcaataaaattattccaagttctaaagttccacacttttatattttgggcacaatttttaagagtggcaaaaggcaggttttcacttactccacttcagcctattatactgaattttacctagtgctaaaatccttaactttcatttctgaaggctgaaaaacatttgctcccccaagtctcttatttagtataactttggctggtaagaatagctcagtttgcttccaaaattgaaagtctcctacaacatttttaaatgttttttttttccactgatctttaagtttcagtaatactcatttatttcttccctctcaatagaaggataactaccactccgcttcatgaatgaaataatcaaattactatttctctcaaattctcaccctctagagactcgctcagagtgataaattcactgacaagtttacaattcaaatttcactaatatatagaaataattctcccacaagcaaaaaggtcagcatcaagaatttaattttctgagtttcataacccttgataaatggaggcaccttaaagttcagtttaaactcttttatataggatttcagagcatgcctccagatatcttaagacaagccgtattaatagcttagtgtcatttttatcattaaaataatctacaaatatcagaatactaatttattgtcataactaataaataaggcttaaaatatctatagatgtaaatcagctctctcagttcgttttgcttcacttggactattctaaaacacagatcaacaaacggaatgggtttatcaataatatagttgtgcaatcttttcacaaattccaattctgtaatttaggggtttttcatatttatttttaaatatacaaagaaattaaaccattaatagaaatattttctctcaaatatgtaatattcttttgtaaaagaaagtttccaaacatttacaaagcaatctaaagttaagtaaacctgattttaggattattacattaaccaaaataattttccagagaaggtcctatttaaaagtaatgctcactggcttccccacatccacactttcagacggatccaaatccaatgcctttgtttgatgtacttcagggatcccttccagtgaaaaaaatctcagaaaaacgtctcacgacacagtggacaagtggatttgttgctagatgtaaaccatttgtactgaaaaagaaaaggttttaaatactaaaagaacttttaaagttctcctctaacatacatcataaagtacacatacatctatagtaaccttcaaatgataaagtgaaaagggaagaacaataaaatttttgctctttctgttatctccaaaattaacacaaattgagtattacttccgatggctacactaagttcttcctacttaggctcatgcacacaatcactaagatataagaaatctcctgtgaaacaaatgaacaaatggcaacttctttttcagtatgtttaaaaagagcacagggctctgatgccagatggcttccagtaccaactcctgtactctccttcatggtctagatctcagaagaccttctacttcttgagtggtaaaaggtcactggaaacacccatttattagagggccttgattctaccagtctcagtaaactgctaattatctttggcagattttaaaaaatcactttttaatatatctcccattagctacaattaagtttaacacacattttctcttccgaagttagacattgtgtaggtgtgtgtgtgtgtgtgtgtgtgtgtgtgtgtgtttatgtgtataaaatacataaaatataagtaagttaatttctctttagacttaccaagcaggctgaatggaattttttcttgcatgttctacaggcttttttgggaagggaatagttgaaaccgtgaatgactgagaaacagatcatgcaatcttcaacaccctcaaaacgtttgtctacgttatttttccataaagctaagccttccataatacttccattctgttaacaagaagaaaaataagtcactacacactgataaccaccaattttatttttattcaatttcacaaattttaaagttgaattacaattctgaaagaagagaatctgcttggctatgttcatgtctcccaacttatgaatgttggtttttaaaataacctcccaagtttttggaaccagatgtaatttttctccattaaagacatactttaaaggcttctggaccaatacttaaagtgttatagtctaagcttgttgcttgataaaactctcttaataattaaatcatttaggttagttctaatgtttaactgaaaatgatgaaattatctcaaatgatttgttccagctctacaatattggtgagcatatttgttttaaaatagtttttcttggccgggagcggtagctcaagcctgtaatcccagcactttgggaggctaaggtgggtagatcacttgaggtcaggagttcgttgaccaccatggccaacatagtgaaaccccatctctactaaaaatacaaacaattagccaggtgtggtggcgggtgcctgtaatcccagctactctggaagctgaggcagcagaatcgcttgaactgggaggcagaggttgcagtgagctgagatcatgccattgcacttcagcctgggcaacaagagcaaaaactcttaaaaaaaaaaagtttttctttattgtagaatgcctgagatacacaatgtgcacacagaactgaagatttaaaatgtgtttagaggtcaaaggtctttgagggtcctgggacttctctaaccaaagaggagttgaaatgtaagaataaaagtgaaagtagctcagaaggcattcatctgtccagtatctttcaaaacatcctctccgaaacaattttgttaatacaccttctacagtgttaatgaaataaagtcaatccctctcaaacaccagaaaataaattacagaaccttaacaattaaaacagaaaggcaggtttaatccatttaggcatatctctgtatttatccaaggaagtttaatatctacttttatcttaagcagaaaagatatattttatgtttaaatgcccttttaaatagatcatcttttccaagtttgtaaagccaaatgtgtaaacagaaacttacctgatgggtgaggtaagtgcttaactgcagcatccagttccgccactgctgaacagctactcctactcttttcccactttctactattattgaacccagtggataatttgaaggcagttgtattataagttcaataactatgtcctcaatagtataagtagccattacctctcgagtagtagctcgagctttaacctgcaatacaacaaaggatattttgtttgccaaatttctgtctttcaaccagaaaacattttgataggttgactattaaaagctaaagacttcattcaaggacagtgcaggtaaatacattcacttatctgacatgagataattaagaaatacgtttaaatacctgcctggtatatttttacagtgattttgtgatattcaaagtttgttttaaaagaaattaattgctcataaaaaaggttttattatattaggcttgtcacataatagttcaataaaccttgaatagataagtgacagaatgggttattatgcttctcttccacacccagagtatcgaatgtcacttctacatctaacaattcttcctctaccatattatcctcctgagctttggagccaactatcaactgtcagaacatttatagttatttgtttggttttcaaaccaacattgcaaactcaacataaaacgcacacattattatcctttacaaacttcatcttctgaatttcctacttccaggctaaaaaatcatgatagctcattttaaatttctgcttctacctcatcctagatattaactaaatcactagcacaaaatctctcacatccctacttttatattcccactgttactgcctcacccatgccctagtcctttgctcatgtctaccccaatagtctcctctaccattcatttgaatccaaactgtttgccaacagatcatgctatagattgtggtcagagcaatttcaaagattttaactctgatcatgctactgcctgaatgaaaaatgttcagtggctgaattgtaccactttagaccgttatttgaggcccttcccaacatacctcttattcaccgttgattctattcacccttgggactcctacgcattatttgggttggagtactgcattatttatcatttcctgggcaacgactgaaatgacattctcacttctatgctttttgcttttgcaatactattctctctctctctctcttttttttttttttttgagatggagtttcactcttgttgcccaggctggagtgcaatggcgtgatctcggctcaccacaacctccgcctcccgggttcaaaaaattctcctacctcagcctcccgagtagctgggattacaggcacgtgccaccacacctggctaattttgtatttttagtagagatggggtttctccatgttggccaggctggtcttgagctcccgagctcaggtggtctgcccgcctcggcctcccaaagtgttgggattacaggcgtgagccaccacactcggcctattttctttatagtaaatgccattcccttcattttccccataacaaaatcctgcccacctccaagtgattttcttccataaaatctcacttaatcccctcagccagatgaatctttcccactcagatcacaaggcactctttctcttaatatgctactttccaatgcaaaaataattatcagtctcgctcttttccctttattagactgtatgttattacaggacaagaatctggtcctactaaactgttcatatccttggtgactgggacacagtgcttggcatctgtaagtattccagtacagattttgaatgaactaatgaatgctcaaaaactatttggtgggtgaaatggtttggatctgtatccccgctcaaatctcatgctgaattgtaatcccaaatgttggaagtggggcctggtgggaagtgattggatcatggggatggatttcccacgggtgctagtctcgtgatagtgagtgagctgtcatgagatctggttgtttaaaattgtgtgacacctccccgcctctctccctcctgctctggccatgtgaagtgctgactcccatttgccttccgccatgattgtaagtttctgagtagctgggattactggcgcccgccaccacgcatggctaatttttatatttttttagtagagatggggtttcaccatgttgcccaggctggtttcaaattcctgacctcaagtgatccacccacctcggcctcccaaaatgctgggattacaggcatgagccactgcacccggcctaaacctcttttctttataaattacccagtttcaggcatttatagcaatctgagaatagactaatacagtgtgtgaatgaaattataccactgtttcaatccacgcatgaagtaatgttgagatttgacacacaaattagaaaataaaataggctggtcttgaactcctgggctcaagtgatcctcccaccttggcctcccaaagcgttgggattaaggcatgagccacgactcctggccaccagtttctataaattctgagttaagagctacagtctgttatgatattaacaatgacagacatacccaatattaaaacaacttttctagagaaagtcaagacaatactaaccgtcatgccattaaatagttgtgtacttgtttgtacagaagatatttcttgaaaagaaagaacactgctgacatacttgcttgtaaatctatccacaatattgaaaacacgcttctcactgctattccaccacaacctaaccatggcaggcaagtcttttaatgtcatatgatagactgaacaagccaagtgtggaatgtggtatggaagcattgttgtttctgaggaaaaaacaaattattgattagtaacatatatttcttatatagaataacagactaatattagtattttctttagaaagtgatccttaatttctcaacaatagtgctatagctcataaaaacaaacataccagagaaaccagaactctggagtatgagcatctttccacacattcaaaatgaaccataagaatggcaaaagaatttttttttaaagtgaaaatcccgccgggcgcagtggctcacgcctgtaatcccagcactttgggaggccgaggtgggtggatcacgagatcaggagatcaagaccatcctggctaaaacggtgaaaccccgtctctactaaaaatacaaaaaattaggtgggcgtggtgatgggtgcctgtagtcccagctactccggaggctgaggcaggagaatggcatgaacccggaaggcggagcttgcagtgagccgagatcacgccactgcactccggcctgggcgacagagcgagactccgtctcaaaaaaaaaaaaaaaaaaagtgaaaatcccaattgacactgaaaaatctacctagaaacagatttctgtatttaacatgaagaccacaaataaaatagaatacacatattttaaaaagaaggaaaaattaaagatgcttgctgttataaattatgaaaaggagtttggcctcctttactttccccagagcttgctgaactgctgtgcagaagtcttggaatacccaactcaatactcacaagatgcagtccatcctcagatctccaaggcatttaaaaaactcatattcttagtaaattgtttccaatactgtagtacaaccagatacatgcatatctgtcctctcagctcacatgtgagctcccagaatgaaatgttattcaactttatttcccctgatttatatgcctataaaatgttatcacgtaagaaatatttgtttacagagtcaaaagttaatagtctcaccacactaagcttcaaaaatgtattaaattcctcacagtcttatgggtaaaaactaattattcatcctatttagagaaatatggaaaatggtcaatttcaacattctcatagccaggacccacctttggggttattctccacattctcagggaaaagtttaattcaacctagtctgaatctagtgtccaagaaagaacataaacacatatcttactgacctctaatactcagctggagctcctcagtaaagaatgttttagggtccttatttgggacctcaactgctgtctctgcataggttggattttctggcataagcctgaacaggtgatagagcaatttattcaaactctttgttttccgaagatacatggaatacaaagcccgaagctggtggagagcaaagaatttgttagtaaaccaaatacaccaagacaattggtataaaagaacaactcaaagtgtaacaaatttcctttcctcataaactagcagacattctatcccctcattattgtaacacatttctaatatctttctcaaattgtcttcctgtattacaatgcactcaccttggcttagaatgtctgagacaagaaaatctattcaccattcccacagatgactccctcactctcctcccaagtcttccatacattccttccacaccattgcccttaacctttcaaattcctgcttaaaactaatcccatttttatggctgacctcaccctgtatcaaaaactccgacatccctttacgacagagagcacaaactagtggtccaaaatgtcatgggggtcttctcagagttgttttttcaatcaggaaatttcacataaaaatatggatttctgatttctcttttaaaaacagaaaaacgagccaccagtgggagcactgcaggtatctgtgtgagacctgtacttcacaactcctgctttccctccataaagtagcttgcattttccacattgactttgcagttctttggtatctgtattggttttaagataatttctactatatcacatatctcctcacagtacaaagatatcattttctttcccttttctttttaaaaaatttgtatttttaatttttgtgggtacacagtagatatttatggggcatatgaggtattttataggcatataatatgtactagggtaagtggggtattcatcacctcaagcatttatcctttctttgtgtaaaatatagcattttctgaacactatgaatacttaagtacaaggatcaagtcataggatttggaattgatttttaaaatatgttgaccaaagtgctcttatcatcaaacttaacatcactaatgaaggatgaacatcccaaatctgaaaatccaaaatccaaaatgctccataatctaaaacttgttgagcaccaacatgatgcttaaaggaaatgctcctggagcatttcagattttcggatctgggatgctcaaccagtaagtgtaacaaaaatattccagaatctgaaaaaatctgaaatcagaaacactactggtcccaggcattttggataagggatactcaacctgtaaaagaacacaatgacattatatggctcctgaggtaagacactgagaacacataacaacttgtgcagtaagtactattgctaaaaattaaccacaatctaatgaggaaacgatcagacaaattcacattgtatgacaggctaaaaacagctggccaaaacaatgacaagaaagaaaagaaaggtatagaaattataggttaaagaaactaaagaaatatgacaagcaaatacaaacatgattcttgattggatcttcaatagagaagaaaataaaactatagagatattactgggacaactgaaagtatctaaataaaaattagatattattgcatcaaaattaaatttcttgagtataaaaattatattatgcttatgtagaaacatgtccgtgatcttaggagatatatgcttaaatacttttggtaaagcatcaaaatatctgcaacttactttcaagtagatcagcagaaaaaaagtaaatacagagaaagtatgtgcaaatgtagcaatatgttaaaagatgtatgtaacttttttatctaaaagagtatgtgattttccattgaattattcttccaacttcattgtttaatttttcaaaacaaaaagttagagatttttaaaaaattaatcaccaatatcaatggacttttaaaaacacacatatacgacccagcaatcccactccaaggtatacaacacaagtgaaaacatatttcaacacaaaagctcgtacacgaatgttcacagcagctttattttcaatagccaaaaaaaaggaaacaacctaaatgcccattaatggataaacagatagataaacaaaatgtgatagatctacaaaatggagtattattcagccacaaaaataaatgcaatacttatgatacatgcttcaatttgataatcttgaaaataatatactaaaataaaagccagacacaaaagaccagatatgtgaaatgtccagaacaggcagatgcatagagacagaacacagtttaatggctgtcaggagctgcggggtttgagaggaaatgggaagtgattgctatcaattacaatgggatgttgaaaaggttctaaaattatatagtggttaacagttgcacaactctgtgaatacagtcagccctccacttccatgggttccacatctgagaattcaaccaatcgcagattgaaaacatttgaggggcaaaaaaagtgatttaaaaaaaccaatacaacaataaaaatactaaaaactttaatacagtatagcaactatttcaatagcatttacactgtatcagtgataactaatctagagatgattttaagtagtatacaggaagatgtgcataggttagatgcagatactatatgccattttatataaggaacttgagtattcgctggggtgggggtcatgggagggagcctggaaacaatccccagcagatatcaagggatgactatatactaaaaacaccaaactgtgtatgctaagtgggtaaattttatggtatgtgcaatatctcagtaaagctttataaaacagacacaaaaacatacacatgtacatatacaactttttccagttcaatctgatttgctagtttttttgagaaaaaagttaacccatgatttaggaacatttaaagttttccgaagaaaaattctgtttatttcaggattcatctaattagtattacttagtgggttattctggtttatctgcccacagctcagttcaagtttcagactcaataataataaatgctgccgtataattttgcaccctaacccaatcccagcttaatgaaaaaggtgacacatggccattttcctaatttctgaatataaaatgagaacaaaactcttatacacaaatgcctcaatctgctgctattttttaaagatcaacaatattttaagaaattgatgtaaaagccaaataaggagctcttgaaatatatcatcagcaaataaaactagcttaagtcacaaaaataagtgacaggcctaaagagaaaactaatctatttaacagctagatcaatgctgcttctgtgatttgacttttccccacagatatacaaatgcaaagatgcaaaaattgatatctttgtaccagggtatagggtatgagcaacaacataaattataatttaaaaattccaaaaagtcacattggaaatgaatgccatgaatacttaatcacactaaatgataaactaaatctttttgtattgacctgtcaaaagaaggcacatattttattaggctaattcaatcaaagattgacagagatttggatcttccttgttctttttgagacagggtctggctctgtcgcccaggcttgagtgcagtggcatgatctcagctcactgcaacctccacttccccggctcaaactatcttcaagtggggatccttctaacagaaaaactagagagatctttccagtttcttcttggacaaggtcttacttcctaaacatgagacaacagagacatctagtggctgctagaataatttggacaaaatatttcagatattttcaccacttaggtaacagtttgaattattacataggtaatgtttcacagatctctctccaaacagtgattttcaagtaaggtaaatttccaatgatgtattaagttatatctccacaacagagtgacaaactgactccctccgaaaaaaaaacaaaaaacacaagatccaattcttttgaaatcattactatgatagtacaaaattaaattatataaatattatttcctgaaataaaagaacctggtgactacattcagttagaaaaaagttgatctggccacctatcagagtaattacttttgcttggaaggtaaggtataagggacaggagtaaacttattaagcagatggaagttagttggataaaatgagattaggctgggcgcagtggctcatgcctgtaatcccagcattttgggaggccaaggtgggtggatcgcttgagctcaggagtttgagaccagtctgggcaacacggtgaaaccccatctctacaaaaatataaaaattagccaggcatggtggcttgcacctgtagtcccagctacttagtgagaagatcggttgagcctaggaggcagaggttgcagtgagccgagattgtgccactgcattccagcacaggcaacagagtgagaccctgtctcaaataaacaaaataaaataaattttaaaagatgagattaaaacataaggattttccttttattaaactgaaaggaaggtatttagaacagtatcagaagcatattaggacagaactatcgaaagttgtcacatatttatttacctgtgatgatgcagctttgaagaaagttagtattaatttccaagtgagaaggtatcccagaacataacagaagtcttcactcagtggtttaatagtaactatctgtccaacaggaatacaccccaaaacattttctagtaagtcctcttgaatgctaagaagagacatcagtgctgctggtggtgacctaagaatcaatgattaaacaccacaagttttctttataattcattccttaacaaattgacagtacttgtaaacttcaagcattttagaaaaatttctctgttttccaaaaaacgttttaaaaattcccctctattgagccaattttaactcctaatctcacataacagtaaaataaaaaagacatattatagcacttgaaggaaagacatttttagaaaacgtctctttcaattttctaagtgaaaaaaaatcacacacccagagaagccaaatgatgagtccaacgtctttcagttagtaggggaaactgttagggattctaaatcctacccggccttttatcatcttataaaagacaaagtgaagattaagacttcgaactttgtcacttcattctagtttctattttattgcatattatctacttagtactattaagaaatatcacaatgatactattaatcggataaacacagaaaataattatgtgcctgtttaaaaaatcatgattgtaatctttttaggaaaataaatgtaccattcagattaattcacaacaatgtaagttaattttcttctttattgaactactctactcatttatactttcaggtgaacttatgagattctcaaaaagtaaaatacttaactctcttctccatgatactctagcctggttctctcctttcacttctgtgatcgttcttcccttgtggcttccttctcccagcccacaagtacaggccttctccaaacttctgctcttaggtcttttccttcaacacctccatctcatgtacccagccttctatattccatactgatagtcactagatcttataaaataccagctccaaaatctctccacttttcacattgccctccatgcattgttatttaacttctgcaatcagctccacctctgcttgcttctttttacaattcatgtttcacattagtgtcagaatcggctggtggcgccctatctcctaccaagtaatgaccaaatccccccaaaaaagtcatttttaaggccatttattataggccaggaagcattctggcctacagcattctagcctatttctctctcagaaataagagagagaaattcctgccctcacagaacttacattccagtaaagaaagatattatcaataaaactatacattaagtggtaactactcaatattccccaagcacatcctcacattcatgactcagtgcctttgtacatgatgttctcttaacttatgttgtctttcctgtcctgcagaaatgctacctaaccttaaaggtccagtttaaatgcctcttcctcaaaagaaagtcttcccttcctgatgtacattaattgtgccctcatacatgctatcttatataggcctaactgacctttaaaaaaaagttatctatcctttttcttagcacttatcatatactatattttccataacgctacagtatcatctgtatcagataaattccttaaggaaaagaaagtgctcactaaacactgcatattcccctcagcatttaattaatactctgcacaaagtggatgctcaatagatacttgaaccgatacactctttccacagccaccatatggccaaagatagttttactgaacagtagcaaacggaaaatgtgatttaagaacaattaagagagtgacacaatcttttgggtgaaatctatatttcatttatatcttacagataactaaaaagatctatctgtagaatgaatataactctatagcttctgtgctgcttcagtcctctaaagacattataagtgagatggattataagaatttaataaaacaaattatttaaaaaaaccttacaaggctggctcttcttcttcatctccgtatgactttagattatcctgatcatactgtggtaattcaggcatcaatctagaaattagaacattatttttaaatatgtgatattaaactgtttattaagtcgtgctcaagagcagaaagaccaatacttattttataatgagtaaatgttttaatgagttttctttaaaataactactatagccaggactattgaaatataaattgtgtatagagaacaataacctaaaagatgaggcaacttagggtccctataagtgaagcagtcagatctccttcttttaaaaattttactttaaataattaaaagtaaaaactaagcatatattctatttttttagaccactgtaacattgattcaattggatgaattcttacttgtatagcatatgataaacagcaatttgcacaggcctagctctgaagaggagtaatggggccaatgtatttaacaaagtctggagatattctggtaagtttgttttttggtcagcaactaatcttgcaggaagtttgtgactcaatagctgttcctttgagatatacgttaatgtttcacacatgggtttcagcattgcattctgaaaggatgtttcagacacatctttgttttctcctaatgacaaaaaggaaagaaacatgcacgtctcaaaagaaagttagtatagcttaaatgattcacaaacaatcaaatgtcatttaagaaaatgaaataaaaactagacataaacaataaagcagtcttaactagaaacatgaactgaatatatattccagttaatctcaactgttttaatgacttttatctgatccagcaaatgttcaatagcaaggttctattcacatcatccattcatgttatctgaagtattattattttaatttgcaacagtcattggataccttgccatttttcaatttctgtctgtaaagtaaagcatagatgatgcttctgagaagccaagctttctcttctggctttttcttttactatttagtattatttgatttaaacatcaaaatttttgcttttgaatttttcagtaagtcatttccaatgaatcaatctcactattattccctttttcacttgcctgtaacagtcaccaaaataggtaaaagcaaactgtggatgccttgggaaaaaaattctttccattcactgattagatttacaggaagattgccaatggtatccagagttgtggaatcaaagaaagcactgaggtcacaggccaaatcacagctgacacaggcaaacagttgcacaagtggaatagaatacaatgcctgattctcacttgttgtctgaaaaaacaataaaaatgaaataggtaaacagacttctaccagaacactacaaataaagccaatataaagaaaagccccactttcatttctttgaattttaaaacgaaaagcagttgaggtgtgtaatctcaggagaaacataaaattttacatcaaaataacttttttcttcaaaattaaataccatgaatagaatcattaataaacaatttattctcaagtaccctttttaatttctaacccatggaaggaaacactaagtcagacacattaaatacacatttataatcttctcagtagccctacaagttgtaagttattattttaaaataagaaaatcggccaggcacagtggctcatgcctgtaatcccaacactttgggaggctgaggcaagtggatcacatgagggcaggagtttgagaccagcctggccaaaatggtgaaaccgcatctctaccaaaaatataaaaattagtcgtgcatgctggtgggcatctgtaatcctgctatttgagaggctgaggcacaagaattgcttgaacccagaaggcggaggttgcagtgagccaagatcgcaccattgcactccagcctaagcaacagagcgagattctatctcaaatttaaaaaaaaagaaagaaagaaagaaagaaaactgagtctcaaatagtttaagtttaaaactctaagtcacatagctaatagcaggcaaagcagagattcagaccaatccaaccctgactgacttgctgccttggagcccacaagtaatatacctctggttgctttgggtcaaaaattacactaattccctctgaatctgctactatttaatgcattactctcacaatattcacacagtatgttttagaaataatctaattataaccaaaaaagaccaaaataattgtcattaacagataaaacctgaaagggctgtgctgcaaatattacaataagctaatggagaaggcattttaataacaggagatttggtcactgaatgatgctggtagtcattaaaaatctatcattttactattctgtcaaatagtagctggtaagaagaacatctataaagtgttttaaattatacaaaggaaccaattacaatcatcacttaaagaatgagattagtaaatagttctgatgcaaaagtatgtacaaaaacccacaagaggtgatgacatatcgggttaatttacctccaaccaagccaacatggagcacatgatgaagtcccactcactctctgccaaaggggatgagcagtatttcagaaatagggaaagaaaccggattatttctatatttacacccagtacctctggacttgcttctgatagattactgtgataaagataaaaacaaaagacaataaaagattatattgacattcaattagaaagtatgctactttaaatcttacatacttatttataactgacttaaatgtctaccataatttctctacaaaattgtgacacagatacgtaatctttgtctgaattgtatactgaaggaaaaacatagtataaagtatcacctaccaactgaaaagaaaaatatcttcatgctctttcttccaggatattatgatttttaatattccatgtaatagctctccatcatctatacttttggtttgcagacaagaattgaaaatggcaagatgtccaaaacctcctaaagtaaaattcaaaatgaaaattaaaaatatttaagaactatatcgctactattaaaaaaaagtccactttgagaagtaaaagactttcttgagaagtgttcaggttaagaactctaataatgacttttatctaagagtcaacaaatgagcttataagctccaaagggcagagaccctgtctccaaacccagcacctagcacacaatagagaatttgggggaggagaaagagtgaatgatgctgtaatttaaactgacttatgctgtttttgttttggtttcttaagtgcaggacatattcagcaaactcatcattcaaataaaaaaaaccctacagctacagagtagctggaaacagcaaatggaaaatagaacatactgtttcataatttatacattcattcactcaatagcagctagtacatgtggtaaactctgatgtggactcactctttagaatctctaccattcctcaaaatccatccactggtgtatcttaacaccctctgtccccaaccttctatcttacataccagccaaaatgaacaatctgtacccttgtatgtttttgtgtacctggaatgcccttccccaactatgtccatatggaaaactatttatccttcaacacccagtagaaatatttctctttgtgaaattgccactaacaccctcaaagcagagtggaaactccttcctttctgccacttctatacatagcacatctttttgctacatcggttatcacataatacaactttatgtttgtcttctctacaataggaactaccatgtagcaggtgctcataaatgtttattaaattaataaacaaatgaaaagtgcagtgttttaaatacaacagacgctatttttgcctttatatgttcaatcattgattggctagggagaaatgaggcacagctttaaaaagctatagatagaaaagaaatggttagaaggtatttctgggcgtaagtcttcccttaaggcccagcatttttgtactgtaaaatggtaacagccactgtctaacaacactcatccatataatctcagaacaaatcagctgtaattcaatttacctctgctagatgtggtcttatatattagaaacagttcttcatctcaagcaataattaaattaatgaaatatttattatcaagcaactaaccattagtgctgcaaagatctttcttagtccagcccaaaagagcaggtatacattgagcactaaattctttcttttcttcttttgacaaaaatggacatagactttgaatggtatgcaaattgccttcagttagtggaaaaaaactgtttaaagaaaaaaaaaacacaagttagatttcttccaaacatacagttattttatatatttcttttatttagactactgaaaaagatagatgaataattctatcacatataattacataaaaagaaactatgatagatttaacaagtgctgacttgatgaaattggttttttttgctccttttctcttttctgcataaattttttaaatgagcatatataacttttccccatatatgattttttaaaattatactagccacatgacattatgtcctcttttaaaaaaaaaaaagagtcaattgcggggtgcggtggctaatgcctgtaatcccaacactttgggaggctgaggagggcagatcatgaggtcaggcgtttgagaccagcctggcgaacatagtgataccccatctctactaaatatacaaaaaatcagccgggtgtggtggcaggcacctgtaatcccagctactcaggaggctgaggcaggaaaatcacttgcccctgggaggcaaaggttccagtagcttgagattgggcccctgcactccagccctggtgataaagcaaaactctgtttcaaaaaaaaaaaaaaaaaaatagagtcaattgattcaacttaaataaatagtaccagttgtgtgtcctttcttttctttctttttttttttttttttgagacggagtttcactcttgttgcccaggctggggtgcaatgcacgatctcagctcattgcaacctctgcctcccaggtgcaagtgattctcctgtctcagcctcccaaatagctcggattacaggcatgcaccaccatgtctggctaacttttttttttcatttagtggagatggggttttaccatgttagtcaggctggtcgcgaactcctgacctcaggtgatgcagccatcttggcctcccaaagtgctgggattccaggcctgtgtgtcctttctttgaactgatattcgtatttgtgcatatatatagttgggttttattcacataaaaaggatgacactaaacatattgttctatcatttaccacttacatatactttctgtcagaacatataaattattctgttttaaagctacgtaacaaaaatgaacaaaatctacctaacactccatactatggaggtatcattatttaactatttccctatcagtgaacatttaggtttctcccctccccaaatttttgctgtcacacataatgctgcaataaatatccttaagaagatactattctgtgtatgtataaacacctctttaggctaaattcctagaagtggaattgaaagctcaaaggatttgaatgtattatatgttggtgatctcaaattgcttctgaaaacacataatcaacttatactttcaccaaatatgcacaggtgtgactgtttagctgcacatttaatgaatctttttgattctcggcaatatagtggataaaaccattgctcttaatttgtacttctgtcattattagtaaggcaaatcctttcatatttcacatttcagtattgagctacctttgaccatttcatctatgaattgcctctttaagtctttgataaattttccaatttggagggttttactgatttatataaactatatgtagatagttttttgttgatttgcaaatgtcatctcccattttgtcatttgtccctgtaatctttatattttgtcgcagttttcatctttcagaaatactatataaaaaattttaactgtcataaaatacacataaaattaatgtattagccattttaaagtgtagagttctgcagtgttaagtacattcacactattgtgcaactaatctccagaactcttcattctgcaaaactgaaactctacccactaacacgaatgctccattcctctctcaccctcggccccaggcaaccaccttctactttctatccctatgaatctgactactctacagaaggaatcatagagtatctgtctttttgtaactggcttatttcactcagcataatgtcctcaaggttcatacagactgtatgtagcatgtcagaatttctttcccttttaaggctgaataatatcccattatatggttataccacacttttatttatccatttatccactgatgggcacttaggttgcaagttttcatttttacagaatcaaatatatatatatttacataaaatgtaaaggagaaggtctcagtatttttcttccaaacacacaaccaattttcccatcattattatttactcaccacagtgatttgaaatgccacctatattaaaaactaaattcacatttatgtgtggataggtttctggactgtatccactgatttgtctactcttcaatttcatactgcttaattactataattcaataatatatgttatatttggcatgcagtctctttcacttttttcaaaaatttcttatttttgagaactttttccttcaaatgtatactatgttcagaacagtttactaagtttttcaaaaactgctgaaattttgattgagatcgcactgaaattatagattgacacaatcatttttacaatttatcttcccaccttcttttgtgatctttattcaagttttataattgtaattttttgttaagtttatttctaagtatttatagtttttgttatcattgtgaatggaatcttctttttctcccataccattttttaaattgattactatgggtaaataagaaagctattcatttttgtgtggtaaatatacatccatctccttagtaattagttccaatagttctttagctaattccgtattacttttataatcagaaaaaaatgttaattatgctaaaaaagctaatgtcaaaaagttacatacagtatgattccatttatataatatcattttttgtcttgttttgagactgggtctcactctgttgcccaggctggagtgcagtggcgtgatctctgctcactgcaacctccacctcctgagctcaagtgatcctcccacctcagcctcctgagtagctgcaactacaggtgcacaccaccacacctagctaatttttgtatttttttgtagagatgtttcgccatgttgcccaggctggtctcgaactcctgggctcaagctgtcctctcactttggccttccaaagtgctgggattacaggcataagcctccacacctggcaaattccatttataaaatattcttaaatgacataattacaaagagagagaacagattagtggttgctagagattaggacaatgggaaggggaagggaggtggctgaggctatatatggataacgcaagggatcctgataatgaaactgttctggacttgactgtggtggtggtcacagatgtgagctacacagaacacacgcacactctgtctctcacacacacaaacatacacaaacatgtgcatgtaaactaagtcaactgactgtatcaatgccttttccttggttgtaatactatgctaaagttatgcaaaacagtaccactgggtagatgtatgatttattctttgtattacttcttacacattcatgtgaatctacaattacctcaaaataaaaagttttttaaaacttttaagataaaaaacagtcaaaatttaatttagaattctactatgccagaacatgtatctatcatttcagaattcttcttggtaaatcagtaaattcaaaatgcctcttggtaaatctcagctaagtattaatttgaatgctgagcttcaccagcacacccaaacccacaatctacttctttgtcttaagaacagacacatttgttacatttctagaatatatttcaataggatgatgttatttaagagaagagtaactttccctatcacttccatatagcaaataaagtgatggaaaaagagtattaggaaagggcaaaagaaaagatttctatcagagagatttctggggaaaagaaaacaagttcatgaaatgctgttggcttaaaaaaaaaagtacagtataaaattctacaacaaaaggctatagagttaaaactatttactttaaaaaaaaggtgtcggccagacatggtggctcacacctgtaattccaggcctttgggaggctgaggcagcaggactgcttgagcccaggaattcaagaccagcctgggcaacctggcaagacaccatccctacaaaattaaaaaattagccaggtgtggtagtgcacacctgtggtcccagttactcaggagggtgtggtgggaggatcacttgaccacaggaggttgagggtacagtgagccatgttcgcatcactgaactccagcctgggcaacagagtgagaccctgtctcaaaataaataaataaataaattcaaaggtatgtccctaacctaaaacaatttaatttgccttgaagtcgttaatttcctcatttcctaaacctgttttcttgattcattagaaattattcattaattaggggttgccaaagtgaccgattacagtaaactacaaagtaaaaacattttaaataagaatacctttcttttctcttataatgtggttttacttcatcagatgaaatgcttcgggaaaggatcaacttagcaataataagagaccacagtgtgccatgttctctggacctgaaaaaggaaagaaaaaaattatattccgttttgaaagcatactgaataaaatgtttaaacactggctagctggattccttttacagaattaaataaagcaccttgtgatggcatcaattcacctaagactttgcacccaagcaactgccagtaattatccaaagagctgagagtttcggctttcaacactccttcaaggctggtattgagctctctcatccctaggcaactccacagtctcttcagtcccaataggggagatgatcttagagattaggcttgaagaccagaggctgtagctgggaaaaagacatctcccagaggacacctaggcaggcttaagttgaacaatcaaagaggttctttggttctgaggaaagttgtgtcaactaagtagaatgcgattggaaaggaagcctgggtcctctgatacagcaaagcatactcaaaatactatcggcaagtgataaactcctaaaaagaaagcagttcaatacagtaatttcaaaaagctaaacatcttactactacaacctctacaaggactgttttcatacctgccttcctaatctaggggagagggctttgtggtcataacattaagacacacctataacaacatgtaagataaaggatgaatctgagagcactgggaggatgagtcacagataaatcaaaacaacttctacaagcttctacttcttttttgtcatctgacccttgtatgtatttatggatttaataagacaggcagaatacaaatatcttcccctgagaaggttaaatcaagtatttagaattcataaactatttattattaagaataggaattatttagatcaatcctctgactgaaacattagcatgcagtagggttacctcttacagaaggcaaagccataaagaagtagcatagtcattttaaaaacaaattgaaagagattcttacctgttaaataacagctgcaaaaggcccgacgtattaccaagtacacgtaagttatcatacgtaatattcattttttgaagtatttcacaaaatccaattagaaaaataggtgggttatctaattcttcacaccactgcagtgaataaagcagttctgcaactaaaagaagagacagcaccaaattatgaaaagcactctgtgaacaaacccttcaattactttcacttctccaccttgttttctaacactgttgtgcccactcatctcaaaactcctatgaactgatttttcaaatctgctttgagatgttcaaggacaatgaaaactgagaatatatgtctgatacaaaataccacccttttcccaaattctacttggtcctttttctaattagttaagaatgtgacaagaacctaagttactagagatactgaaagaatcttcctaccattttggcacaattggtaaaaagttccagacaggaaaaacaactaagggacccaagacctgaggtgagaagttcatggcaaatgggagaaatgggagacagtatgatacagtaaaaggacatgaggcctcaattacagattggggtggattcaaatctgcatctctctctcaagctatataaatagttatcaattaggatactacgaactacctcacaggactgctgtgataattaaatggccaagtatctatcataaagcctggtatatcataggtttctaatacacagtcacagctcccttttataaagccatgtatagcttttggagtcagaagcattgtgacctggttcaaaatctaatcctacacttaccagctaagcagctctaatcaagtcatggtaacaaaaacaacaataatatctgactaatgagctcgataaaattaaagaaataatattgccaatttgtaattagtaacacaaaaaattattactctacttactagttttggatttgcacagattcaccctgtgagcaatgttaaactacaggcttgtttcctttcccttaactaaatgtgaaggtggctgcccaaaagaggtgtttcaactttcttccacagagcatatattcccccttctagtaactgtgttacagctgagggcttacaaacaagactgatacagggtttctgcaaattctctacctttaataccatcttgtaaaagtcactccaccacctataattctaaaccatttgttgaaacagggaaatttgctgaggccctaagtcctcttagggttcaacatttgaacgtccacttgccagaaaaaaaattagagcccgatgaaatacaaaagtattcaaaaccattggaatcaaaacagcatggtatttgtataaaaacagacacacacagaccaatggaacagaactagagaacccagaaataaatccacatatttgcaggcaattgacaaagtcttcaacaaaaatgccaagaacatatattggggaaaggacatcctcttcaagaaattgtgctaggaaaactgaatattcatatgtagaaaagtgaaaacagacctctatctctcaccatctaaaaagatcaactcaaaatggattagagacttaaacctaagaactgaaactatataaaacaactagaaagcatcaaggaacgctataggacattggtctaggcaaatatttttatggctaagacttcaaaagcgaaggcaacaaaaacaggcaaataggactatgttaaactaaaagctttctgcacagcaaaagaaacaatcaacaaagtgaagagacaatctgtagaatgggagaaaatatttgcaaactattcatccaacaaggggctaacataaggaatatataaggaactcaaacaactcaacggcaagaaaggaaaaaaaaatcccatgctcaatattagtaatcatcagggaaatgcaaatcaaaaccccagttagaatgcctcttgtcaaaaaggtaagaaataagctgggaatggtggcactgcttgtaatcgcagcactttgggaggctgaggcaagaggattgcttgagcccaggataaagacctgtctgggcaacatagtaacaccccatctctaaaaaaacaaagacaaaaaataacaaatgctggcaagaatgcagagaaataggaacttatatactattggtaggaatgcaaattagtacagccattttggaaaacgatatggaagtatttcaaaaaactaaaaatagaactatcacacaatccagcaatcccattgaatatttagaaaaccagtatatcaaaggtatatctgcacccctatatttgctgcagcactattcacaatagctgagatatgaaatcaacctaagtgtccatcagtgaatgaatggatatataaaatgtggtacatatgcacaatggaatactattcagccattaaaaaaagaatgaggccaggcacggtagctcacttctataatcccagcactttgggaggctgagacgggcggatcacgaggtcaggagttcaagaccagcctggccaacatagtgaaaccccgtctctaccaaaaatacaaaaattagctgggcatggtggtgtgcgcctgtagtcccatctacttgggaggttgaggcaggagaatcacttgaacctgggaagcagaggttgtggtgagccgagattgcgccactgcactcaagcctgggcaacagagcgagactctgtctcaaaaaaaaaaaaaaaaaaaaaaggaatgaaatactgtcatttgcagcaacatggatgaaactggacatcatcatgctaaatgaaataaaccatgcacggaaagacaaacatcacatgttctaatttgtatatgggagctaaaaaagtggatctcatgaagatagaatagtatagtagactgatggttaccctgagaagggtcagggagagcaggggatgaagagaggtcggtgaatgggtaccaaaatacagtgagagagaagatatatgacctagtattcaataacacagtaggatgaccatagttaacaatgatttatattgcaaaataactagaagatttgaaatgttctcaacacaaagaaatgataaatgtttgaggtgatggatatcctgcttagcctgatttgatcactacacattctatgtatatatcaaaatatcacatgtaccccataaatatgtaaaattatcaggtatcaatttttttttaatcaacagaaaattctgaatccttgataaaacaccaaagcctcacccattttctttagggtatgtgccacaggatctgtttacattgatgtcatgacagcctgagtagctaacaccaaattacgatccacagttaacaagattatagcaagattccaatatattcgtatctaatttgcaatttcacattcaccacttaagtaacttcaaggttctcatcattaaaataggaaaaagaaagctgaagattcttgaattaaagatttaaactgcagtataatcaagattatttcaaaattatattcattcatgcattatgttatatgtaaatactcatatatacttacttattttctcaagctcattattttctaagactgtttcctttctcagtgcaattaagaccattttgctcaataatgctgaagtacacaaatggctgggaagtgtctttatgtcctgttccttaaaatctgttttgaaacattcataattcaaactcaatcttccctctaaaagaggtctatgtaaccactgtgaaaagaatacgttatatacaaaattatttattacctaagcaattgagactgaacaaaaatgaagttgtgagaatatttattaccaaaaccacagaaacctagaagtttgttttcttttacaggaaattatcaacatgtgtatttctttaagactccttaagtacagaactaggtcctaagtctttgtaccatgcccactgccactgtcaaatggtgtcttgcaaaaagcaaacatccagtatatgagcatacaaagacatcaaagcaaagcaaaatactcattttatttatgtttttcttccccaaaataaaaatattcaagcttgcatgaaatccaaacttcagaatgagatatgtactcttcaatttccaaaatacctgcataggaagagactgcctcatcttttcccattcactgtcgttcggcattacacttccaatataaactcccataagataagaatcttcactctctagaagtgtatttagcaaatcatcaacagcagacaagaggacttggagactaaaaataatgcagagaacttaactgttgtagttacgctatgactagtttgaataccccaatacatattaaataccctataatagctcacctgaacaaaaagaaatgatgaaaataaaaagaggtaagtgacattcccccaccgatgacacaccaacataacagtcaaactggggaggtaatccaatatttatcatttgaaatctagtgttgcttcctatctatctcagaatgaagaggacctgacctatttcagaccaggtatttcagaaatacagctaccttatgaaatgcagcactattttacctaaacccaatatcctctaaatgcattctctcttctcctttattatatggatttaggtatgagaggtaaaatatacttgcaattcaacatcttaaaacactgcctacctgtccccaaaaaataaataaccaagaacaatcagtacatgtggtgaccatgagaggctacaatgcacaccagcctatgacaaaggatagtatcaccatcactttactgtctataagttatgagtccagcaggtatgttatagcaaattatccttcaattaactggcagtttaaatggatggtcattgaaacaaaatggttttggaaaaattcgtttgggtcttttcataagagtcctgtagatttgttacctaacaagtcacttttcatttctcttttttttaagagatggcatctcactatgttgctcaggctggtctcaaactcctggaggtctcaactgatcctcccacctcagcctactgagtagctgggattatagggacgagccctacaagtcatttttcataggcactcacactgatcatggaatctaatttaaggacactgttcaagtataaaagagacactgaaaccaagctcaaaaaaggttacctgttgatatccaaagatgaagcctgaacttggttcttcagccacagagcagacaaatgtaggaaggtactctctttatatgaactgtcagtttgatgaaccaataaatttacaccagagagccaagtatttttcagtttacagataagaaaatctaaaatcaagatgtcaacaggaatttgtaatctcactgaattaactctcatcagcacaaaatgtttgaaacaactctacagatctgagatttttttaaataccatttaaaaaagaaaaattttaaattgccattcaaaattcaattgccaaacaaagcaactgtgtcataaacatgcaatcatacaagctagcacgtatcatataaatgtaaaatggtaagatttttaaagttacattttttatgcttgaacttatttacaagagttgtccttttggagacatttttaaaaaaattattacaccatttccaaatacagaagttagtatttaagaaagggttggtagccaatgatgggcagaaaaaaaagagagagagaaagaggaaggaagaaggaaagaaaaaaagaaaggaaagaatgaagggtgggaggaggagagctctctatagatagtatttttttatgttcctttcacaaataagtctgaattagcatataaggcaagaatatagtccttaaaaagataatttcaattctattttgatatacaccaaagattgaatgtttttactataataaagggatattattatcccccttttacaaatgaggaaactaagacatcaagaaattaaggaacatgccagaactactgaatggactaagattccacctaatcaattatggctcattccaaatttctttgaatatcaagtgagatctttagaaataacatctacgtacatctttaacttgctttctagagctgaaagtgtttaagactgtagccctttactcaaaatgctttaaactttcaaacacattataattcaattaataaagcctgggcacttacactcactatgaaggtcagagccggagattcccaacaaaacatttgagcagtaggctattacctggcaaatgtgttttttctttgctctgagcacataactgaaagagagttaataataaatcttcagatgatggcattagcaagcatcctttcgctgagctgaaatagttataggccacatcacagataaaagacactgatgagtcactgctttcagcttctgataatttctttgttttgaataaagtttcatgaagtctaacaatgattctttcaacatatacgtctccaatcaagtaatctggagaaaaaaaggttcaaacagacaaaaaataaaaatattaacgtgtatttttaaatatcttactttggattaataattctatgggtctttcctggattttaaaatgtattagacaaaattttatcaacaaatcaacacattctctcacacataaaggccctcaagtaaaaaaggcagttttaaattaagtagaaaacagaaatggtctacagttagggtgagcaagtttgtacactgaaaaccctttaagtcatgagtcaactttatgagctaaaaaaaaaaaaccctttaggatatagaactaaaaatattaaatatcttctaagtcatggtatgaagattaataaacaattagggtgcttacaatattacgatatgtaaatgagctgggcgcagcggctcacgcctgtaatcccagcactttgggaggctgaggcagacagatcacctgaggtgaggagttcgagaccagcctggccaacacagcgaaaccccgtctctactaaaaatataaaatttagccaggcatggtggcatgcacctgtagtcccaactacttgggaagctgaggcacaagaatcacttgaactcagatgttgtaagccaagatcacaccactgcactccagcctagacgacagagggagactcagtctcaaaaaaaaaaagaaaaaagaaaagaaaagaaaaaaaaaaatttgaatgagtaagtcctgttatttttaaccaataacacataagctgagccccatgcaatcccccacaaaggagaaatggactattccccattagaaaacaaaagccatatttgtcctaccatttttaacatgttgggataataccaagcttagaagagtccatctttctgagaagtgagattctgaagataccctggattccaagtcctcattacaaagacaatctgccaagttgaccaatttctcaccaaggatatcgcctttgagccaaggagttactaaagcatgtttatctgaactaggacatgcctaaaaccataaaattaaagcaaagattaacagcaagatcaaatactctctctgtccaaaatattacttgtaccatattactatcccttcgttatcatggctccaattctatcccccctcctcctcctcctgaagttctaggaagactggtatcctccctgttccccattaagcctgtatgatgttcacttccacgctttgctgttaccttcccagccataaatattcccccaccccccccttttttttttaacttaaaatcccatccattctttgaaaatcagtacaaatcccacctactttatggagtctccccatccactccagcccacaatgatcactgcttttctctgaatttctaaagcacttactggattgtataattatttaaatgtttcatctgtgtatatcttgtctttccaatgagattgtaagttccttgagagtagagactgtcttaaacttctttgatacctgctatcaacactgtagatatgttcaatgaataatgaataaactttgaagatagatttataaatgctctataaatttttgttcattaattttgctaaaattaaagaacaattagtgtataataatggtaaattacttcaatatgaacaatgggatttatttccccaaattctctgatatagagttactagggccagatatctgacagcaacttattttcatgaggtggggaagcaagaaaaaaaaaagctgtaaatccacccctaaagcatgctgatccatgttcccagagcttcttttgctttaagggctgagaagtaaggaatttgcaacttggttcatttcaaagcaatctggaagaaaaaaaaaaatccaagtgcagattgggtagtgcttggaaaactttatccttttatttaaaaattgtaggtaaccagagcttatattttagtccaagctttatcactaactagcctatgaccttggacaaatcttttaatcagcgtgggcctatctcctaatttgaaagttggaaagattaacttagaaaatctctaaggtccttttctggttccaaaactcaaatctgttttttaattgatggtttttttaaaagatgactttaagaccagcctgaccaaccaacacggtgaaaccttgtctctactaaaaattcaaatattagctgggcatagtggcaggtgcctataatcccagctactcgggaggctgaggcaggagaatcacttgaacccgggaggcagaagttgcagtgagacgagatgttgcaactgcactccagcctgctgggcaacacagtgagcctctgtctcaaaaaaaaaagatgattttaagactctgctcataaagtattaaggttccataaaacaagaaaaactactttagagtttagatggctgtgatacctgttttcccagtgtagtttgccaagtaaaaccaatctattctgcagaatcctggtaaacaaaataaacttctgaataaaatgcctctcgagttagcaagataagaaattcaacataatgtacaggcataccttgttttattgggcttaatatttactgggctttgtaaatgctgcaattttaaaaattgaagatttgtggcaaccctgcattgagcaagtttattggcaccattttacaacaatatatgctcattttgtgtctctgtgtcacattttggtaattctcacaatatttcaaactttttcattattatgtctgttatagtgatctgcaatcagtgacttttgatgttacgattgtaatgtttgggggtgccacaaaccattgccatataagagggcaaacttaatcaacaaatattgtgtgtgtgttctgactgccccgctgaccgaccattccctaatctctcttctctgtccttaggcatccctattcccttagacacaacaatgctgaaattgggccagttaattacactacaatggcctctaaatgttcaagtggaaggaagagtcacacatctctctaaaacaaaagctggaaatgatgaagcttagcaaggaaggcatgttgaaagccaagacaggtggaaaactaggcctcttgtgccaaacagccaagttgtgaatgcaaaggaaaagttattgaaggaaattaaaagtgccactcctgtgagcccaagagtaacagaaagtgacatagacttactgctgatatggacaaagttttagtggtccagacagaagatcaaacgagccacaacattcccttaatccaaaaccgaatccagagcaaggccctaattctctttaattctatgaaggctgagaggtgaggaagctgcacaagaaaagactgacgctagcaaagggtggttcatgaggtttaaaagaagaaaccatctccacaatacaaaagtacaaggtgaagcagcaagtgctgatgtagaagctgcagcatgttatacagaagatctagctaagatcaataatgaaggtggctacactaaacagattttcagtggaggtaaaacagtcacatattagaagaagatgtcatctaagactctcatagctagcaagaagtcaatgcctggcttccaagtttcaaaggactggctgactctcgttaggggctaatatagctggtaactttaagttgaagccaatgctcatttctcattttaaaaatcccagggttcttaaccttatgctaaatctactttgcctgtgctctataagtggaataacaaggactaaattacagcacgtttatagcgtggtttattcaatatcttaagcccactgttggaaaaacgaaggaaaaaaagaaaaaaattctacaataagtagaaatattactactcattgacaatgcacctgggtaacccaagacctctgatggagatgtacaaggaaattaatgttgttttcatgcctgctaacacaacatccattctgcagcccatgaatcagagtaattttaactttcaaatcttaatatttaagaaatacatttcattaagctatagcagccatagacagtgattcctctgatggatctgggcaaagtccactgaaaaccttctggaaaaaactcaccattttagatgccattaagacattcatgaaccatgggaaaaggctaaaatagcaacattaataggagttgagaagctgattccaaccctcatggatgactttgagaggttcaagactttagtgtaggaagcaactgcagatgtggaggaaagaggcaaagaactagaatgagacatgaagcctcaagatgtgactgaaatgctgcaatatcataataaaatgtggatggatgaggagttccttcttacagataagaaagtggtttcttgaggtggaatctactcctggtgaaatgccgtgaacattgttgacatgaccacaaaggatttataatattacataaacttagatgatacagcagtggcagggtttgaaaggattgactccaattttgaaagaagttcttctttgggtaaaatgctatcaaacagcatcatatgctacagagaaatctttcatgaaaggaagagtcaatcaatgcagcaaactgcactattgtccttattttaagaaattgtcacagccactccagccttcagataccaccaccctggtcagtcagcagccatgaacattgaggcaagactctccatcagcaaaatgattacaactcgctgaaggctgagatgatcattagcactgtttagcaataaattaattttaaattaagatatgtacattggttttcagatataatgttattgcacacttaatagactgtagtgtacacataacttttatatgcactggcaatccaaaatacttgtgtaacttgctttattgctgtggtgtggaactgaacttacgatgtctctgagatatgccagtatgaacatatctaatgaaagaagctgcctagctgtaaggagatgaggaggctagtgagtcatggaagcgcaggcagcaaacactggctaggaacttccaatcactgctcaggaagaggattttcttccacacagatgtgagtatttgcacttcacggcaggtacattcctaagttggaaatggatacattagtctactcttatcaaattatttgcaccccctgctctgaatcaaggcttatcaaggagctttctgataatttagctcttcatgtaacttggctacagggagagaaggcactagataaactaaggcaaatagtgtgcctgataagtcatattcctcattgaaaaataataaatattctgtatttattttgtaaaaataaaactatggggaaaatggggagttactgtttaatggatacagggtttcagttttgcaagatgaattaagttatggaaactgcacaacgatgtaaatatacttgatgctactgaactgtacatttagaaatggttaagatggtaaatttcatgctatgtgttttttttactacaatttaaaaaatagaaaaaaacttgcaaattcaagagttagctatgaaaacagaaaaataatttgaaaatgctttaaaaaggagtaagaatttcaggtagctagtcataacatctctacagttggaaaagtgttagttataacatttacatcctcattaggaaagaatacttaagccgttttgaaaatttgtaaattgtttatgttctttcatttcttttcattattcttaccactaattttcttagtcagtggcaatcacacaaagactggaagatttttatttacctacatagtgttccagagtagagaaaacttaattttctcatgtgttctacccaaagctagaacctccaatccatttctgcagtagaaaaagtaactagaataacagcagaaagttgtagctttaattaaaagataataaaatgtttaaatctgcctttgttaccttctaggaaagaaacactggattttccagagcctgttcatttttccctaatattactaaccagaaaaatactactacaggaaaggaaaagaacaaatatcttcccacattataggaagaaagttacaataatgaggaagttctctaacacagaacctgactatctgaccatatttattgtgtaaataggactacggttataatatttctattcccataaatacaaaaaaaaaaagaaaaaaaaatccctaagataccttttcaataatcttaagaagagaattccatttcaagtccacctgaaaaaagaaaaagagttagaaacaatctgctagaacaactttttgtttgagatggggttttgtatgttgcccaggctagtctagaactcatgggctcaagccaatgtctcacctcagcctcctgagtagctgggactacatgcatgcgccaacatgcccagctaaaacttttaaaaagtaaatgaagtacccatgtaaccaatacaaaactaaaatgttcttatccaactttttaaatgtatagattaaaagaattcaccttttaattacaagtatttgtcaccctggtactgctgaacatctacccagcagccctagatacttcccaaatcatgatcaagaatatattgcttgtcctaaaattgacactcacagtgaagaaacaaccagaaaacaataagcaggctcattctactcatctattattcaaatagtttgaaaagatatacaacaggaataccttggttagatcatccaagactttttttctttccatatcattgtcacagcaccggagagcactgtacaaaatgtccaccaggaaaccaaaatccttcctttgatcttcatttagccaacctatcagtttctggtataaaaactgcaccgcaggatttttttgtacaagcttggctatttcaagaggtttggcttggacaatactctgtttttcatcaccaagtagcattttaaatactcggcttgaagaaaaggagtcaagcagagtagaaagaaaccttagatgttgctctgactttcgttcattgacataattaatacttatatctgcgagtttacagactaagtcttccaaaggttttttccttagaggagacaaaaggcctgaagaattatgagtgagagaaggttcagttgttaattcccagccttcaatcttctctccttctgaagatacacatttttcattctctttattgctttcaagtatctcatcagcaaatctaaccttaccatttttttttttacttgacttcaatgagctcttcggcttctgaagcacctgtaataggttagatacacccaaaacggactcaacatcagcttctggctcactgattttcgcaacacagatctctgacagtctttcccagaaatgtatcagtacgttctccaagttgtgagctgttttttcatctttttccgtgtctgctttggcttcccaggaacttagagtttctgctaaatggttaaatagctgcccatgttgcaatcctgggtctttgagaactgcatcaataaaagggatcaactgaaagaaaaggtagaatatcataaaatatatatttggtcttcaacccccatctcctggcacacaactctaaaatccttggaatctccaaagtgatatcatttcataagctaatgggttgattgatggctggcagcacctgtatagcaggatgggggctgatcaccagaaagaccaaggcaggattaaagggctagaactttcaatacctccccaacctccagggatagaaaggtagctaaaggttaagctgatcaccagtggcaattacttaatcattcatgcctagtaatgaagcctccataaaaacgcaagaaagacagcattcagggagctttcagatagctgaacatgtggaggttcctggagagtagcgcacccagggagggagtggaagttcttcaccccttcccgtatctcaccgtgtgcatgtcttcatttgtatcctttgtaatatcatttataataaactggtaaattgtttctctgagttctgtgagacagtctagcaaattaagcaaaccccaggagggggtcatgggatccctgatttagatgtacagctggttggtcagaagcccaggtaaaacagcctggggcttgcgattggcatcagaagtggggagcggtcttgtgggactgagtcctaagccagtgagatctgacactatctccaggtagatagtcagaattgaattggaggacacatagctggtatctgctgcagaactgactgcttgctgggtgggagaaatctccacatatttggtcacagaagtcttctgtgttgattactatgatgtgagaatagaggaaaaattgttttttccactcacagaaggtaaaaaattgaaaagttcaattttcaagagaaaatttaaacaaagtatttgtaaaacactatttcatatttaataactgaaaaacataaattttcccctagaactctgaaaaagttaacctaaagatccctttcatatcatacaagagcttaatgatttcacctcaattattcctttttcatgataaaattgactgggattcttggtcattaacaatctagttttctttgcatcttctggatttaagtgttttgcttttctgccttaactataggcaaatctaagatatgagactataagtcaacatgaaagatacctaggacccacagagtgcggaatcctatttcctaaattacaaaaataagggtagagacatcctaagacctgggcttctataatctcactaatttcctactgtaaagaaccatattccataaccttctctcatctctggttctaaaagccaagccaaactttcacaaagcataatttgagtattttagaattaacaagatgattgcttcatgatttatttaaacttactacaaaagatcataaatagcaacttcaaaattctgctttgcattacatctttctttttttttttctgagatggagtttcactcttgttgaccaggctggagtgcaatggcacaatttcggctcactgcaacctctgcctcccaggttcaagcaattctccagcctcctgagtagctgggattacaggcatgcaccaccacacctggctaattttgtatttttagtagagatggggtttctccatgttggtcaggctggtcttgaacccccaacctcaggtgatccacccacctcggccttccaaagtgctgggattacaggcgtgagccacgacgcccagcctgcactacatctttctaaaacagggttttacaggccgggcgcggtggctcacacctgtaatcccagcactttgtgaagccgaggcgggtagatcacctgaggtcagcagttctcgaccagcctggccaacatggtgaaacgccgtctctactaaaaatacaaaaattagctgggtgtggtggcgggtgcctgtaatcccagctacttgggaggctgaggcaggagaatagcttgaacccgggaggcagaggttgcagtgagctgagattgcgtcattgtactccagcctgggcaacaaagagcgaaactttgtctcaaaaaaaaaagggatttttgcatccagacactgattagtttcttaggtatcataccatgctagcaactgagagtatggaatttttacttatctggtcagaaatacacatcactcaattggtaaattataaaaataaaatttttacaaggaaggcttattactgtaaatggcaacaagacacaatgagcttgatcctacataatcagtatgcaaagagactgacgacttttacattatagatacctgatcattgacgagcatctgttcaatctcttcctcacctaagttttgctgcattataaaacgtaagcattcaaaaaaagcagatattactgccgaggactctaaagagctggttttagttctctctgttgacagcctaagaaataattaataactggattactctttcatgaagaagaaacaagaactcagaattatcaaaataaagacctcaaaaaggcatcatgacagaagaaacatttttaaagcagtttcttaaactacaaattaaataccaatgaaaatacatatagcccaatgagaatatgaacttaaaaactttgaaaaagtttttcaaaaaatgtatcagtaaaaaataaaaataagagaatatttcctttttctttttcttctttttttttagaaatagggtcttactatcttgaccaggctggtcttgaactcctggcctcaagcaatcctcccactttggcctgtgctaggattacagctgtgaggcaccacgcctagccgagatattaattttctattcatggaccaatccacctgcaaattcgagataacttattaaccaaataaagataatggtgtagtaaaaaaaatctgtaatcattaataaaatgatgtatcttctaagttcaacaaatgtactgaaacagtttttttaagtgtgaatttaaacatctatagtagttaaagttgttgatgttttaaaaatttcactggctaattttctgcatttaggcatttgtatttatcaacataaaaaataaaaaatggctacatgtgtctgtggtgcaattggttagcacattctgctgttaaaaaaatggctaatttgaaaaatagcctagttgacctatttccaacaaggagctttaccttatttatctaacttcctgctgtgtgctaccactgaagtcttgaacgtactcaagaaaaaaatatcaattgtaattctctgaaaactttaaaagtatttaatgaatagtaaaacaacttggagaaatttaagtaagaaagaaaatgagtataaaaacaagaaaatctgttttgttttaaaaatcaaaaatttaaattacttacccagcaactagagacgtgaggaaatttttgaagaaatccaactttggatttgtgatggactgagggagcttgctgatgaatggcagaaggtaaggatatatgacagtagctagaccccgaccaccttcacgaatcacagttgatagcttgggaaacacactcttttttgcatttacatgaagccaacagtcctaaccaaacaaaagattatagtagtaattagagatcataaacatacttttctcaattaaaagagaaaacatataggctctcaaaaagaaaaaccaagtattttacctaaaaaaagctaaaatctttcaccaccattaaaaactaaaactgaaattataaatgtattacatataatgatcatatattcgacatgcttacaataaagtattgattagaaataattatttaacttctatttctataaaagctgctttctaaaagggacaattatatttcaatcttaattatatttcatcttaaatataaaattcagttatggtgactgcactaggacacataaggtttaaagaataattaatactggcaaaacaaaataaaataaaaactctatgccattttagtcactttaagatttatgccaagtttagattattttatttccaagaaagcattttcccagtaagttttggatattcttatctcataggttcattcctcagtgtactaaatgtgcctctcttacatacctcaatagttgtaagtgtatagagtacagcttcccagagagctgggcagacaattgggtcactgtcatcaatgctaagtagaactgatgggctcactttggatgcttcctctttcatcaactgtggaatgcgctggcacaatgcagagactaactcaaaataagctgagcgaatctaaaagaatgcaaagctgaattaaattaaaacctagtaaaacttgataagatttttaatttatggtaatagtagattattcacactaaccctcccactaagaaaactaaaatagctagaaaaaatactttttaaaatcttagagtatgaaatggctgaaaaggcataaggaattaccaaggcaaaagtgaaggctgaaagaattaattcaactttctctttctttgactgaagcaaacacaaatcctctttagtagcagaagccttcatttggggcctccattatagccaaacaaacagaaaataagacaccatgagcaacaatcaggagaaataaaagatctgagactttaaatcttagaatgatcagtcacaaattctataatacaatgcttattatatttaaaggaacaaaagttttaaaaaacttgtaagaaaaaggatcctggaaaaagcagagcagatcggaaaaagatcaagcacaattactcaactaaaaataattaaaacttaaagctcaactcgtagtttaagaacaatgcaatggtctgaatgtctccctccaaaattagtatgttgaaacttaatcaccagtgtgatagtattaagaagcgaggactctaggagatgattaggtcttgagagcactaccctcatgaataggatcagagggcccttacaaaagggtatgagagaccatgtttactccttctgccatgtgaggacacagcaaaaagtagccatctttgaaacagagaaagcaaccctcaccagacactgaatctgctggcaccttgatcttgaaatttccagcctacagaaccgtgagaaataaatttttattatttacaaattactccatctaaggtacagtttatcccttggtacctgcaggggattggatcaaggatatcccaccctcccacccccacacatataccaaattctcaggaattacataaaatgtccctgacataaaatggcgtaatatagtcggccctccatatccacgggttcctcatctacagttgattgaatccacacatgcagaacctgcagatatggaaggctgactgtattttgttaaagtagcctgaatggactaagacagctggaggttagatacaaataagagagaatcagtgaactagaagaccgagcaaaagaaattatccgcaaagcatcatggagagacaaaaagatgaaaaacaacaaagaaaacgtaacagacataggggataaagtgaggcttaatatctatttaatcagaatcccaaaacaagagaagaatgaggaaggaaatacctagagataatagctgagaattttacagagccaatgaaatacaccaagtcaaagattcaaaaagtccaacaaatcccaagcaggatacataaaggaaatccacacaaagacacattatgcaactgggaaaacacaaggagaaaagtagcccaaggagaaagataaactaccttcaaaagaaggacaataagactgatagttaattttgacatcaataatttaatcagaagacatggaatagtatcttcaacacaaaaataactaccaacatacaatcctgtactcagcaaatatgtctttcaagaatgaggatgaaggccgggcatggtggctcacatctgtaatcccagaactttgggaggctgaggcgggcagatcacttaaagccaggagttcaagactggggtggccaacatagcaaaaccccatctttactaaaaatacaaaaattagccaggcatggtggcacatgcttgtaatcccaggatttgggaggctgaggcacaaaaatcacttgaatccggaaggcggaggttgcaatgagcccagattgcaccactgcactccagcctgggtgacaaagcaagaatccgtcccaaaaaaaaaaaaaaaaaaaaaagaatgagggcaaaataaaaacaccttctgacacaaagcaacaaatatataggcaaatgtaaacaaagattgagagtataatattttgtgagatttaaaaatacatacatatctaaccccacaaaatattttatgtatattttatataaaatattaccaaatcaaagttagcaaagtattttaaaagacatgacatttataaagacagcaaacttctagctatgccaagaaactttgatcataaaacatcagaaaaatcaagaaaattttgctttgcttagaaatcaagcattcattcatgaaagaaacaaaaaccataaggactgagcagattgtaaaacattattctagaatgcaaaagacctaagataaccaaaagaattttgaaaagaacaaagttggaagttttcaacacaatataaaacattcataatcaagtgcatggtattgggtgtaaggatagacatacagatcagtggacagaacagagtctaaaattaaagttgtacatatacggtcaagtgaattctgacaaagatgtcagaataaggatgggatagtctttcagcaactgaatactccataaccaaaaaattaattttgactctcaccttcagtttatatgcaaaaaaaacctctaaatccactacatggagctaacctataaaacttctaaaataaaatatagaaaatctttgcaaacttgggcaaagatttcttagataagacatcaatctattaactggccattcaaataataaaaataaaaaataagacatcaaaaagcacaaccataaaagaaaaatgatcaattaagcttcatcaaaattaaaacatctactcttcaaaaacactaatgaaattaaaaggcaagccatatactggaagaaatcattcatcatacttttatctgacacatacttctactcaggataaatacagcacacttgcaactcaaaaataaccaaactgcaattttaaaatggaccaaaaaatatggatgagtgagagcccaatatatcagtcctcctaaaaaggaagctctgtggataaaacacacacaaaaaacaactacctgaggactctggagactgaaatacagatgcattttagaagagaatcaaactgggagtaagtgatccatgtagattgagatcccaacttttgcagctttgcccaaacgtggctgtggtcgccatcacaaaggcacaggaccagctacaacttcagtagaaagactgacatctttctggccagaggaactagaagaaccaggaaagaaggccaggataatgcgggatgacgcaggagagtgatgggggactctagaaaggagagggccacagaaaggaacccctatattctgtattttaacagcctaaatctatagcttatctctgaaccatgcatgtgcactccactatgcccagctaatttttaaaatttttttagagatatgagtctaactatgttgtgcaggctggtcttgaattcctggcctcaagtaaactagaagcagcttaaagctaaaacaagaaatgaactgagagctaagccatttcccaccacaggcataatggtttggtatgggtctaatcaagttaactgcctcctaacaaaaaaaaaataccctttggataaatataaaataaaccagtctccaaaacataacattcacaatgtccagtatacaatcttaaattagtcaacataccaagagccacaaaaatgtggtctcatcacaaaggataagacagttaactgatgtcaaccccaagatgacccagacgttatcagacatggattttaaaaagctattaaaactatactcaataaggtaaaggaaaatacgatgaggatgaatggggaaaaaatagacaatttcatctaagaaacagaaaatataaaaaaccaagtggaagttctaggaataaaaaatatatgaaataaaaaataagcaaaagattacaacagacacctccaaaaagaagatatacaaatggcccataaacatattaaaagatattcaacatcattagtcatcagggaaatgcaaattaaaaccacaatgagaaacctctattccagaggtcagtaaacattttccatagggagatacagagtaaatatattagggtttgcaggccatgtcatctctgttgcaactacttagctctgctttgtagaagtaaagtagccatagataatacataaaactatttacaaaaatagatgtttccctcgtgtccatggggatgaaaaaaacaaaaacagatgtgccagatttgacacacgagctattgcaatgcctgatctcatacccaggagaatgacctaaattaaaacggctgacaatatgaaacatgaggatatggagcaactaaaaatctcacacattgctggtaggagtactacaactttagaaaacatcttggtagcttcctataaacatatacttaccatatgacatatcaattcctctccttactcaagaaagataaaaacatatgttcacacgaaaactgtacaaaactaaacaataaaatggactgctgatatatgcaacaacatgaatgaatcttaaaacattacactaagcaaaagaagctagatagagagtaatgcctagctccatttatatgacagcatagaaaagacaaatctaatctgtagtgatgggaggcaaatcaatgactgcctgggataaaggcagaggatgacttggaaggacaaaaggaatgcattttgggtaaaaaaaaaaaaagttctatttctttattgtagtggttatataagtatatatacatgtagacaggtgtacacatctgtcaaaacttaaactataaaaatggctgcattttacaggactgtgtgcaaattatacttcaaaaaagttgattttttaagaattatcataggatattttaaagtacccaaataacttgagagaggccaggcatggtggctcacacctgtattcccagcactttgggaggccaagcctggtggatcatttgaggtcaggagttcgagaccagcttggccaacacagtgagaccctgtctctactaaaagtacaaaaattagctgggcatggtggcacgtgcttgtaattccagctacttgggaggctgaggcaggagaatcacttgaacccaagaggcagaggttgcagtgagccaagatgacaccacggcactccagtgtgggcaacaaagtgagattctgtctcaaaaaaaaaaaaaaaaaattgaaagagatgagaagttcatggataggaagactcaacaacataaagaaagcaagtttctccatattggtctataaattgagtacaaccacaattaaaattctagttagacgtttttgagaaattcaacaaatgtactggaatttgttttgttgagacaggatctcactctattgcctaggctggagtgcagtggcagtgcaatcaaagctcactgcagcctcaatctcccaggcccaagtgatcctcccaccacaacttcccaagtacttaggactactagcactccccactgtgtctagctaatttttttacattttttagatggggtctaactatgtcatgcaggctggtctcaaactcctggcctcaagtcatcctcccaccttggcctcccaaaggtctggagttacaggcatgagccaccacgctcagcccaaatttactgaaatttttatgaaagaataaagttctggccaggtgcagtggttcatgcatgtaatcccagcactctgggaggccgaggcaggtggatcacctgaggtcaggagttcgagaccagtctggccaacacggcaaaaccctgtctctactaaaaatacaaaaattagctgggcgtggtggcaggcacctgtaatcccagctactcgagaggctgaggcaggagaatcgcttgaacccaggaggtggaggttgcagtgagctgagatcatgacgctgcattccagcctgggcaacagagtgagactccatctcaaaaaaaaaaaaaaaaagaatacaacccaaaatatgtgactaacctgagcaggtattaggacatatcataaggccaggcacagtggctcatgcctgtaatcccaaatgggaggctgaggcgggcagatcacctgaggtcaggagtttgagaccagcctgcccaacatggtgaaactccatttctagtaaaaatacgtaaattatctgggcatggtggcaggcgcctctaatcccagctactcgggaggctgaggcaggagaacagcttgaacctgggaggtggaggttgcagtgagttgagattgcgccactatactccagtccaagtgaccgagtgaaactctgtctcaagaaaacagcctggccaacatgacaaaaccccgtctctactaaaaaatacaaaaattagccaggcgtggtggtgggcacctgagtgccaagctactcgggaggctaagggaggagaattgcttgaacctgggaggtagaggttgcagtgagctgagatcgtgccactgcacttcagcctaggtgacagagtaagactctgtctcaaaaaaaaaaaaagacatatcataatgtcatactgacagtggcactggtataacaagaaacagagaccaatgcatcagaacataatttagggcaaatttctgaatgtatgatttttttttttaataggttcctgctcttcccctaggctggagtgcagtggcacaatcatggctcgctgcagccttgacttcctgggatcaagcgatcctcctgcctcagtctccaagcagctgggacaataggggtgtgccaccacacccaactaattttttaattatttttttgtagagacagggtcttgccatgttgtccaggctggtttggaactcatgggctcaagtgacccacctgccttggcctcccgaagttctgggattactggcataagccactgtgcccagcaatatataagaacttaatgtcttgtaacggcatgaccacagatcaacagggaaaaaaaataaacagtttactaggtaatgttaggaaaactgactcaccatatatgaagaaaaatgtaactagatctatacttaacaccaaatgaaaaggtagattattgatgaagtgaagattttatatgaaaggtaaaactgcatataaagcctacaactataaagctaaaaaattcaaaatataagaatatctttatgacttaaaggtgggaatagccttcataaggcaaaaatcagtgactttgatcacatcaaaattttctttctgacataagacacatgggagagatgacagaatgggagcttttttgcattgcctaaaaatgacaaaagataatctgtcatgagattagaatttttaaaaaagacaaaaagactaatatttaattataaaagggactcctgcataaaaagaaaaagagaactccaaagaaggaaaaatgaacaagaaacacaaaaacaaaaacgctaaaaattcttgaagagatgcaaaatcaccaataaggaaagtaattccagttaaagagagatatcacctgaattcctattaggctgatgaaaaattaagcagctgaatgttgcctactgaaggctagaatacaaggttatgtagtagcagctgaatgttgcctactgaaggctagaatataaggttatgtagtagcagctaaatgctgcctactgaaggctagaatataaggttatgtagtagcagctgaatgctgcctagtgatggctagaatataaggttatgtagtagcagctgaatgctgcctagtgatggctagaatataaggttatgcagtataagagtcatcacgtattgatggttgagtctagagtaatgcagcccttcaggagagcaatctggcactattttaggaaattaggtatgcacacacttcactgactcagcaattcagataatttcttaagatccaaggacacatgaatgaagatgttcattgctgcattacttgtgaaggcaaggagttggaggcaatcaggatctatcactggaggaatgggcaggttaaatgaataggtaatgcaaacttctgaatactacaaggcagttagaagtcatgaatcagatgtacatacaggaacatgatggatctcttttgaaaaagtaataaatggaataaaatataacagtatcatttatgtgaattaaaaactcaagcacacacaaaagcacgtttttcaaaaatacagtcaatcctcacaaatcccatgtttgccaattcacctacttgctaaaattaatttgtaaccccaaaaacaaaacttgcggtgtcttaggccgggcacggtggctcacacctgtaatcccagcactttgggaggccgaggtgggtggatcatctgaggttaggagtttgagaccagcctggccaacgtggtgaaaccctgtctctactaaaaatatttaaaaatcagccgggcgtgctggtgggcacctgtaatcccagctacttgggaggctgaggcaggagaatcactcaaacccaggaggcagaggttgcagtgagtctagatcacgccattgcactccaacctgggtgacaagagcgaaactccatctggaaaaataaacaaaaaacttgcagtgtcttgcagtcatttgtggacatgcatagaatggcaaaaaatctgagtcacccacgtgcacattcccagctgaggttgaacaaggcgacgttcccttatttcagctctcatactgtaaacaagtgtccttttcacagtactttttcaaatttttgtgcttttgattggtgatttcatgttttaaatggcctccaagcagcagcactgaagtgctgtctattgtatctaggcacaagaacgctatgatatgccttacaaagaaaatatgagttagatacgctttatccaggcatgagttttagtgctgttggccgtgagttcaatgctaatgaatcaacaatagctatgaaaaaaaggtgtctttatacagaaacacacataaaacaaggttatggtggggtggggggaggggggagggatagcattaggagatatacctaatgctaaatgacgagttaaggggtgcagcacaccagcatggcacatgtatacatatgtaactaacctgcacattgtgcacatgtaccctaaaacttaaagtataataataataattaaaaaaaagaactaccaaaaaaaaaaaacaaggttatgtactggttatgtcagttatcaactgacaaaaatgctgtgaatagctcacaagaacctaaccctgcatttcccgtaagggcaatgcctcagtattcactaagtcagtattcatgatgagtttatagaaagtaactactaagaatgataagaatcaactgcacaaacaaaagcacatatattaaacatagtagaccagtcagccagtgaaagtagagaatggagagatagacaaaagggaaaaaataaattaattaaatgagaagagacttgcacacaccaattttaaggtgctatgaacaaaggagtatggtaattcatactgataattctaaatctgaggcccaaactaaataaaaaagtaaaaacagagtaacattctagtaagagaggtaattcagtaaatgaatagcctaccacacagatgtgcttgcagagttctaagtataaacaataaacataaaacataaactaagaagatgggggtaaggaatcagagaaatgtcttaagataaaaaagattaatatacctgaggtacactgtgttttccatacttccaaaacttattctgtgataaaagagacttaaatttctcctccagagaatcaagctcattatcaggtaaaaggcaaagtaatctctttaatgccaataaggaacaagttacaacccggtagaatttagcttctctttcttcctctggaacagttcttgatataaaacaaaataaatatatttaaaaatttagaattagccaaactatatatctggtggttctatttaaaatgttttatcattaaatatctaccaaagttgctttatttctatcttctatttcccctgtgccaacgcccctcaaaatgtaaacatacaaagaaatttaatcacatactttactactaatacaaggtgaaagtagacgaaaagccaaggcttgcaataagtgagaaagtataccgctctcggtagcatgtacaagggtgatcccagggaatggatatcaagccatctaagactattttccctcaaggactcttaaaactttgattagaatatagaagtaaacaaaatagtttactactctttcaacagaactatttatattcttcaactatgttcaaccagaccttaaaatacttcctcctacaactgtcaaaaagtaaagaaggaaacatataaaaacatctctttctaatacaaccaaatgtgtagctcccaggtaattcaagttaaatagcaggacaacttgcaagtaaaagcacttaatacagcatctcacatacagcattatgttattttcatctctacatatattattccttctttttaaaaatgtcacacagggccgggcccagtggctcatgcttgtaatgccaacacttcgggaggccgaggcgggtggatcacctgaggtcgtgagttcgagactagcttgaccaacatggtgaaaccccatctctataaaaaatacaaaaaaattagccaggtgtagtggtgcatgcctataatcccagctactcgagaggcttaggcatgagaatcatttgaacccagaagctggaggttgcagtgagctgagactgcgccactgcaatccagcctgggtgacagagtgagactctgtctcaaaaaaaaaacaaaaacaaaaagtcacattgaaatcatctgattacttatgagtgaaacaaatccttaacatgagttacaatgaaacaatacaacttactgcgggtcactgagtgtatcaggtgtttcttttataagatgatcctgcagcacctacaaaggggggaaataccaaagcctttggttttactgaactgtcaatggtgaacagacagagcctagttaaataaaatccactttttaaaaatccccataaacatcatcttacctaagagcagaatcaaatagcaaaactgaaaggtttgaattttaccaattttccttttcctatcaattcccaaggttagctgctttagatacttcttccccacgcacctataaatactcctgaccacttgttcctccatttctctttcacacagcaatgaagtgaatgtgaatctgggagataaattaggctctgctttcctctcccctctttctgtaagcctgcttgcccacaaagaacaccatacattgtgctctgctccatcacagaggaaggtatgaggttttcaaatatacggaagtctgtttcctcctggggtgcagtgcaagggagtccactgttccagtaactgctttatcagcaataacaataactaacacttattgagcttttgcatgtgccaggtattgctttgagcacattttaggcattaactaaatcaatcctcagaactccatgaagtacaagttaattcctgctttatagattatgaaatgaaggcacagaaacttgcccaaggtcacacacctagttgctagctgatggcagagtgggactagaaccaatggtgtgacccagagcccatgtcttatagacagtatgatatactatctataatgctgacattttgattttcatttgcctaactcctctctaatacatgggtttggaactggagacagttcaatgccaacagctgtaatgaactgtaacatagccaactaaagggaaaataaaatggaagaaataacccaatgttcaatgattagttatccatccatgacaaagccaagaacaaatttattttctaaagcctatgaagagccaaactagttgtctcaaaatccatttcctaaagctcttagcgtccaaactcatgacacttcactcttgtaacgtttataacttggcattttaaatcaaccaatgattcttatgctacagatgggttagaaaactccatttgagcatatgattaaagctacaaaccctctctctagaaaaacacgcttggtacacctgagaaatgaagaatggaagaacctaaatgaggtactacaatcaagttatgtgttggggagtgctgggtgaagagattagatagggaagcagggaccagatcatgcagagccttgtatgtcaagacaagaaatttgaacttaaaagtgtaatggagagccacaggaaggatggctaattgaaaggaggaaggaaagcagggggagagggtcagatggaaatgtttaagtagggttatac

SEQ ID NO: 61354 - DNA, 530 bp, Homo Sapiens
tttgctttgcattcacctctgggtttataggcagaacccactgcaactgatggctttcaagactgggttactgatgactctctgttacccactaaagcacatttgaacataaagagtatagggaaaacacctagctttgacaaaaggaaacctttgacaaaaggaaacattttatcatatttacttttaaaaaataaatactagatatggctgaaatcccctttattcaagaggtagccattatctaaaacttgaatgttttgcattcctaatgtatcacttaaacaatataatttttcatgtttaaaagcacataaatggtatactgtatataacctgcttcagcttcctttttctttgtcaatcttatgtttttgagagttatttgtgttgtagctctaattttaattggtgcataagcattccattatatggaatttatcctaagtttttagtatttcaaaataatgcagcatttacattgctgtatgttttcccattcacacggggtaaaagtttttctaggatac

SEQ ID NO: 61355 - DNA, 2027 bp, Homo Sapiens
gatgtatatgtttgaagtgtgcgtgtagcattggggacaggcagaggctctgctcactggggaatgatgttctggtggaacaccccatggacttggagcttgagaagtgggctttggccaggccctggcactgaccacctaggaacagtcatcttttccaagcttctggttcctcttctgtaaggtgcgagtccctaaccacctttccaaagacagcatcctgtgcaagctgtcacgggagggggaagggccctggtgaccctcagggcctctagagcctgtgggcaagagctggccctccatgccaaggtgccaggcctaaccctggtgaagagtgacccaactgggcgactgcctgaggcctcagaggaggacaaggagaaggtgcacagcagcagggtgcacaccttgccctggcctctcctagggtagaggacggtgtgagcccccagaggctgtcatccagcctgagaggtttcttggctcttcctcccatgcccagggttctcccagactgcagagcaagatccaggctccacacaatgccagaggccctgcctctatcttctctctggccagcggccctatcgctaaccccacacatgaaggatactgctttggcatcatcgtttgtgagggccaggctggggaagggtggagagagtgtccttccctggggaggctgaacccagggagatggagtgacatgccccaaaaacacagcaagtgggactagaacccatgtctccagatggaaccccaggctcccactgctccatgctgtgcaggttacacctcccaccctgccgctctctccgggggcctcagtccacctcctgagcccatgtcctcagtccatgattggaccgggtccctgggtcccttggaggaccagccaagcccaggtccttctttgcttcttactccccaccccagtctccttgttcttcagtcttttgctttcccactggctcccttctcacacctcccatggctgtgcccatttctccttttaactctgtcaacttttggatcctatatttgaagcaaggcatgcatatatattttaaattttattatctctgttttgatctttttgtcataaaaaattcgtttttatttctaataatacttcctgccttaaagtctacatttcctgtttgaatgatgttcagtgtccattgtgtaaattctcatgtggtaatttcctttaagaaattattgaggggccaggcacagtggcgcatgcctgtggtcccagcactttgagaggctgtggtgggatagtttcttgagcccaggagttcgagaccagcctgggaagcatggcgaaaccctgtctctacaaaaaaaacacaaaaattagccaggggtgttggtgcatacctgtaatcccagttactcaggaggctgaggtgggaggatcacatgagcctgggaggttgaggctgcagtgagtcaagattgcaccactgcactccagcttgggtgacagagtgagaccctgtctcgaagaaaaagaaattattgagggcagggtggtggcacacgcctgtaatcccagcactttgggaggctgaggcaggaggattgcttgagctcaggaggttgaagctgcagtgagatgtgtttgcgccactgcactccagcttgggtgacggagcgagaccctgtctcaagaaaaaaaggagaagctactgaattgcagtaaaaccgtgtgcttctatgaggggataaagtatttacttgtggctgggcacggtggctcacgcctgtaatcccaacacttcgggaggccgaggcgggaggatcacctgaggtcaggagttcgagaccagcctcaacatggagaaaccccgtctctactaaaaatacaattagccaggcgtggtggtgcatgcctgtaatcccagctactcgggaggctgaggcaggagaattgcttgaacccaggaggcggaggttgcggtgagccaagatcgtgccattgcactccagcctgggcaacaagagcgaaactccatctc

SEQ ID NO: 61356 - DNA, 2869 bp, Homo Sapiens
aacggactttttcagagagggaactatctctttgacacaaaacatacgttttaattaataatacttgctctggtaatatagtttcttatgagttgctacatattttctagaatagattttccctaaaatatgcctttgtaagatttttttaataaaatcaagtttagaaataatttgaacttttttgggggatagagtttcagtcttgtcgcccaggctggaatgcaatggcacgatctcagctcaccgcaacctccacctcctgggttcaagtgatttttctgcttcagcctcccgagtagctgggattacaggcacgcaccaccacacctgtctaattttggtgtttttagtagaaacggggtttcaccatgttggccaggctgatttctagttcctgacctccggtgatccacctgcatcagcctcccaaagtgttgggattataggcgtgagctaccgtgcccggcctgaacttttttttttttggagacggagtctccctctgtcgcccaggctggagtgcagtggtgctatcctggctcactgcaacttccgcttcctgggttcaagcgattctcctgcctcagcctccggagtagctgggattacaggcactccgccgccatgcccagctaatttttgtatttttagtagagacgggatttcaccatgttggccaggctggtcttgaactcctgacctcaagtgttctgccaccttggcctcccaaagtgctgggattgcagatgtgagccacgtcatctggcctggcctgaacttttagaattcaatattaaccattttcccctagtttattccctagagctcttcacaaagtatggcttgacttctctgagacagctagtgataagaaaaatgaagtttattttggtataccactcaaaaagattgtgaaaacaaaatggagattaattttttttttccaaactctttgtaccacaattttaagttgaatagctgacttcctaggcatggataagatcagttctatcttatcttctgtcctagtaatgtgtctgcagtggaatccccattgcttggcttctataattgatcttgaaccttcccaattatcattccctgaaaaaataattctacttaaataccttcttgacttaaatgtcatgagttgctacatctgggttctgataagatttttctaagaaaaactacatttgacatgtgacatcttcaggaattcaatatcttgtttctttgacagagggacgctattcatgtctgtgaatttggcagtctttgaaatgccatgtcttttttggaaaaagcttttgatggactttattttgatatacatcttaaggtcccctgacctatactataagcagagcatagcaaagagggtcattatgaacattgtgtgtagttctgggcagggcttgggatcctttgggattgttggtatctacaccacatggccccaccctgctatgttttaaggttttctgctgactttttaggtcttcagccttgattttgatgctttgagtgcctgcctctagcagcaccacccccagcccttttccagttggctgcatctcatctgttgtgggctaagaaaccagatcacagagcttattaaaattgtgtctaaaataagatccagtaggctcttgactgaagagggcttcatgtgctctgtgaactgtgtggtttccttggctgatcggagacctttctgacttgcttcctgtttttcttctttacttttgctatacagatgtaggaggctttttggtgctcttagagtgctgtaatgttgaagtatttggttaatttctctattcttgggaagggtaaaaggctaaataaatatcttgattctttgaggagttgaagactgaccagagttggatactaaaagcttttcttaacagtaatagtgcattgtacattttaatggtgtcctactagttgcagataacgtttggcatacatagctttcaaacaaagtaatgccaggattatcacttgatctatttctgtgatagagattttttttctttctttttttttttttgaggcagtcttgctcaggctggagtgcagtgtcatgatcttggctcactacaaactctggctcccagggtcaagcagttctcttgcctcagactcccaagtagctgggattgcaggcactcaccaccatgcccagctaatttttgtatttttgatagagacagggtttctccctgttggccaggctggtcttgaactcctgacgtcaggagatccgtccgtctcggcctcccaaagtgttgggattacaggtgtaagccactgtgcccggcctatggctagcttcttttaaggcgtctcaagacaaagttctcaatgaaataaagatttcaggtcatgcacagtgggtcacgcctgtaatcccagcactttgggaggcccaggtgggcagatcgcttgagctcaggagttcgagaccagcctgagcaacatgacgaaacatggtctttacaaaaaatacaaaaagttagctgggtatggtggtggatggctgtggtcccagctaggtgggaggctgaggtgggaggatctcgggagcctgggaggtagaggctgcagtgaaccgtgatcaggccgctacactccagcctatgcaacagagtgagaccctgtctcaaacaaacaaacaaacaaaaagatttcaaactctgatgtctataaaagccaggcaggtaccaaagtgagcagagagaacttgagggagctagaaaatgcatgtgctatcagatgagggcaactgctaaccagctccctgcaaatgttgctattgctaaaatctgtgggcccagtgttgcaatatcttccattc

SEQ ID NO: 61357 - DNA, 574 bp, Homo Sapiens
  misc_feature (481)..(481): n is a, c, g, or t
  misc_feature (503)..(503): n is a, c, g, or t
  misc_feature (546)..(546): n is a, c, g, or t
  misc_feature (561)..(561): n is a, c, g, or t
  misc_feature (568)..(568): n is a, c, g, or t
  misc_feature (571)..(571): n is a, c, g, or t
aaagactggttctgtcaccaggctggagtgcaatggtgtgatcgtggctcagtgctgcttcaaccgcctaggctcaagcaatcctcccacttcagcctcctgagtggctgggactacagacatgcatcaccatgcctacctaatttttgtattttttgtagagatggggttttgccatgttgcccaggctggtctcgaattcctgagctgaaatgatctacccaccttggcctcccaaagtgctgggattacaggcgtgagccaaaagtcaaaaattttaaaaaggtaaatgttgccaattcatttttaaaagttttattatttttggtgctccaaaacatttctttttgaaaatgaagcacacagaatacatttaaaatctgatgtaaaaaaccaaacatctgattttaaatggtggtatacaaaaatccaatcccagtaaattggctcctttccaagaatggaagcatcttttccttangaactacattttcttttatggnaggaaaaaaaaaatctattaaataaagtctggtccaaagactnaagacactggaaatncccgggngangga

SEQ ID NO: 61358 - DNA, 548 bp, Homo Sapiens
  misc_feature (521)..(521): n is a, c, g, or t
  misc_feature (541)..(541): n is a, c, g, or t
ggagacgaagtctcgctttgtcacccaggctggagtgcagcggcatgatctcggctcactgtaacctccacctcctgggttcaagcaattctcctgcctcaacctcctgagtagctgggattacaggcatgcaccaccatgcccagatttttctgcattattattattattattatttgtttttagtagagacggggtttcaccatgttgtccaggctggtttcgaactcctgacttcaagtgatctgcctgtctcagcctcccaaagtgctgagattacaggcatgagccaccatgcctggccacaaacatttatttactattttgagtatatgtttaaagcatccaagcacattttatccaattttaaagatatattatccatgctttaaaacttttggaaaatattttaactcagagatgtctacattctctggatttttcatattaattcaatatgatgtacagtaaaggaatttaatggatcacctatattcattttcctgcttgggctttaaggnacaaagacatttcggagttnaaccggg

SEQ ID NO: 61359 - DNA, 2463 bp, Homo Sapiens
ggggacaaaatgaaattctcttggggtattgaaaaaattttttttgcctgtgaatttagtaattttacttattaagaattttcaaatgatttcagttcttaaactgaaaaataaaattcaaaaattaattgcattttttccagtgtttcttctatgtctttatattggtagaactgtccaactatatggtaaggatgtgaaatgttaaatttacttgaactagagttacaatgaacattagaattaataatcagacttcttttttttttctttttttgagaagggagtttcgctcttgttgcccaggctggagtgcagtggcacggtcttggctcaccgccacctccaccttccagattcaagcaattctcctgccccagcctcccgggtagctgggattacaggcatgcgccaccacacccagctaatttttgtattattagagatggggtttctctgtgttggtcaggctggtcctcaaactcccgatctcgggtgatctgcctgccttggcctcccaaagtgctgggattacaggcgtgagccacttcgcccggccaataatcagacttttagtagtaaaattactttcaaaaatggagattcctttgtcaaatagtactattattagtactaagattgtaaagaggttatttgtgtctgattttgagtttgatgctacagagaagacaggttaggcctgcattgacgtttttcatcaagggcagaattgatgatacagaaacttgatttctgtctaggcatggtggctcatacctacaatcctggagctttgggaggcggaggctggaagctcactcgagactaggagtttgagaccagcttgggcaatgtagtgagaccaccgtttctacaaaacaaaaaacaggtttctttagttaagtataaatcattgatctgtgattaatccaaacactttttcctcagtatagaccttggggttcttcggtgtttgactaccttcttttgaaggaaaccaccttttttttttttttttttttttttgaggcagtctcactctgttgcccaggctggagtgcagtggcacaatctcagcccactgcaacctccgcctcatgggttcaagtgattctccagcttcagcctcctgagtagctggcattacaggcatgcaccaccatgcccagctaatttttgtatttttagtaggggagggggtgtttcgccatgttgcccaggctgttctcaaactcctgacctcaagcgatccacccaccctggcctcccgaagtgctgggattacaggcatgatccaccgtgcccacccgaaaccacttgtaatatacctttaggagaatgcttttagttacatcatgatccctttcatgtagctaacaacaaaaatgaatattaaccccaaatattggaactcgtattttgaagcaagttatttcttggtatactttagtgccagaattggtactgttatgtgattaactgtttttgagactaagaaaatattttgctggacatctgatgaaattatcttaaaaacagtgcttgggtgttttccctggagtgtagtggcaagagtactctgttgtccatcagagccacttgctgctctcagctggccttgctgttgaatggcataatctgatttcgttggagtacccaagtcctaagatttgaagaataagggttattatctcagtctcatcttttctctgagatagcatttgttcaggaaatgttatctgttttcaatggtgaagggagtgagagtctgcttaggagttactgtatacattaaacattggtgaccggcctttaaagaattagaggctgggcctggtgacttacacctataatcccagcagattgggaggccagggcaggaggatatcttgagcccgggagttcaagaccagcctaggcagcatagtgagaccctgtctctacaacaaaatttttacttttttatttttatttttattttttgagagggagttttgctctgtcacccaggctggagtgcagtggcatgatcttggctcactgcaacctccacctcctgggttcaagcgattctcctgcctcagcctcctgagtagctgggaccacaggcgagggctaccatgcccagaatatttttgtattttttttttggtagagatggggtttcaccactttggccaggctggtcttgaactcctgacctcaagtgatccacctgcctcggcctcccgaagtgctgggattacaggcgtgagccactgcacccagccctacgaataatttttaaaaataaattagttgggtgtggtggcacacctgtggttctagctactctgtgaggctgaggcaagaggattgcttgggtccaggagatctagactgcagtgagctgtgatcatgctacagcactcgaagcctggggaacagagcaagaacttgtctcagaaaaaaaaaaaaaaaaaa

SEQ ID NO: 61360 - DNA, 1963 bp, Homo Sapiens
cagcaaggcagggagcccaagaatcagagccaagggaagaaacgaccagttgaggttagtaatgtgaagtctggcaaccgtgcccgtcattcctccctggttcctctgttcatcaacgttggggctagtctggctggggcatggtgggcctgcctttccatcccttgggccccttggaacaagggggcaactctgctgtgggagatgtagaaaatgggtctcactttctctatttggggcaatagctgctacttttttcctccagatgggtaccatgaggggcagaggagaatctgggatctgtgatgtttagccctctttactgagtcatggctgcctcacgttctagaagtaaggcaggcaaatcattccaggtactgattgtcctggaacctttggctcttccttgacctcatgtcacgtgcgtccatgtgaagagagtccatgaaacgggctttatgtgagcaacaaggctgggtgcaggcaagctgagtccaaaaaaggggtcagcaaagggtggtgggattatcattagttcttatatgtttgggataggcttacaaagtacattctcaagggtggagaaatattacaaagtaccttcttaagggcaggggagaatattacaaagtaccttcttaagggcgggggggagactatattgtatcagggtggggcaggaacaaatcacaatggtggaatgtcatcagttaaggctattttcatttcttttgtggatcttcagttgcttcaggccatctggatgtatacatgcaggtcacagggaatatgatggcttagcttgggttcagaggcctgacacctcaggctgccaaatgtggaagatttaaatacttgaaccaataccctcctcccaaaaactgaaattggcttctgtttctgagttggtccaggcgcaatgttcagcgtatttgaggaaatcacaagaattgtagttaaggagatggatgctggaggggatatgattgccgttagaagccttgttgatgctgatagattccgctgcttccatctggtgggggagaagagaactttctttggatgccggcactacacaacaggcctcaccctgatggacattctggacacagatggggacaagtggttagatgaactggattctgggctccaaggtcagtataaggtagatgacaggtggccagccaggaggccttgaccgtttgtactccatctccttctcaattccccattgttatcaaccaatcaacaacgaaactgtgggatttgtacacatccacacaccttaatttaagaaatgcacggaagagctgcatggtgggaggagagtgggagaagtggagatttatttccactggaaaccgttcctaaatggtcttccttttccattttttcccttgtaaaataatctgcttttaatttagcgagctcttctcatgtgtttatcatttaaatgaataagtaaatgagggcagtttgcttactggttaagaaaggatgcaggctttagggctggaagcacctggtttcaaagcctggctctgcctcttatcagctgcgtaacctttggacaagttgctttattgctctaagtttcagtttcctcctgtgtcaactctagaggactgttgtaagaatcaagtgagggatgggtgcggtggctcactcctgtaatcccagcactttgggaggccgaggtgggcggatcacgaggtcaggagatcgagaccatcctggctaacacagtgaaaccccgtctctacttaaaaaaaaaaaatacaaaaaattagccaggcgtggtggcatgcgcctgtagtcctggctactcaggaggctgaggcaagagaattgcttgaacccgggaggtgcaggttgccgtgagctgagatcacgccactgcactccagcctgggagacaaagcaagcctctgtctcaaaaaaaaaaaaaaaaaaaaaaaaaaaa

SEQ ID NO: 61361 - DNA, 543 bp, Homo Sapiens
  misc_feature (537)..(537): n is a, c, g, or t
atcttgtaacactgccttccttataaaattcatataaatatcttgggattaatgttcataaatacatgaaaatatgtttctaaaatattaaaaatctgccctaggattcatctgctattaatgaacaatcaaaagaacgaacaagtagtctgcctgccaatttagaactttaaaaaggtttggattatcctaattttttttttaaaaaaagatcaacccaaagaaattcaaactacttaaattttgctacaataagcattaactatcatttgataacaattcctctaaaaaataaccaccctttataaacactggctatttatttctcctccacaaggtttcccacactgactttaccattcatctttagtaatttccaaaaagcccagagataacaaatacccaagcataaataaatgctctccctcctaaacccataggcaacacggtagaaaatggggccccagattcctcaaaactacactccaggaagccaagataaaacccatatcctactcatgtctcacacacagtatntccagt

SEQ ID NO: 61362 - DNA, 2413 bp, Homo Sapiens
ttttcctaatctggtttcgtctgcttggttcatctgtgtgcgatggctccggactcggatcccttccctgaagggccgctcttaaagctgctacccttagacgctagagaccggggcacccagcgctgccgcctgggcccggccgccctccacgccctgggcgcgcgcttgggctcggcagtgaagatctcgctacccgacggcggctcctgcctctgcactgcctggcctcggcgggacggagcggacggctttgtgcagctggacccgctgtgcgcgagccccggggcggcggtcggggcgtcgagatcccggaggagtctcagcctgaatcgcctcctcctagtgccctgtccgcccctgcggcgcgtcgccgtgtggccggtgttgcgagagcgggcaggcgcgcccggtgcccggaatacagccgcggtgctggaggcggcacaggagctgctgagaaaccgaccgatctccctgggccacgtggtggtcgctccgccaggcgctcctggcctggtggctgccttgcacatcgtcggcgggacgcccagtcccgatcccgctgggctggtcacccctcgtacccgcgtcagccttggcggggagcctccgtcggaagcccagccgcagcccgaggtgcccctgggaggtctttcggaggcggccgactcgctgcgggagctcctccgcctcccgctccgctacccgcgcgccctgaccgcgctgggcttagcggtgcctcgcggggtgctcctggcggggccccccggagtgggcaagacccagctggtgcaggccgtggcgcgcggggcgggcgcggagctgctggcagtcagcgccccggcgctgcagggttcccggcctggggagaccgaggagaacgtgcggcgggtcttccagcgcgcccgggaactggccagccgcggacccagcctcctcttcctggacgagatggacgccttgtgtccccagcggggcagtcgagcacccgagagccgcgtagtggcccaggtgttgacgctgctggacggcgccagtggggaccgcgaggtcgtggttgtgggagccactaaccggccggacgctctagacccagcgctgcgtagacccgggagatttgaccgagaggtgaatgggcttggcgggtttgcccactgtcggtggaacctcggccgcttctggcgccatttggctgccccggaggcgtttgcctcttaggtttgagcatcggtgaggttggagtggggctctttgcaatgcagagaacacgttctctgccgatatatgatctgtgagtcaggacctgtatttccccagagtcaaattgtcaggacctgtgagtcaggatctgagagtcaggacctgtttccccagagtctaattgttttgggaagcgaggtgtccattacagattaattttgttgtgcaggtcctataatcagtaatgttaattcttaagagaattttggtcacctacaagcgtgttaaactcattttttggaatgagaatttaaagaaggatagcctcaagaagtaagtgtgttgaaataaaaagggagaaggtggggaagaactaaatggaagcaggcattaactcttctggatttattcattccttgtcataacaccagcatcctattccacaattgaggaggtacccacaactgctccctgagttgtcagggaggttgaatattcagagctgtcctattttaagctttggtcctaaattgacttgaattctaaagaacagtttgaaatttagtgactgatatttctattttgtgataggattcaaaagagaaatgataattacacacttttggctcagttagttcaggacttgagtggatttcttccttgcactatctagtacctgtgtccttaagggcagggacctagctatctatacctggcttctagaactttgtgtgttcttaaaaataacaaaaacttgttaaatgacatagaattttcattgtgcaactttctagccagtgttactcctctggaatattaggattttcgtatattcagaatctaaagtatacgtaaagtgcacggtactagttccaaagtggttcactaaattgtacatgtttgtcaggataaaaaacatattattattttggccgggcgcggtggctcacgcctgcaatctcaatactttgggaggctgaggtgggtggatcacctgaggtcaggagttcgagaccagcctggccaagatggtgaaaccccgtctctgctaaaaatacaaaaaataagccgggcatggtggcacatgcctgtagttcctactctggaggctgaggcaccagaatcacttgaaccaggaggtggaggttgcagtgagctgagatggtgcccgctgcactccagactgggcagcagagtgaaactgtgtctc

SEQ ID NO: 61363 - DNA, 1884 bp, Homo Sapiens
tagctaattagtggatttttttttttttaacatcaaatggcacagcagtatgtctaaattgcccttaaagaaatacaaaatgggccgggcatgtggctcacacctgtaatcccagcactttgggatgccaagccaggcgaatcgcaaggtcaggaattcgagaccagcctggccaatatggtgaaacctcgtctctaccaaaaatacaaaaattagccaggcatggtggtgggcgcctgtagtctcagctactcgggaggctgaggcaggagaatctcttgaacctgggaggcagaggttgcagtgagccgagatcgcaccactgcactccagcctgggcgacagagtgagactccgtctcagaaatacaaaatgagtagtaaatttatctttgaaatctgcaaaacaaatgtaccctaaatgttataaataaaggtcagtaaatttaagttaaacagtgtgggggcaaaggatttttatcatctttatatccatttctctttttttatcctccccttttacacatagatgcgaatcagtagttgttgtttttggaatttgtgacactgtgagccattggctgtgcttccatatctggtttgttggccaaactttggagctatgtcgtttttcacctctcagatactaaggatgagcttccccatacttggcattagcctctgggatagtcagccaacgttatcttcttctagggacttggtactcaaccgagcactcaataagtgcttcattcaggtcatagctggactctgcattgttgattgtctctctgtctttctttttttaaatttgagatattcacataccagaaaatttaccgtttaaacaatttagtgtttattaacatatttacagggaatatacaaccatcatcattatcttaatttgagaacacttttattactctaaaaagaaattgcctacccatcagcagtcacttcccattccttccttcccctacccactgggaactgctaatctacttttatctgtatggatttgactattctggacacttcatatacatggaatcatgcaatatgtggccttttgtgtctggtttctttcacttaacatgttttcaagccttgtctatgctatagtatattattacctcatttctttttatgcttacataaaattccattgtgtggtgtgccacagtttatccattcacctgttagtggacatttgggttgcttccaccttttggcagttgtgaataatactgcgaggaacatttgtatacaagtttttgtgtagacgtacgttttcctctttcttgtgtaaatacttaggagtgtaatggctaagtcatatggtagctaaatattaacattttaggaattgccaagctgttttccaaggcaactgcaccattttacattcccagtaacaacctgtgagcattcaaatttttccgtatcgtcaaccaacatttattattatctttctcattgtggtaaaatgtctattcagattctgacattttagcttttgatataatcactttagggtcttcctcatgtaatatttatatttttccctttttctgtatatccttttttttctctctgaaaaacgtaacactgtcagccagaggaagtaatatattctagggaatgggaaactcatgcttcctgtgagtctttaaactgtccattgtccatcttggcaacatgaagaaaccccgtctctacaaaaagtacaaaaatcagccaggtgtggtggcacacggctatagccccagcttctcaggtggctgaggtgggaggatcacctgagcccagggggtcaaggttgcagtgagctgtgatcgtgtccctgtactctaccctgggtaacagagtgagacctatctcc

SEQ ID NO: 61364 - DNA, 1581 bp, Homo Sapiens
accgtggtgccgagtgcctgctgccttgggccgccttgaacctccagggtttccagctcctcctccttcaccccagtgccactgccatgatggatgtgagtgaacttggggagtctgcccgctacctccgccagggctaccaggagatgacgaaggtgcacactatcccatgggacgggaagaagcgagtctgggtgcctgatgaacaggacgcctacgtggaggccgaggtcaagtcggaggctaccgggggcagagtcaccgtggagaccaaagaccagaaggtgctgatggtgcgtgaagccgagctgcagcccatgaacccgcctcgcttcgacttactggaggacatggccatgatgacgcacctgaacgaggcctctgtgctgcacaacctgcgccagcgctatgcccgctggatgatctatacctactcaggcctcttctgtgtcaccatcaacccctacaaatggctcccagtctatacggcctccgtagtggctgcttacaagggaaagcgccgctcagattccccgccccatatatatgcggtggcggacaacgcctacaacgacatgctgcgcaaccgagacaaccagtccatgctgatcacgtgagtgtggggctctgggggtggggtggaaaatgctggccatctggcagaaagagggcggtaccacagtcatttcccaggattgaatccaaagtgcttaggccaggacttttaccacctggagctagtgtcccagctgaagctaaaattggcctgagcactttccctgcccccattctgaacagatgtgttcttgatgggggatagggaggggacacccacaaacggagtgaccaccagccccacacctcctctccccggggcctggaatctcccaccttgatcctctggggttctaattctggctcaggggcagcggaaagattcctctgcttttcctcctttttaccatctacttatgtctgaatcttacctctgatctttccattgcctctgtgggaaaatggtagaataattcttacatgccaggctcatgtccagtcaggccaatatggacaatgtttagtgtgagtgtgcatgcgcgtatgcagttaagagcaagtgccttggccgggcacagtggctcatgcccgtaatttctgcactttgggagactgaggtgggtggatcacttgacgtcaggagttcgagaccagcctggccaacatggtgaaaccccatctctactaaaaatacaaaaaattagccgggcgtggtggcaggtgcctgtaatcccagctactcaggaggctgaggcaggagaattgcttgaacccaggaggcggaggttgccgtgagccaagatcacgccactgcactccagcctgggccacagaatgagactccatctcacgaaaaaaaaaaaaaaaaaaaaaaaaaaagcaagtacctttaacccagacgggcccggctgagtgtggtggctcacacctgtaatcccagcacttggggaggctgaggcaggaggattgcctgaggccaggggtttgagaccagcctgagcaacatagcgagaccccatctttacc

SEQ ID NO: 61365 - DNA, 1809 bp, Homo Sapiens
actgcattagaaggcaagccattgggatttgcagtaaatgtattacagaacacaagtgacttgctgatactgcttgtttagcagtttgcaagggcaatggcagtatggatttttgaattagaagggaagggctgttctttctctgtgtgggaacatctagttgatggctggggagaaaattgatttagagaacaaaatgcagccaccgttatttgtgccatttgaaaggcctctatggattagtgagtgaaaataaaaaggttgctttcggtttaggaaagagggtcttaacattgatctgcgtcttggtctggtatggagagaataaaggatggaccaccagatggagaaagggcatccaggccccatgcagcctgcagatacaggtacacactccattctcacatagttgtctttctcagctctttggctttcagaagtcggctttttgggtttattattacagtaagcttttccaatgacaacattagagttgtcatagcccccatccgtggagctcccatgtgccctaggaattggtccgccagaagccgccccctccccgtatcaaccttcccagcctccctttgtgtggatactaattattccaccttgaaaaagagaaaacaggtgagtgggattaggggatgacagtagcacctaccccatagggtaattaccaagattaagtgagttaccaaatgcaggagcagttgcgtagtttcctggcatgggggcgctctgagggatagctgtgatctaaatagcagtccctttaaaactctacccctgctcttggacttctaggccatgcttcactgatacttccattttgtttttgcaaacccagcttccttcctacctctgaactgattttcccattaccgtgttttatttctttccttctaagatcataagcatttatctttaggcttaaaaggagaaaaaaaaaaaaggacttgttggcagtctgttttttttttttttttttttttttaaatgaagtctcgctcttgtcccccaggctggagtgcaatggcgcaatctcggttcactgcaacctccacctcccaggttcaagcgattctgttgcctcagcctcccgagtagctgggattacaggcgtgcgccaccatgcccagctgatttttgtatttgtagtagagtcgggatttcaccatgttggccaggctggtcacaaactcctgacctcaagtaatctgcctccctcagcctcccaaagtgctgggattacaggcgtgagccaccgcgtccggccttgttggcagtctttattgtctaagtaaaatgtcttactttggccaaacagcagaatgtgtccttggaaggcaatagctttaagtaatgtaactatcagtaagaataaagttgtgttgagttttttcatttaaagggatggaagaacaacaaaggatttggttcattctatcaaagtaagttttggcagaataaggactaggaggtatatttcagagtttttctttcgaatgtaacatggaaaatttgtcattttgaaaacaagcagggtatggaattagagggtcaagttgttgcttggttacagaaagaaaaaatttcattttgatgagggatatgtacacctgtggggagtgtgtgcatgtagttttctttttgctctgtaaagtactgtgcaaaagttgtgagtagagtagttgtggtgctgtctttcttcgtctactccatgggcttgagatttttgttgacagtcaaggttcacagctgctgctgatgtactaatatttggggaagcaaaaaaaaaaaaaaaaa

SEQ ID NO: 61366 - DNA, 2628 bp, Homo Sapiens
tttatttttttttttttttttttttttttttttttatttaaattcttttttttttaaattatactttaagttttagggtacatgtgcacattgtgcaggttagttacatatgtatacatgtgacctggctacctttaaagatggatattgactcctccaaaatgctttcacttgaaaaaaaaaagaagaaaaaaacctcaaaaatgagaagggctttccgacttgaggaaagcaaatctttttaacttgcactaggaacatcacgacattttcttgcctcttaaatggtttgtattttggatgcttctgaagagaaacaaagacatatagaatttaaacattatctgtgtttatttgtaaaatacttattttttgtattttgttttttaaatgagtatgtctgatatctcatacatttagaatatttgtaatagaatagcaaatttccaccatggaatcagtggagagctatgcaatttaacaactgcaaagaatcttagagatccttagagtaacacatcctcttatttacaaatggggaaacagggtatacgagtagaagtgacttgcctaatccataagctaggggtacaacagggtcattagggccatcctgttcaatttctccctgatatgatcctagcgatggagtacctaccaactttctttacaatagcccaacgtctagtatgagaatcattctgtggacactcttccaaattgaaacaatctccttggattactcctggcacagcttatgtattctcatagccaatcccctggtcatgactctgacactagtagataaaaagtatcactctaatctcttgatcttttcatcatgcctttatttttacacatgcagtactcagagtctaaacaaaccttagcttgcattttcctcttaaaagcccaccatggatctcacagttttgttgttgttgttgttgttgttgttgttgttgttgagacgggatctcactctgttgccaggctggagtgcagtggcacaatcttggctcactgcaacctccgactccttggttgttcaagtgattctcttgcctcagcctcccaaatagctgagattacaggcacgcgccaccaggcccagctaatttttgtatttttagtagagacagcgtttcaccatgttggccaggatggtctcgatctcctgacctcgtgatccacccacctcagccttccaaagtgctgggattacaggcgtgagccaccgcgcccggcctcttgtagtttttaaaattaaatttaatccaataaaacatttagtttgcctttatttggaatttgttatctattgttatatactctattaatacctcctcttcagcaaggaaattttcttacatctgcttacacgtacatcatttgttagagcccctaaatattggtaatgatgatgatgatattatagcatgaattactttacgttgaacattggcctaagtgctttaaacacattatttgcctagcatttacaacatttttgtaggtattatttgtcacaattacattttcttgttctatgatataatttgttttgatatcgtattagttttctattgttcccctactgaattaccacaaatttattacattgtgggattgtaagtctgaagtccaataggggtctcactagcctaaagttaaggtgtcggcaggactgtgttctgttttggagactctaggagaaaatctgtctccttgccttttccagcttcttgatgccattcatagcttctttcatgatctggcatcctatacgttatacttattttctgattatattttgcctaacctctgtgagatattaattatttgagggcagagatttttatttgtttgttcataactatatccaggtgccttaaaatgatgcctgacacaaaataggtactcaatcaacataggttaataaatgaatgagcaaaaagttttattgtgcatattaattgttacctgggggaatatactcagacatcttaagtctcatatgtaaacttggggtattgatatcaacatgccattttgaggattaattgaggttatgtctataaatacctactagcatagtgtctagcacatagtatgaaaacattgtattattattatttattaaaatggcattttgttttctttatagcacctgacactatccaaattgccttttctgtttttttttttttacttatttcttaattgtttcacaaaggcagagtcttgtatgctttgcctctatgtctttagtacctagaatagtgcctgtttaaaagtaggagctgaataaatgtttgctgaattaatattaatcatgtgtaggaaaagaagcttgggaatgttattctaccacccacagctgtgcccactattatgatggttgttttgtgtgttctttctcaaggattcactttcagaactcaaaatggggtgtagggtggtggtggtgccagcagtggggatgggagaagctcgatctctccctacagtagaagtgcttactgctctatgtgttcttcagccctataagaaccaatgaaagccatccacacttccctcgatactggacatccctacatactcacagcagtctgcaaaacctcgtgc

SEQ ID NO: 61367 - DNA, 495 bp, Homo Sapiens
tttttttttttttttttagagagacggaggcccgtctgcctcccctgccagctcctgctgattgctggtggctgcctcctgagttctggggtccctctcttgacagtggtaagagtgccaggaacggagcgcgtttgctgcacaccatttgccattggtgcatcgagcacactcccagctccaggattatgggaagacctttttggggtacagacttcccctccctgcaacaaagaggagctcttccatggcccccaccctgaggggcacaggaggtccacggcctggaaacttcctatttcctggggctggcccagggcttctagtctggccttccataaggcatgggccaggatgctggccctgggggcctctcagctcagccccacgtgcccctctgtggactctcagtctcacgtttgtcagggttctgccatttagaaatgatcagcccacctctagaccaagtgcctgcctggaatgtccctcgtgccg

SEQ ID NO: 61368 - DNA, 2149 bp, Homo Sapiens
ttttggcaactacactgctgaccttgtgctgagctcagggagggaggtgcagcatgcagacagggcccaggtaggggtgcagtggctgacagacttctgtcttggcacagccattaggctcaggcccctgtgtgcgggctcaggtccctccttcatcacagggtggtattggcaccagcctgggggagcagttcatggggctgggtgtgctggaagagacatgctgagaagttagggaccccaggttctctctgactttgttttctgtttttattttgctcacatagatttgtgagttgttaaaaaagaagggctcctggggccaagaactcggaagaggggtggtatttgggaaaaacagccccatcccccttgggtgccgtggcctggacaatcccagagcatcagcatacctgagttcaggattgagcccattatggccgagagaggccctggtccccgtctcaggaaagttgctccgaggctccaggcgctctaggaaccagaaccctgggctccacagcagggccaggtgtctcctcaggtgctgcggtctcatcttagtgccacctcagccagtgtacagccttgggcaagtcacgccccctcctggagactctgaaaatggaacagaaaggtgtggtcatctgtgtgttcctctgtgatctggaaatgctacaacctttgcttctaaggcaggtagtagccaggcatggggacggggcttctgtcagctcccctttgattttgtagacctctggctcttagcaaagagatgtcctaggaaggaagggcagtaccttggtgatcctgtcttgcacatatagactggagcttcagcccattctcacctctccttcacctgagacctgtggctgcagaaccagaaactcacttccagaagcagcagaatgtctctctttccacagggctcagaagtatgtattaagccttccattaactgcatcttactcagctggaaaaataatactcaggatgcaattttatctgatttctggcctgtaagctcctgaagggttctcttaagaaaggctcaaaaaactcctgcgctgtgtgactcggagcccagccctgtagcctccctccaaggagcaggcagcttcagtggttgaccagcaagcccatcatcattcagcactactgggttatccatctgtccgtctgtcaattaaacaagtgcttatgagggcctggggccaggggcacataccgagattactaagactaaataagacacagcgtgtgccctccacagcagttcaggcgcaacctgaccactttctctatttggttaaactccagaaagttcttgactttattattcgcagttcaaaagcagcatgagcttttgtgtctgctccccttcacccactaagtgtcatgacgagcaggcagaacgcccatatagatgccacacatgctatgggttacgatataggacaggaacaccgagcttgggggatccaccatcttgtggcagacagcaagcaagccagctttttgtctcagagggaaacattacctcatgtctcaggattggttgctgcaaacccaacccaggtacagagcagtcagagccttgcattctttgtctacccagcaagatgtgcaggaatgcaagaaactcatggagaagtgtctccaaacaatgcattagcattgcacatgtctggatttgaatcctacatctaacaatttaagtgcgaaattaagtgcgaaattgggtaaattgcaatggctgaacttctcagcctcagtttcctcttctataagatggggataatgcctactttccaggtgactgtgaaagagagtgtagggtcactcgtctgggaacacagtagtgaactaagaaagcccttgagttcaagaaacttagttgcacggggaatcctttcagctatgtattaagtatgcaatgccagttagtcatgtgtgtggaaaagaatagaggaggctgggcacggtggctcatgcctgtagtcccagcactttgggaggctgaggcaggagaattgcttgaacccaggaggcacggaggttgcagttagccgagattgcgcccgtgcactccagcctgggcaaaagagcgagactccgtctcacaaaaaaaaaaaaaaaaaaaaaa

SEQ ID NO: 61369 - DNA, 2079 bp, Homo Sapiens
ttttaagacactctagctgaaaagtaagagtgcaaatgtacccttttatcccagataagtttttaaaattaaaaactataataaaagcaaataaatacagttctggtgtatttaagagctgtatattttaggtacatatctaggacaacattagataacagatttttttgtttcattcctcaaaatatgtatactcacaatttcataaccataaattgtgatttttttttcccctagtctgaattggagaagcctagaggcaggaaaaaaacgcccgtcacagaacaggaggagaaattaggtatggatgacttgactaagttggtacaggaacagaaacctaaaggcagtcagcgaagtcggaaaagaggccatacggcttcagaatctgatgaacagcagtggcctgaggaaaagaggctcaaagaagatatattagaaaatgaagatgaacagaatagtccgccaaaaaagggtaaaagaggccgaccaccaaaacctcttggtggaggtacaccaaaagaagagccaacaatgaaaacttctaaaaaaggaagcaaaaaaaaatctggacctccagcaccagaggaggaggaagaagaagaaagacaaagtggaaatacggaacagaagtccaaaagcaaacagcaccgagtgtcaaggagagcacagcagaggtaagcatgtgtaactctaaactgcatctgtttcgttactatattataaatcataatttgatgctatccacatttgggtcttccccaaagcagagcagaatctcctgaatctagtgcaattgaatccacacagtccacaccacagaaaggacgaggaagaccatcaaaaacgccatcaccatcacaaccaaaaaaaaatgtgtaagttgtaaatattacatttcaaaccaatttcaaattattttgcaaaagttcctaaatttgtaaacatacatattgctgtatttaaattccatatatttagccccattacactaggtaagataaaatttttataaacttaccttagtgattgatatctcaataaactatcttgtacatttttacaggtgcaggcaaatctttataaatgaataccaaatagtatattatttcctatacagactttatgatatctaaagaaatcataaggtatttttaaataatcaccacacattgaccaggttgccttgtcattccacactacaatttttttttaaatgtttctcattagcaccttttcctttaaaaaaaaggaaaataggtcttatgcttctgcttttattctttgaacttgtagtaggaaagtaacaggtaccattttttaaaaattatatccatagaaattaacacatgttggtctcaagtgtttgatatcttgattttgtttgttttctaacccagttcatttatctacatcaacatgtatatagttttagatgttcacacaaacacatttataagagaggtacagtaagaatctgtacctcaaattttagtgtcaccagagtatcactgctgtaatttgcagatctgacagtgttttttctccttagttatgtgagtggaaatagagtagcatgtcttctattagtcagaaatttaacactttttctgagagtaatcccacccatacataattacatcagtggctcgacttttcagagttgccaatgtactgtcattaaatactcaattatcttagagattttcctattcctgtgtattccacaggaagaggaaaagttgcctgggtgtctagccagtacttcatgccatcttccatgtaatttttctatcaggttaaaagtaaaggtaagtacatttttgtggcagctttataaatgtgtttggattcaaccaaatcactatttctaaacaaaggattcttaaggaatcctttatttaataaaatacacatgaatgatgtaacaaggaaataacaaacctcataattttagtttgtttatatttggacatcataaaattcagggtttaaatgattattgtgctctcctaaaattacacaagtcctatgaatgttctaaaccaaacaagtatttcttaaaaaaaaaaaaaaaaa

SEQ ID NO: 61370 - DNA, 1659 bp, Homo Sapiens
ggccgagggaaacacaaccccaagcagcctggagtaagtggtcccgaggcagctcaagacagtttggttttattcatttcagagagacaggaattgcagggaaaatcatgaatcagtgcctggaaggtgtaagttccattggcagaaagggtgggacctgtggaaggggggttagaaggcacaggtagttgagggattctgtaggtggcagctggttgagagtgttgaatctttgtctaaagtttggaggaggtaggaaggaatgctgaaggaagggggtctgttatctgccacttcattccatcccagccaaaaaacagacctgtttctcgagattttatgaattctaaggcgtaactttacctttgccttgcgtggccttaggtcttgtttgtaatttggtatcttgttgccacaaggagtctgtttttccagtcagataatgtctgtttttacatgaatgtgcgtcagttgctgcatgtaaactcctaaagggagagggtataaggagacctgtctcacctcccatcctgtcatacagaggcactcaattttcagggttttttgggggttcccttggccaagagccagtcacttcacttagctgggaaggtactttgtttttgtttttgtttgagacagagtctcctgtagcccagggtggtgtgcagtggctctatcttggctcactgcggcctccaccttccgggttcaggcgattctcctgcctcagcttcccgagtggctgggattacaggcatgtgccaccacacccggctaatttttgtatttttggtagagatggggtttcgccgtgttggccgggctgttcctgaactcctgacctcaagtgatccactggcctcggcctcccaaagtgctgggattacatgtgtgagccacctcaccaggccagaaggtatgtttttatttttagtttacaggttgaaggctggacttttataaggtacatgaggagacaaaccagataaatgcttgattggttgcagagatgcagtcaccttatttggacttgtcaacccgaaataatcgaaagtttcagatttcaactggaagagtttattcaagcaaaaagatagcaatggcccatttgggaaaaacacagactccagagaaatggactcagtactccaaaattggaagttaagttcttgcttatattactgggaaaagaggtcctgatcagatcccaagagagttcttggatctcatacaggaaggaattcaagacgagtcggaaagtacagtgcaaagagagtttattgaaagctactctgggccagcatgatggcttgggcctgtggtctaagcactttgggaggccgaggtgggaggatcacttgaggtcaggagtttgagaccagcctgggcaatatggcgaaaccccatctcttccaaaaataacaaaaattagccgggtgtggtggcctgcacctgtagtcccaggtactcgggaggctggatgggacagtcgcttgaacccgggaggcagaggttgcagcccagctgaggacacgccactgcactgcagcttgggtaacagagtgagaccccatctcaaaaaacaaaaacaaaacaaacaaacaagacagagttcaagaccaacgtggccaacacagtgagaccctgtctctattt

SEQ ID NO: 61371 - DNA, 1356 bp, Homo Sapiens
gataaatcagatggcatcaaaattcagaatttctttcaaaattagaaagacacttaacagaatgaagacaggatacagaagatgtatcttataaggggcttggagtatataaaaaattctcagaactcagtaataagaaaacaataactcagtttttaaaatggtccaaagatttgtatagacacttcactaaaaaatacatgtacatggctattaagcatatgcaaatatgctaagcatcattagtcaaaaccataatgagacaccacttcacacctgctaggatggctataatcagaaagaacaggtaagtgttggtgagcattgtagaaaaattggaaccttcatttgttacgctaggaatgtaagatagtgtgactgattttggtaattcctcaaaaagataagctgagtaaccatatgacccagaaatttcatatacccaagagaattcaaaaaatatattcacacaaaaacctgtatatgagttagcagtattatttataatagccaaatagaaacaacccagtgtccatcaactgatgagtagataaatgtgatctatttgtaaaatagaatattacccagcagttcaaaggaattaagtactgatgcatggtacaacttggataaatctcataaacattaggataagtgaaataagccagtcacaaaagaacatattttctatgatcctatttgtgtgaaatgtccagaataggcaaatctatatatagagaaattagtggttgtctggaactggggagagcagatggagtaggaagtatccactaatagttacagggtttccttttgggatgatgataatgttctaaaagattatggtgatggttgcgtaactgtaaatatacttaaaacaattgaagtctttaaattggtgaactttatgacatatatctgaataaaattgttaattaaaactactgtgagatatcattacatacctattagtgtggctaaaatggtaatagaatgactgaccgtaccaagtgtttgtaaggaggtagagcagttggaattttcatatactgctggtgggagtgtaaagtggtacaccacttcttctggggagcagaaagcaaccttccgggtacaggtgagccaaggttgatgggcagttatgcagagggagttgggatatcactgtgtgtacctgtgcaagtcctggagtgtgttgggtcctcatcagcagggctgtatgaaggtgttcattaaaacaaaactactgatagtgtggcaggagctagaaaacacccctttcttcttagatatccctccagcacctctactggcaaagtttaactgcccctagccaaaagaaaagaaaaaaaaaaa

SEQ ID NO: 61372 - DNA, 1834 bp, Homo Sapiens
aaggaggaagctggttcctggcctgcccagttgcgtgtagattctgcagaagtggcctccctttggggcagtgtggaaaaggggagaagagaggcctcattctcgtgcaggagcctccggccatcctgatgctgcccagccaggtggccttgtctgagcgagaagctctgggatggacgctgacccggctctgagccgcacacgccacacacacgtgtgctcccagggtgggccatgggcacagtggagggtggtggctgtgtttgtctctggatttctggggtcccaaaggtccctctctgctgtcacctctctgagtgtccttggggagagttttccaatctctgtaggtgaaaccatgtttggaaccctggaaagcatgtggagctggggcccccagagaggcctcctcccctggtgccagggtgcccacttgcagcagctgggaggctggcctccctgagaaaccaccagaagcaggcagcctcagctggacctgtgggcctgtcatagggagtgtggcagagggccttccatctctccccagggttgtgtctcgcaagtccctgggctgaagtgtgggaggaagcaatgtccaagagttggggaggaccccggccagccaggggaagaggccctctgtgccccatccatgtacagcctcctgccctgcctgggtgtgatggctgtcccatgggggagtgggaggcccaccagagggatggcttggatggggtcagagcccccgagggagggagtgcacagtcacgtgtggccccaggagtgcctggagcagctcccgcctgagctgagggtgccctgtcccaagtgggacactcacccacagggcccctcctcactcccgtcccttccccgtccatcatggctcgggggtgtcactcttgtccccactgcctggattttctttcagggagccccagactctggtaaatgctctgcttcctcctgcctggatacttctaatgaccctgacgacctggacgtgctcagaacccggcatgccaggcacacccggaagcggaggcggctggtgtgagcagcaggtgagtcctgagtggggaggccactgccctacaacccaggggacagagtggtgtccagatggcagggggccttggcctctgctcggctctttggcgctcacagcaggtgtgctgggttaggtgggcaggtccagggtcatggaggccctccagggggagaagcatttaacccacatccttcctgctggccacccatgcctcgggccttggcaccactgtgcccctgaccataggctcattccctgcctttggggtctgggctcctccctggccgctgtgctctggtggtgccctgttcccgtgcattgctgcgtcgtctcccagcttgtaaaacgatcaccatccccaaccgcagccaccaggctggctcttcactgctggagccctggtgccctggcctggcccttggcgcatgtgggtcaggtttaccaagcagactgggcgtggccggcgctggggtggtcttggttcctgtttgtctgtcccagccctgcttggggtctggctggggtcaagggcaccccccacctggtgttcctgtgttccaggacaagcactttctcagaagcccgtggccctgctgacgagagacagcccacccccagcctgcaagagaggcagccagaggccaggtatctgctggccgctgactgaccaggtccgcagtgaacagaggcgggcctgccgactgactgtgtggcatggagcatggctgttccccaagtgcacacctgaacacttggaggaataaagttctgtttttaattgtg

SEQ ID NO: 61373 - DNA, 1625 bp, Homo Sapiens
acagcggggcgtcacctcggacatacgaacagcgggcggtgttcccggctccgtggggccgtcttcccggcgagtccgcgacggtcgccgcccacggcgagatgaaatctcgctctgtcgcccaggctggaatgcagtggcgtgatctcggatcactgcagcctctgcctcccgggttcgggcgattctcctgcctcggcctcctgagtagctgggattacaggtgcgtgccaccacgcacggctaatttttgtatttttagttgagacggggtttcaccatgttggtcaggctgttcttgaactcctgacctcgtgatccgcccgcctcggcctcccagagtgctgggatttacaggcatgagccaccgcgcccggcctgttttttttttgttggtttgtttttgagacggagtctcgctctgtcgcccagcctggagtgcagtggcgccatctccgctcactgcaagctccgcctcccgggttcacgccattttcctgccgcagcctcccgtgtggctgggactacaggcgcccgccgccacgcccgtcaaatttttttttttttttttgtattttttggtagtgacgggtttcaccatgttggccaggatggtctcgatctcctgacctcgtgatccgcccgcctctgtctcccaaagagctgggattacaggcgtgagacaccgcgccctgtccggcctgttattatacatatgattgatatctcgtgactccctaaaatgaatacaaccaagctgtgccccgaccaccttggacccacgtcgtcaggatctccggaggctgtgtcatgggcgtccttaactttgggaaataagcctcctgaaatgattaagacttgtcatttttctcgattgacattgataagcactgagagatcctcagtgaaggtaacccggcctgcagcagttcgcctattgatcctcggtattggcttggcaccttattgcccaaactggtaggatgattgctgaaatctgggaccttgttcctccagggatccctgatcttccaacgtttttcggtggggggtctgaggtttatttgctgttaaaaaactccttttttgggagttcccactcgcttcatcaaggaaggcaagcctgcctgcttctgcatcgacagatagccgtcttcagcttgagccccatcactagatgtgtcttgtataactatcccacagctactaagcagctggctgggactcaggatcaacgttggcctgactctgaagcccatgcacctccatagaccacactactcagccaggtttcctggaccttcaaggggctggagtgacacttctgaaataggagcaagatttttttgagaatgtcatcccatccatccattactcttcaccattggaaataattcactccagggaatggttctgaagtctcttgggaaaagcgaaacaatttgagaaaattgctgagcattgggtttaggaaattaatgtccaacattacatttttaatttatcataggagaaatttgaaaacacctataatgcactgatcatatctgcaaactctttgtattttttgtatttgttgactatttatgatttttaatatagacaaagtcaaattactgttcctg

SEQ ID NO: 61374 - DNA, 1677 bp, Homo Sapiens
gaggcaaatatttattttcattactgcccaacagttttctaaagtgttgtactcttttaccctcccaccagcaatacgtagtaggtacagttgttctacattctcaccaacacttagtattttcagtctttttcattttggtcattctggtgaatgtgtagtggtatactactgtggttttaatttacatttccccgatgagtaggaatattgcttaccttttgatgtgtttattgaacatttggatatcttctttgtgttatgaccattcagacatttgttcagtttttattttacttattgatttctgagggctctttgtatattctagacatgagtattttgttagacatgtgtattataaagtgaatattttgttctaaacagtgtcttgaatttttactttatgttttactttgaatatgttggtaatcctagggacctgtgaaatatgagggaagtgtgcagcagagagaggaaactgtaaggcaagaagtggacccaccttaataaggggaaaacaagaatgacatttaacctgcagagcaatttcacttggagacaaggacagctggtcccttgaatattggatggtggcaaataagacatccaagcactaagagggcaggcagagaagagttgagaatgaagcaacagcatgcttatggtggctgatggccaggtagtgagtagacaagagtggggctctggacatagatggtctgaatttgagtcctgtctcccacctactaccatcttgtgaaggtacttaaccactccaagttcctaattttaaaaaagcaaaagtaggaataatgcgagcacctacttcatgggtttgttctaatggtatactacctatccccatttttcacatattgtgaatacttaatatataacatcaaaaactacaactcctatgctgggaaaatattagaacaaataatgtttgttgttgttaatatttgtttacttattggaattggcttcagagatactctacaaataactcttggggtagagatggatgttctagcagatttgggagtcaatcagaaattggctcctgtttcagaaagttacagttattatggacttgtgacatttctgttcagaagtctgtatctggcatcttcccgcacacatgtcttgctttcaagtgctgttcagttatgtttggaatgagaatggtggtctccctacttctgcttcacttcttccacaaccttgctgacttctaaatagtttcctgcttagaatccttaggaggaattaggatctcctttcagccctatcttgggactgacttacattcccacatgtgtccatgtgcccctagacaatctaaggagagtctagcttgccacacatgtgaaatcattcccagttcacaggtgggaagttatgggaatgaagaaaatgtgggggaggtagcaataaaactctctacttacatttcattgctgcatctgctataataaaatgagagccaagagcaacttattcccttgtgacatgatgacacacctctggatagatgtatattcagggatatgggtgggtggagaatgttacaaacactttctcttccctagtatcctattacctgtctgaagaagtacactgtgtaccttcgtatcactatgtcctataaaaaaaaaaaaaaaaccggaattc

SEQ ID NO: 61375 - DNA, 1511 bp, Homo Sapiens
attgactaaacctaactagaagccagaggccaaaggaatctgtcgatatacaagctagcttcccagtggatggagcaggatggagaagaggaagaacgggcctggagggacaaacaaagggttaaaagaaaaggtccatccacatcgtggcgctggggaacgagggggacacattccaccaggacaaccggccgtcggggcttatccgcacttacctggggagaagccctctggtctccggggacgagagcagcttgttgctgaacgcggccagcacggtcgcgcgtccggtgttcaccgagtatcaggccagtgcgtttgggaatgtcaagctggtggtccacgactgtcccgtctgggacatatttgacagtgattggtacacttctcgaaatctaattgggggcgctgacatcattgtgatcaaatacaacgttaatgacaagttttcattccatgaagtaaaggataattatattccagtgataaaaagagcattaaattcagttccagtaattattgctgctgttggtaccagacaaaatgaagagttaccttgtacatgcccactatgtacctcagacagagggagctgtgttagtacaactgaagggatccaacttgcaaaagaactaggagcaacctatcttgaactccacagccttgatgacttctacataggaaagtattttggaggagtgttggagtattttatgattcaagccttaaatcagaagacaagtgaaaaaatgaagaaaagaaaaatgagcaactcctttcatggaattagaccacctcaacttgaacaaccagaaaaaatgcctgtcttaaaggctgaagcgtcacattataactctgacttaaataacttgctgttctgctgccagtgtgtggacgtggtattttataaccccgatttaaagaaagttgtagaggcccacaagatcgttctctgcgctgtaagccatgttttcatgctgcttttcaatgtgaagagtcccactgacattcaggattccagtatcatccgaactacccaggatctttttgctataaacagagatactgcatttccaggtgctagccatgaatcttcaggcaacccaccattacgagtcattgttaaagacgccctcttctgttcttgtttatcagacatccttcgcttcatttattcaggtatcttgtcaagtggttctggttacttacaatctcataagctttggaaatgaaatgtgcctgtgacactcaagggtactggttagttttacagtggtctttacctaccatctgagattaagattatacatgaaatattacttgctttatatataagaattggtccaagctttctgttttccttacaaatgtacttgcctcatcttttccctatcaatttcattttattgtggtaaaatacatagaacataaattttaccatctcaaccatttttaagaacacagttcagtggaattaaacacattcataatgttgtgtaactatcaccacc

SEQ ID NO: 61376 - DNA, 2199 bp, Homo Sapiens
ggcctttttttttttttttttcaaatgcccctttcattatgaaactcttttttaacttttaatttaagttcaggggtatgtgtgcagatttgttacataggtaaacttgtgtcatggggctttgttgtacaggttgtttcatcacccaggtattattttattttcattttagttttttaaatttctttttagaggcggggtctcactgtgttttgcccaggctggtctcgaactcctcctggtctcaagcaatcctctcgcctctgcctccccaagtgttgggattataggcatgagctactgcactcagcccaccatttgttttaaaaagggtggatcctatttgtataaaaagccatgtgcattttctgtgtacttgtctacacattaatttccaggctgggcgtggtggctcacgcttgtaatcccagcactttgggaggccaaggggaggcagatcatgaggttaggagatcgaaaccatcctggctaacacggtgaaaccccgtctctactaaaaatacaaaaacaaaattagcagggtgttgtggcgggcgcctgtagtcccagctactcaggaggctgaggcaggagaatggcatgaacccgggaggtggagcttgcagtgagctgagattgcgccactgccctccagcctggacaacagagtgaggctccgtcttaaaggaaaaaaatttctggaatgatgtccaataaatcagagagagggactagaagactaatgaggacagaagcttttattcttaacacctatattttgctaccatttatattgtcatcatatgcatataacattttaacatttaaaaactagtttaaacagaaatggttgccctggaatgtggcctgtgttctttcaagggaggccagcagtttctacagtggctgagatggtaccttcatctcacacacctacgcaggcgtgcatttgtgctttgatgtggttgtcccttgaagaaggaagcagttctctttttcttttttcccttttccattataggatcagtcacttcttggggcattagtagtctcatttccagtggcatcttcccttggcaaaaggaatcccagataggacctcatctttctaaacaaatgctgttttgggtcctaaccatcccatgtttgctttgaatatgtttaagttgcctggaattatcaacaaaagaattaaatttattgtaggtcagggcatcttttgactcattgtataaaacattcactttaaatgtataccgaaatgtcctttaggctgggattacaggcatgagccatgacacccggcctgtaattttctttaaagactgccactgggtggaacccactgggcccagtgagaactacggaaaagagacccattcttgccctcattgttagtgtccacatccggatttacctaaaccccacccaggtggcatttgcatagtaatgaaaaaccggtattttctagctgtgaatcacacttcaaatcctgagcggctgactgtcaggggtgcgtcaggcctgcttgctgggagaatggacgagctggttgtggagcgggcgggtcccgccacccgtgggctcagcactggactgctcccagaacattaaaggtctggctgatgttccatgccacatctggacatgaagacccatgtctgcccttctgtagaagggccaaagaagaaaggaggcatcacatgtttctgctgtggggggcccttccgagcagcagacaggagcaaggtacaggagtggcctgattctggggtttccctgccccccctggggtccctaaactgctgtgtgatatgtttctaactatctggacagctcacccaagagtcagttgttcccagtcgcttcttgctgaggataagccaaaagagggccgggggccaatctggtttctttcaagtgaaattatgcttctcaagcagagaatgattgcccacagcagttaaaccttgtttaatggtaattaaattgcttttcttcactttgaaaaatctcttaattttctgtacaaaggcaggaagcatttttctttgattctacaggatgtttctaagtatggtgtaatcagttcatcttaccttgccgggctctgaaagaatgagtgtgtgggatcagatttagaaatgcctcaaaggttagaaagccgagtgctgccgattaactcaagctcagatgacc

SEQ ID NO: 61377 - DNA, 488 bp, Homo Sapiens
  misc_feature (1)..(2): n is a, c, g, or t
  misc_feature (4)..(11): n is a, c, g, or t
  misc_feature (14)..(19): n is a, c, g, or t
  misc_feature (21)..(21): n is a, c, g, or t
  misc_feature (25)..(25): n is a, c, g, or t
  misc_feature (54)..(54): n is a, c, g, or t
  misc_feature (404)..(404): n is a, c, g, or t
  misc_feature (422)..(422): n is a, c, g, or t
  misc_feature (460)..(460): n is a, c, g, or t
  misc_feature (467)..(467): n is a, c, g, or t
  misc_feature (484)..(484): n is a, c, g, or t
nntnnnnnnnnttnnnnnntngganaatgcttctggattcttgaaatcactttntggcaagctatggttggatcttctcctcttctcatgtattctacagcttggtagcttggcaggaagcgcatcaatatatcaccattcccagtggctgcggctgcccctgcagtatcgtcagcataggctccagctccaggtattggtgagtctccaatagtgtcatgaccacgatcatcttctgtttctttatggataggaatatcctgctttaagataccaggtggtttgtagggtccgcagtattttgagggatctggtataacattcctccaataatttggctggcaattccgagcaagccaatctgaatgaagagcttgagaagcactggtagataagtcttcaantgataaaccccatacttnggagcaaatgtggggggttgatctcccactaaaagggngtgtgtnggttttcccaggacttnccga

SEQ ID NO: 61378 - DNA, 482 bp, Homo Sapiens
  misc_feature (58)..(58): n is a, c, g, or t
  misc_feature (62)..(62): n is a, c, g, or t
  misc_feature (91)..(91): n is a, c, g, or t
  misc_feature (100)..(100): n is a, c, g, or t
  misc_feature (134)..(134): n is a, c, g, or t
  misc_feature (387)..(387): n is a, c, g, or t
  misc_feature (402)..(403): n is a, c, g, or t
  misc_feature (408)..(408): n is a, c, g, or t
  misc_feature (413)..(413): n is a, c, g, or t
  misc_feature (426)..(426): n is a, c, g, or t
  misc_feature (481)..(481): n is a, c, g, or t
gtggtgtctctgccaggttttggtatcaggatgatgctggcctcataaagtgagttanaaangacccctctttttctattgtttggaatantttcagaangaatggtaccagctcctctttgtacctgtggcanaatttggctgtgaatccatctggtcctgggctttttttggttggtaggctattaattactgcctcaatttcagaaaaatatggaatgcttcacgaatttgtgtgtcatcctcgcacaggggtcatgctaatcttctctataaggttccaattttagtgtatgtgctgctgaagtgagcacgggtctataatttttaaacgcggggcttgtgctgcaagggtggtggtcagggtccaccaagcagtttcatcanggcttaaacttcccnnccccnaaatnaaaaaccaaaatnaaatgccctacttaaaaatacttacttaattataccttaaaaattaaacacttanc

SEQ ID NO: 61379 - DNA, 1530 bp, Homo Sapiens
atttttttgagacagagtctcactggagtgcggttgtacaatattggctcactgcagcctctgccttctgtgcccaggcaattctcttgcctccaggagaattgcttgaacctgggaggcagaggttgcagtgtgccaagatcgtgcccctgcactccagcctgggtaacaaagcgagactctgtctcagaaaaaaaaaaagaaagttatctctaaaaataaggaattgcttaaaagcattattgtttttgattgagttactcttattaaaactaaaattttgtagttattctatttaattttaattgaatgtaatatcaaataatctaaccagtgatctgttggtgtgatggcctaatggcattattgtttttgattgagttactccttattaaaactaaaattttgtagttattctatttaattttaattgaatgtaatatcaaataatctaaccagtgatctgttggtgtgatggcctaatggcaaataaagtctttgcatacaagtttataatgatttgaaaatctcatgttaggaagagtcctttgagtacaactgtagagtaatagtagagtagagattgcatatgaaatgcatggcctctaatttttttccctttatttaaaccttcccctcctttgttatgtagtgtagcatattatttcccaaaagtgccactttatttcactgcatacaagttgagttttccttaaaattttttaggtgagtacccagaacatgaagatgggtgggctgccgcgtacaacacctccaactcagaagccccctagtccccctatgtcagggaaagggacacttgggtgagtatataagtagtaattgaaaaccatttcatgtagtattgtttaaaaatgaagcacaacatatttaaattattttttgaatatttgaagagagaacattttctttgtaggattgttgtttgtgtgtataacttcctcttctcttgggaaacacatttttatacttcagaaagatttgtttagaaattgtttttctagtgaattttaaatttgaggtaaaatcctagcccaagttcatagtttattgtaaattgcagtctaattttaattccttttctttcagaaaatgtatatagtcttttatattacagtttaactccaactatcctttttaagctgtgtagattataaaattctataaaacttataagaatattgagcttcaggccaggtgtgttggctcatgcctgtaattcccaaagtggggattttgagagaccaaagcgggcagatcacttgagcccaggagtttgagaccagcctgggcaacatggtgaagccctgtctctacgaaaaatacaaaaataagctgggtgtggtggcatgcacctgtagtcccagctacttgcgaggctgagacaggaggatcacctgagcccaggaggttgaggctgcagtgagccgtgatcatgccactgtgctgcagcctcagtggcagagtgagcccctgtctcaaaaaaaaaaaaaaaaaaaaaaaaaaaaa

SEQ ID NO: 61380 - DNA, 1819 bp, Homo Sapiens
tattcaataaggactgttatttctagtatagagaggagggctcctaggcctggctaagcagtttaagataaaatgcaaaatgacccaattcaggatgattatagttggtttaaatttggttgctgaggcacaaacaaaagtgttggattctgtagtttttgttgtgattacagaacacatgcagtatcttccagaaccctttgataaagctgaagtaaggatgggctcacatggcccatgtgagtaagaagctgtgttgacagagtggacgataccttcaattatggcttaacaaaaaatgcctgaaaatggaataacttagaaggaactcttcctttaaaggatttaatggcaggtgcagtggcttacgcctgtaatcccagcactttgggagcctgaggcagaagatggcttgagcccaggagtttgaggcagcggtgagccataatcataccactgcacttaagcctgggcaacacaatgagaccctgtctcctgtctttaaaaaaaagagacagagacctacctgtatgctaggagcatccttctcactgtaggtcggatgtggtggttctgttttaaatttgctgaattgtgactttttttctttttcttttttttttttttttttttgtttttttttgaggcagggtctcactctgtcgcccaggctggagtgcagtggtgtgatctcggctcacttcaacctccacctcctgggttcaagcgattctcctgcctcagcctcctgagtagctgggattacaggcgtgcaccaccatgcctggctaatttttgtatttttagtagagatggggtttcacaatgttgcccaggttggtctcgaaccgctgaccttaagcgatccgcctgccttggcctccccaaggtgctggaattacaggcatgagccaccgcgcccggctgactttttttttttctttctttctttttgagacagagttttgctcagtctcccaggctggagtgcaatggcaacaacatggctcgctgcagcctcaatctgctgtgctcaggtattcctcctgcctcagcctcctgagtagctgggactacaggcgcatgccaccacacctggctattgtggattttaagaaattttttttgtagagacagggtcttactatgttgcccaggttgttcttgaactcttgggctccagagagcctcccatctcagcctcccaaagtgctgagattataggcgtgagccaccacacttagcctattgtgactttttagagtctctaatactttcttttagggcactaaaaacttaatcttagatccagttggtattcatttgggtgaatgaagtggtagggacctaccttaattttttttccaggtttttgtgattgaataagttccagatactcaaagcgacctagatcagtgatgaaatttttgactgcatttggacctatttctgggatctccttttactgatttctctgtatattcatgagcaaccttaaattattttagactatttaattattatgttctattttctggaaagttttgtccttcactcttctttttcaaaattttcctgattgttatttcataaatattttttcacagaatcaactggttttgaacctcaatttacttataggttaatttagagagaattgacttttaaaattatattaaaggccaggcatggtagctcatgcttataatcctggcattttggggggctgaggcagatggatcacatgatcccaggatttgagactggcctgggcaacatagtgagatctcatctcttaaaaaaaaaaaaaaaaaaaaaa

SEQ ID NO: 61381 - DNA, 1749 bp, Homo Sapiens
aagtctagttaaactttaaacaaaggatttatgaacatctctacttccctcagtgagtttttttttttttaacaagtaatattttcaaggaaaggaaaatggacattatgatggctgtcttttgtccttttgtaaatggtggttcttctagagctgtgctatctaatatgatagccactagtcacatgtagctatttaaattaaattaaaaatttagttcttcagtcaaaataaccccatttcaaggttcagtagctacaaatggctagtggctagcatattggaccacacagatacagactgttttcatcattgcaaaaagttgtattaaactctattgtatagaatattttgctgaaatatagtatatgtggctgggcatggtgtctcacacctataatcctagcactttgggaggccgaggcgggcagatcacctgaggtcaggagttcaagaccagcctggccaacatggggaaaccgcaactctactaaaaagacaaaaatttgcctggtgtggtgacgggcacctgtaatcccagctacttgggaggctgaggcaggagaattgctggaacccaggagggcggaggttgcagtgagctgagatcataccactttactccagcctgggtgaaagagcgaaactccatcccatctcaaaaaaaaaaaaaaaaagaaatataatatatgtaacatcataaatacataagtgaaattaaaatggatataatataagacacttgaggtggggtgtagtggctcacgtctataatcccggcactttgggaggtgaagacaggaggatcacttgagcccaggaggtcgaaaccaacctgggcagcaaagtgagactccgtctctataaaaaagaagaaacttaaaaaaaaaaaaaagacacttgaaacaggaattgacttcatcagaaagcaaagcaatagtacaaattaatattaagctctcaatagatattttatttggcctcaaggaagaggaatttaatatctgagtataaaaaatgcgtacaagcagtttgagcagctagcctgctgaagcaatgccttatcaaaaataacaaagtttcagttttgaatcagtgtcaattatgtatatgaataataaatataattacaggagttttattgtgtaataagaaaccataatggaagtatatatgtgctttcagttatgaagttatgctcgtcagccagaattttttgaaacaaatatcatttttgttattgtgatgaatacctttattaatgttacactattgactaagaagttgttatctttttaccctaatgtgcaccttgctagcagatagaaactagtgtgaaacaggtagcctgtgattctttgaattgtcacattttaagtacaattggctaacttcatttttctgtcccaagcctacttagttgtacttgttaacactttaaggttatttagatcagaagaaatctggatgtctcaggccaggtgcagtggcttacacctataatcccagcactttgggaggccaagacgggcagatcacttgaggtcaggagttcgagaccaggctggccaacatgtctctactaaaaatacaaaaattagctggtcgtggtggtgcacgcttgtaatcccagctacttgggaggctgaggcaggaggatcacttgaacctgggaagaggaggttgcaggttgccaagccaagataatgccactgcattccagcctgggtgacagaatgagactgtctc

SEQ ID NO: 61382 - DNA, 1982 bp, Homo Sapiens
tgaccttgtcccttctgtcacggtgaaggtcacactgcagaacagagtgatattgcaaaaagccaaattatcagtctacgtgcaaccaccattagaattgacttgtgatcagttcacctttgaatttatgacaccagatttgactagaacagtaagcttttctgtttatctgaaaagaagttatacaccatcagaattggaaggaaatgctgttgtttcttattccagaccaacagatcgaaatcctgatggcattccgcgagttatccaatgtaaatttagacttcccctaaagttaatttgcctaccaggtcagccttcaaaaactgcaagccacaaaattactattgataccaacaaatctccagtcagtcttcttagtctcttcccaggttttgccagtcagtcagatgatgatcaggtgaatgtaatgggttttcacttcttaggaggtgctcgaattactgttcttgcttccaaaacttctcaacgatatcgcattcagagtgaacaatttgaagatctttggctcataaccaatgagcttattcttcgccttcaagaatattttgaaaaacagggagtcaaagattttgcatgttctttttcgggatctataccccttcaagaatattttgagttgattgatcatcattttgagctacggataaatggtgaaaaattagaagaactcttatctgagagagctgtacaatttcgggccattcaacgccggctactagcaagattcaaagataaaactcctgcccctcttcaacacctggacaccttgttagatggaacctacaagcaggtaattgctctagcagatgcagtggaggaaaaccaaggcaatctgttccagtcattcaccaggctgaagagtgccacccatttggtgattctgctgatcgcgctgtggcagaagcttagtgctgaccaggttgctattctggaagcggcatttctgcccgtacaagaagacactcaagaattgggctgggaagaaacggtggatgccgccatttcccacctgttgaagacttgcctgtcgaagagttctaaggagcaggctttgaacctcaacagccagctgaacatacccaaagacacaagccaactgaagaaacatatcaccttgctctgcgatagattatccaaaggtggccgtctctgcctaagtaccgatgcagcagccccacagaccatggtcatgccaggtggttgtactacaatcccagagtcagacctagaagaaagatcagtagaacaagactctacagaactgtttaccaaccacagacatctcactgcagagacacccaggcctggtaagagactggatggccttcacaagcgttagttaagtcagaagcagtgacaatctggtcagtttttgtcataccagagagcattccgcaaagctgcttgttttccaatttcttcattcttccccttagcactggtgcagctgaatttgatcctttgtgtattcctgtcactattcagatcttttctctctctttctctcttactctctttttttccagaagtttcacccctccaaggagtctcggaataattcaagtagagttgtttggttgagaggaacatccccatctcaaggccgaacctgtgtgaacctcatgccaagcacagatatagggctggcgcaggtgcttcccaaagcttaccttcctggagatgacatgcatagaaagaggggttgggactttttacttcactaggagaacttgtaacaccatggggaagtcagctgaaacttgtcttgttttgccaggaaaggaagtagttgcctttggtcatccatctgctaatagtcacagaatacagtgaaatgacatagttttgggttagattttataatgcaaagattcagatccaaaataatttcataccccattttttcacagaattcttatatagtaaatgtatcaagtttaataaagcatctcattgtc

SEQ ID NO: 61383 - DNA, 595 bp, Homo Sapiens
  misc_feature (14)..(14): n is a, c, g, or t
  misc_feature (55)..(55): n is a, c, g, or t
  misc_feature (67)..(67): n is a, c, g, or t
  misc_feature (91)..(91): n is a, c, g, or t
  misc_feature (487)..(487): n is a, c, g, or t
  misc_feature (536)..(536): n is a, c, g, or t
  misc_feature (553)..(553): n is a, c, g, or t
  misc_feature (576)..(576): n is a, c, g, or t
ctttttggggtctnccctcccagatccaatcccaccagaatctaggctgggaagntctcagatgcanccaccagaatctaggctgggaagntctcagatgcagcctccacttccatcaagaggagaagggatgtcatctgtggttccacacagccgccccctgtctagtatcactgcaggctgcgggtggcactggacctctctggtctagtactcttgggccacccccaagcccactgttcacacctgtccccaacccataatttccccactccctcgacacttgaccctttgttcccaaccccactaggcctcaaaacactcctgggctctgggggtttgtcccaaagtcctctcattgggtgttagggcaagaagccacaattccaaactccccaccatgacagcaaacagaagcctcattataaagtaggcttcagaaggctcattataaagtagcttcagaaggctcattataaagtggctncagtatttgggtagatatggcgagtttcagggagcactgttgggtcatnctgacaggtcaggtgantgaaccgggcttgatggggattngagttttacagggcccttg

SEQ ID NO: 61384 - DNA, 482 bp, Homo Sapiens
  misc_feature (363)..(363): n is a, c, g, or t
  misc_feature (404)..(404): n is a, c, g, or t
  misc_feature (417)..(417): n is a, c, g, or t
  misc_feature (438)..(438): n is a, c, g, or t
  misc_feature (447)..(447): n is a, c, g, or t
  misc_feature (455)..(455): n is a, c, g, or t
  misc_feature (474)..(474): n is a, c, g, or t
  misc_feature (479)..(479): n is a, c, g, or t
ttttcagttttaaacatactgtttagtgaaaaataattcttttacaacaaaaacgattgttaccagcttcatataattaaaactgaaaaccaaattgtgtaacaggtagcataacatgtcagtttatattattttaaaaccaaatgttattccataatcatttatgcaacaaccccaaatttcaaacaatattgaacacaatacaaatttttcataaaaccaaacttttgggtctgagtaggcagtactggaatttaaacctaccattaagaagcccaagggggatgcttgctctattttaaagtgattggaaccgcaggagtgtttaacaggaccactttgagcagctggttccaaaccccntatacactccatctccagagattgttggatttaggtaagcncgaggggggctancagggcctatgggaatccccnaaaatggcnccccagcnatttccaatggaccatacnggttnaga

SEQ ID NO: 61385 - DNA, 382 bp, Homo Sapiens
tttttttttttttttttagagagagcgagtcttgctatgttgcccaggctggcctgtcttggcctcccacagtgctagggtcacaggtgtgatccactgtgcctggccgaggggtaaactttctgatatggattgagccagcacagaaccttccccaagctctactcttttagagacagggcctcgctcagtcgcccaggctggatggagtgcaaactatactcttaagtgacaaaattcacggcgcacaaaggtgggtgtggcggggaaggacaccggtgaacacatcgccttgcaaggatggctgtccccggtggcccggaaacaactaaagcaggggccctgagaacggagggcagcgggactcgatcgggggcaggac

SEQ ID NO: 61386 - DNA, 522 bp, Homo Sapiens
ccagacaccacaatgacttagagaatcatttcatctccaagagctgatttcaaattatgtaacagtaaatgaaagcactctgtaactggtaaagcattacaaatgtcgtaatattcacgatttaaatcatatatggatgatgtcataaataattctaaaaagttggtattttcaacataatcacattttttaacaactagatttttgttaagcttttcagcactattccagaaatacttatagaggaaggacaactagtagacaaactgttaccttatttcccaaattcacggttgggaagaagagctacttccactgaatgtaaatgaaacattccacaaaatcacataaatctttcaggacattcccaggtcaatggtcaaagcagattagaattactttccaataaccccaggtttcagccttacttctttgctgagatgacagtttggacaggctggatagaaaacagcaccatgcttgatgtccagtaccttgttttacattcaatagtaacctcac

SEQ ID NO: 61387 - DNA, 547 bp, Homo Sapiens
  misc_feature (62)..(62): n is a, c, g, or t
  misc_feature (141)..(141): n is a, c, g, or t
  misc_feature (198)..(198): n is a, c, g, or t
  misc_feature (220)..(220): n is a, c, g, or t
  misc_feature (229)..(229): n is a, c, g, or t
  misc_feature (346)..(346): n is a, c, g, or t
  misc_feature (351)..(351): n is a, c, g, or t
  misc_feature (514)..(514): n is a, c, g, or t
  misc_feature (519)..(519): n is a, c, g, or t
  misc_feature (538)..(538): n is a, c, g, or t
tttttttttttttttttttttcaggtagtaaattttacacatttttatttttaataataggngtaaataccttcccacaacaatataatgaacattacaggaaaattaaggcaacttattatttacagaatgcctttctgngcaaaacaggacactatactcttcctacacattaaagcattaaagattaaaataacnctaaaaggtacttattatcagngtctttacngaggcaattaccagtgttcagataaataaatgtcagagctaatccaaatatgaaacttgaaattttcccaccattctatacaaattcccacagcaaacagaggaggttattattttngatangtcagggaaagactttgcagaggaagtaacatttctgagatggagaaaactaggagaggaacaggttggagaacaggaatccaaaagctgtttttgggtcaagagatgcctactagacattccaagtggaaatggtaaagccggtaaagggttagagcttacngaagnggtccagtcagtgagagcnggtttttga

SEQ ID NO: 61388 - DNA, 2737 bp, Homo Sapiens
ctttctacaaacaacccttcgctgacgtgattggttatgtgtatgttgcaaaactaattcctttttctacatctgattctttctacttttgtttagagttaatgctccttttatgtcacaagttgctttgctttttaaattatttcaaattggcactttgggggctgcctaagaattgataagcggggtatgatctgttgatgaatcttccagatttgtgactccctgcatcctctgatggccatttttcatatttggggttttggagggaagaaagctaactcgctttcaaaatgtgtcatttgcgatcttatctgggaacggtttgaggctcgggggaactctgctctcttgctcttggctgccatcactgctgccatgccctgttgcctgcctgcctcaggtgggaaggaggtttccccacctgggagcaggtggcagtcccaggtggttaggagccagtgagcagcagcaccttgcattgccaaaatcagagctgtggggcagcatttttccatacttggttcattcaaacaatgtggggtcgtttgcctctccctcaggcagaagagtccagagcagagggggttgtctccagtgggtgtctataattgttcctctgtggtcttgcatgtcagaaattgctatttagtggtcagcttctgatgtcctgtctcctagcacagggaagcccccagctttgagatcaggatagtcaaagtgtcttgatacgggccacttgggcttctccccctgacccccccaaaagaaacctgcatcttctctggagaaggtgtttttcttattcttttttttttctttttttcttttttcttttttttaaggatttcttttatcaaagcagtattgctgaagagttggaaacagttctcattgtctcctccttaaaaaaagggctggctttacatgagaagtaagggtggaatggaagaggagaggaacctgtggaaggtgggcgatgagctcaggtctgtagagcctctcagggcctatgaccttgagatgttcatccccttagaagatagaactgggtttcctgggcccccagatgcatttgcagtgagacttgtgaaatgctggacttacaggtggtgtttgatttgatttctgcacattctctctggagtagaaatggagactggaaaggtcgagtctggttttgctgggcagctgggtggccagcaaagccagctgcacgtccccaagcacagatagagtggcaagggcatgtccagcttactgaccatctgcattgagctcattctcattttctatatctgacttaaagtttctctcgtttcttttcttctcttcacctttaagcacaaacataaaccatccttgctacagcctagaacagttaagtaaacctttctcactgcccctaactgtgtgtgccatgaagtcgcagtgttgtagtggctctgggcttcagcggtgtttgccacggccatccctgtgatagtgccacctcagtccccacagaccagtcatctccattgcttttctttgcccgtgatgcttgttggagtagatgaatatagtgtgtcttagcgctgtcctttccggctgtagctcccaccagttaattccgaactgggggtgggctgaccttgatgtgaaagaatgttggagcagcatcctgccaaaaagcaactcacgttggctctcctgccagtgtgccctgagtggccccaaggcacctggctggagggaaaatggcaaacttttggctgaactggagaatgtcctaacaaacccccttccagaatggctttagtctctagtgcttgctagcatgggagctttgtcttgaattccttttgatctgccccgtttctctccagccttaggaataaatctagaggctattgtgcaatgatctgtgggctttttagaagtctctaaatttccttgaaattcagtacagcccagcataaactactcaagttcttgatcagcctgctgctttgttcttattaataaaagcagtgtgtagctggctaaggacttgttttattaatgctccacaggagcagagacagacagagagacatagtgagccttgaaccaaacacctgtattccaacattttacacagcggtctgggcaccctgtgcctaggagagccagctacgtgtctacctgagtctgacctgggccaggggctgttatcttgggaaagccagaatgtcattaagaaagggacaaataggcagttgcttgtgtagcaaggcagccaccaggttgctcaaagggggttctgcataaaccaacatattttgttgttgcttccagggcagcagaagaagcctttgtaaatgacattgacgagtcgtccccaggcactgagtgggaacgggtggcccggctgtgtgactttaaccccaagtctagcaagcaggccaaagatgtctcccgcatgcgctcagtcctcatctccctcaagcaggccccgctggtgcactgaagagcaccctgtggaaacactacatctgcaatatcttaatcctactcagtgaagctcttcacagtcattggattaattatgttgagttcttttggaccaaacctttttgtctttagagttgttcattgtttgtgattgcatgtttccttccttcaactgtgttctccctggcattcagagaggagggagaggaggaagaggaaggggagggaagcttgcatgcctgcaggtcgactctagaggatc

SEQ ID NO: 61389 - DNA, 492 bp, Homo Sapiens
tgtgaatatagaaatagtatttttattaggcttggggccacattttggttagaaagtgcacaatcagatgacaaaaggaaggggtaagagcaagaggtagtggaagtcgctaaaataatttgcaaagtgaccaatccatctgtccacaaggaatgcatccatatataaacactcagatgtttctgggacggttgagtaagtatctaatccatgtcagaaaaatcagctacttttctcaggaggcctgccacaccaaacattcatcttcctacagtttttattcatgtttattggtatggtgccttgagttttcgatttataataacatccctctctcactgtgcagcattcaccaggtggttccacagccagcagaaaatgtgggctgacagcattgcctgacttcagtaatgagcagaaagcttccttaaaactgtggttctcaacctggttgtcacaacaaggggttgttactatgtctattggatagtg

SEQ ID NO: 61390 - DNA, 465 bp, Homo Sapiens
  misc_feature (438)..(438): n is a, c, g, or t
taatttcgtgagagataaaataatgttgatttggcagatatacaggtacaaactctgaagagtttagagtgaggaaagaaggtctctcgtgatgtgccaaacactttcaatgcctcatcctatttaatcttcactataacccttcaaggatgattttatcatccccacttgacaggtgaagtaattgggcctcaagaagctatgttaatgagatagcatcgataaagcctttggctccagaaggcactcaatcaagttaatgttctttcttccttgggtaacttattccaagtcactggatcagtaaggggcaggagcagaattcaaacctggacctatctgattccagacacccctgggctttctgtctcaccgcactgcccagacactaacaagccgttgggagaactgatgaaccgaatggagaccactgctctnttgctgttaaacaaagtggccaataat

SEQ ID NO: 61391 - DNA, 704 bp, Homo Sapiens
  misc_feature (594)..(595): n is a, c, g, or t
  misc_feature (603)..(603): n is a, c, g, or t
  misc_feature (626)..(626): n is a, c, g, or t
  misc_feature (672)..(672): n is a, c, g, or t
cttcccttttccttctaaaggaaatgatgaggggaaagaaaggaaggaaaacaacaatacaagcctcaaagcagatttcattctggtgtaatgacattagtgggtgatgatgtaatgggaataggtttggagccaatttcttgtggtggaggcctataaacagctgaacagaaattctagtacctgggatacaatatgatcttggagtttctgaagggagttaaagggaagtgttcaatcacagttgaaaatgactagataaaatcttaagtcctaaataaccaagtaagacccctgcattttcatttatcaccacatacacatggcctatatgctactctcttagatgtactgagaacaacaacaaaaaaattaaggtaatctagagaagtttagttatttatcattattaatagttttctacaaggtactcatgaaaatgaagacagtgactcaatttaaccttttttaaatggggcaaacaaaaatatctttctggaaataataataattatcaaaaagctttaaaagaatctaaccttttattgcatgggtccctggacaggcctcatcttggcacaatctgccatgcannactgctangtcaaaggagaaagatgcacaanttgccagacgatatctctgtacacttgctaatggatgggtaggttnagttggagtacaaagacctgtacgatttaaaa

SEQ ID NO: 61392 - DNA, 487 bp, Homo Sapiens
  misc_feature (115)..(115): n is a, c, g, or t
  misc_feature (166)..(166): n is a, c, g, or t
  misc_feature (323)..(323): n is a, c, g, or t
  misc_feature (479)..(479): n is a, c, g, or t
tccttattaacttttatttttaccctttttttatttgaataaaaattgcagtttttgttttttacaaaaggaaaggtcacacggcattgttcctcagcctgctggcggcctgtgntcccccggctgcagtgtcactaaggcagtgtggtgggctggccctgagctngcaggtgcacacgcttgcccgggaggttgacagtgggacgtttcttgccatgtttttggccccagcatgagccgatcgcatcagccaactccgcagatgagacaaagccaccttgcagggattcccatgggcttctgagggggccgtggctacattngaggataagaggattgaagctgagagcttctctgcagagggtgcacctatgcctgcctcactgcagccagatgcccagatgcctgggcctcttgatgtgcagtcccatcctttgctgaccccaagggagattacaaacccagaccggccagacggntgcctggg

SEQ ID NO: 61393 - DNA, 1158 bp, Homo Sapiens
aaatatcagtgtgtgaagctgaatgatggtcacttcatgcctgtcctgggatttggcacctatgcgcctgcagaggttcctaaaagtaaagctttagaggccaccaaattggcaattgaagctggcttccgccatattgattctgctcatttatacaataatgaggagcaggttggactggccatccgaagcaagattgcagatggcagtgtgaagagagaagacatattctacacttcaaagctttggtgcaattcccatcgaccagagttggaccgaccagccttggaaaggtcactgaaaaatcttcaattggattatgttgacctctaccttattcattttccagtgtctgtaaagccaggtgaggaagtgatcccaaaagatgaaaatggaaaaatactatttgacacagtggatctctgtgccacgtgggaggccgtggagaagtgtaaagatgcagaattggccaagtccatcggggtgtccaacttcaaccgcagcacgctggagatgatcctcaacaagccagggctacaagtgaagcctgtctgcaaccaggtggaatgtcatccttacttcaaccagagaaaactgctggatttctgcaagtcaaaagacattgttctggttgcctatagtgctctgggatccctccgagaagaaccatgggtggacccgaactccccggtgctcttggaggacccagtcctttgtgccttggcaaaaaagcacaagcgaaccccagccctgattgccctgcgctaccagctacagcgtggggttgtggtcctggccaagagctacaatgagcagcgcatcagacagaacgtgcaggtgtttgaattccagttgacttcagaggagatgaaagccatagatggcctaaacagaaatgtgcgatatttgacccttgatatttttgctggcccccctaattatccgatctctgatgaatattaacatggagggcattgcatgaggtctgccagaaggccctgcgtgtggatggtgacacagaggatggctctatgctggtgaatattaacatggagggcattgcatgaggtctgccagaaggccctgcgttgtggatggtgacacataggatggctctatgctggtgacgggacacatcgcctctggttaaatcaccaa

SEQ ID NO: 61394 - DNA, 183 bp, Homo Sapiens
tatacggctgcgagaagacgacagaaggggactcggagctgcagcctgcacgacccctgcagcctgtgctttgcccacccctttcaatagatggaacttgcttgctcttttttattcttctcaggattcattttttatttcgcaaaaaaaaaaaaaaaaaaaaaaaaaaaaagtcgtatcgat

SEQ ID NO: 61395 - DNA, 1252 bp, Homo Sapiens
aacctatcataggcactaaagaggaaaagcctttgaagcaggcattagtacatgcagtgttataattcatatgaatatgaggtacaaaagaagaggtgttgatgttttaaaaacattaatggctatttattgatattgcagaccacctagaggatgctaaattgaacatttagtgacagaagattttctcctggatactttaaatacataaaaacttggcagagtttttatgaaatataaattttattgtattcatttacatattaaaaaatagactcagaggcggaaaaacttccttgaaattgtttgtcatttgttctacagttacttactgaagtcattactatttaccaagcatcatgctaggtgctaggcttacaagagtgaacaaggagacagggttcctgtcattatagagcttaatctactggggaagattgagtgggaaagattgacttaaataaaacagtaagttcagaaagttaggaagtgttggagtctatatttaaacttaggtattttgacccaaaagcctgtactgtttctaacataccatgctgatgctctagcctccattttatatgcttaaacttattatggggcttttaaatagaatatgtattatccttgccagggcaaaatataaagaaataattgactgcctgctatatctgtcttcacctttctatccctattatctgtttttttattcctcttttttgtctcccttgtttcttaccctgacttatgtatgaagatctctagtatttctttactattgtgaggatgaccagcggagaggctagacagcaacaagcagaattggcccaacaggaatggcttcaaatgcagcaagctgcccaacaagcccagcttgctgctgcctcagccagtgcatctaatcaggcgggatcttctcaggatgaagaagatgatgatgatatctgaaattcaccagctgagtttctatttcttctataaatgtttttccctgcacaacaaaaacagtgaaagaaatgcttatctgtaattttgtatgcatcttggtggacttgtcattggtattctagggatgtctgctattaagtttcatctattgtgtgctatacatgtaaaaactgtctctttgaactattgaaaatttaaggttcagtataatatcaattttgaatttttaatggtgtttatgaaattttagatagcagcgagtccttcgtttgatcaataaacagtgttacagataaaaaaaaaa

SEQ ID NO: 61396 - DNA, 215 bp, Homo Sapiens
  misc_feature (27)..(27): n is a, c, g, or t
ttttttttttttttttttcagagttgnaatggaggactttattaactgaactatacttctgattacaacattctgtgtatgttaatagtttctctggagaaattacgggcacaggaagttcctctcattaaggatattaacataaagcttaatatgaaaaattagcactcagttcagaaatgacgacttcagaaatgacttcagaaatgacgatt

SEQ ID NO: 61397 - DNA, 445 bp, Homo Sapiens
  misc_feature (445)..(445): n is a, c, g, or t
cctgcagtaaaggtcaaatgaatttacaacagcactttagaggagaagaataaagatagttttatgacaactatagtatgttgctccaaaaatatgtatagcattataatgaacaataatgctgatccaattcagtgtacatgtaaaaatgcttagtttttttttttttttaacctcctgttatttggatttggattaaaatcatttggattaaaaaagatttggattaatcttttggattaaaagcatttggatttttcaacaaatgccaaaaagacagtatgccgaataacatagttattgccgaatgagcacagaaaatcattttgcgcaagatgtgggaaggatgaggatggatgaaactacacaaggaaggacggggtatgtggggcaacagtgatgaccagataactccactggtcagttggtacagctgggatttacn

SEQ ID NO: 61398 - DNA, 481 bp, Homo Sapiens
  misc_feature (243)..(243): n is a, c, g, or t
tttttttccaaacttcatgttccccagtcgggggtatttattttcatttaggaggaataaaggcttaaacaaaggaaggcaaacatgtaggggagaaacattcctgggtaagctcacctaagacagtttagggagacccaggcagacatttactgtggtaccagtccttggggcttttttccatttttttctttaagggtgtcttcctttcctcaattcctgggacattggcttagtggcagngatgctactggtgacactgctttgcaagagatctttgtagaacaatttctgtgtgtaaagaactaagccagcttactttcaagtttctctgcagcccttcgttgggcctctgttaccctggagattctgggatgtggtcttggcattactattttaccacttaatgagaaataggaaattgaactggctcttgaatgcttctagtaaacattgctattttagccctttgcaagagcag

SEQ ID NO: 61399 - DNA, 333 bp, Homo Sapiens
ttttttttttttttttttttttttttttttcctttgtaagaaggatttattagattatatggaaatggacacggtacagaaggtctgtggcacagtcagggttctgcaggaccccagagcatcagtagaaatgctggtgttccaccttccccagggccgcctttgcctgggcttcagagatgcagctgaggcctggcctccaaatgctgtgggcagtcctgcaggccatcctctgggcagactggcctgactcacggtgactattgtagtttctgtgaacctctgggttttggtcccactgttgtcgaaagccttgaccaagtgtaaacgaat

SEQ ID NO: 61400 - DNA, 2439 bp, Homo Sapiens
ttttgttttatgcaaacccagatggcacagcagtttctactgaggatgcactcaggcaggtcatcagctggtcacattacaaatctgttgcagaaaatatgggatgtgaaaagcctgtaattcataagtcagataatttaaaagaaaatggatttggtgatcaggcaaagcagagagaaaatcagaaatttccaactgataatatttcatcatctaatcggagccacagtcacacaggtgtagggaaaggaccagctaagttaagtcacattgatcaaagggaaaagataaaagacatttccagagaatgtgctctgaaagctattgaacagaaaaacttactttcttcacaaaggaaagatttagagaagggacaaagaaaagatttaggacgacatagagatttggttgatgaagacctttcacatttccaatctggatcacctcctgccccaaatggttttaaacaacatgggaatccacatctatatcatagtcaaggaaaaggatcatataaacatgaccgagttgtacctcagagtcgagcttctgcacaaataataagttcaagtaaatcccagattcttgctccaggagagaaaataactggcaaagttaagagtgacaatggcactggatatgacacagacagcagccaagattctagggatagaggaaacagctgtgatagcagcagtaaaagccggaaccgaggttggaaacctatgagagaaacattaaatgttgatagtatttttagtgaaagtgaaaaaagacagcatagtccaagacataaaccaaatatcagtaataagcctaaatctagcaaggatccgagttttagtaattggccaaaagagaatccaaagcaaaaaggtttaatgaccatatatgaagatgaaatgaagcaggaaataggaagcagaagttcccttgaatctaatggaaaaggagcagagaaaaataaaggccttgtagagggtaaagtgcatggtgataattggtagatgcaaaggactgagtctggatatgaaagcagtgatcacatcagtaatggttctactaatttggactcacctgttatcgatggaaatggtacagtaatggatatcagtggtgttaaagaaacagtatgcttcaggtaatgtaaaagttgagtgaatcatttttccatcactcttcttttttgttaattgcatgaagtaatttttgaagtttggggtcaattaaatagaacagaaacagcatgagctgttttaaagagctttaaaaagtttgtttcttttaaacacaagtatgtttctgtaaagaaacctaggatattgtagtttatttgatattttagatttccattttgaatagttatttcctgattccaaaaatagcagctttttatttttagaaaatttggaaagtacagaagtttattatcattgttgtgtcactgtcaacaattgattggttttaaagcacagacttcaattggtatcatctaagtcattaaggtggttgtttaattcttctttttttggtgggaggggaaggagtctcactctgttgcccaggctggagtgcagtggcgcaattacgggtcactgcaacctccgcctcccaggttcaagcgattctcctgccttaacttcccaagtagctgggactacagacatgcaccaccacgcctggctaatttttgtatttttagagacggggtttccccaggctactcttgaactcccaacctcaggtgatccacctgccttggcctcccaaagtgctgggattacaggcctgagccactatgcccaggctgttgtttaattcttcaatctatataatgtttataatcccatctctaacatttgtaactcagaactgaagctagtttttactgtcacactcattctcatggaagagatattttccctttagcaaatataaaaaaaatcagccaaataactttgtgttcgattaattctaaatacatttattatattactgtttaatccttctaacaatgtgtttgtttgatattagctgatatttgaccacatttgttattaaaaggtagatttgcaaaaatcaactgctcatgttttatgaaaatgcttgtttcaataaagacttaaggaaagggccaggtgtagtgtttacacacctgtaatcacagcaccttgggaggctgaggcaggaggattgcttgagcccaggagttcaatactagcctgagcaacatggaaagatctcatcatctctaggaaacagttttaaaatattagccaggtattgtggcatatgcctgtggtcccagctacttgggaggctgaggtgggaggatttttgagcccaggaggtcggggctgcagtgaaccatgtttgtaccactgcactccatcctgggcaaaagagcaaaaggtcctggctcaaaaaaaaaaaaaaaaa

SEQ ID NO: 61401 - DNA, 507 bp, Homo Sapiens
aagcaattgctgttaaaatcttatttctgcaatttttacaaaagcctgttaccatatgaacacatatccatcgagccctctatattattagagcacaggaagagggccctgtaggtgaggaaccttgaagtctaagtttcagtagtgtcataagtccacccctggatgggactctcaatttccagaataaaatggtaaactagaagcagaataactgagttatgtgaggaaagtaaagcccaaggatcttgaaagaatctaccagggtagaggaagtatgaggcatacaaatgggatgactgcatcccaggagagaagatggcagagagttcgggtgcctagaaaagggagagtttgtaaaattacgtggcaaaaaaaaaaaaaaaaaagtagacagacacaacactgattcccttagggaataatggaggttgtctaggaagtacagaaaaggacctgtcttcttcccaccccatccctgagttgttcttcatcttcagataatgc

SEQ ID NO: 61402 - DNA, 342 bp, Homo Sapiens
tttttttttttttttttttttttttttttttgatattaagacactttatttttctgtccaactttcattttaggttaaaggttactcatgttacatgagcaaattgtgtgtcatgggggtttggtgtgcagataattttgtcacccaggtaatcagcataatgcccaatagtcaggtttttaatccttaccctcctcccacattccaccctcaaataggtcccagaaaagacataattataccaaatatgagcttcatactagttcagaaggtagagttggaggatcataggcaagttttcagagaaaccgctttttttttcatttagattattataagatg

SEQ ID NO: 61403 - DNA, 468 bp, Homo Sapiens
gtgcatgagctgttctagagtatcatgagtcatcgcgcaatgagttgctgcagcccgtgtctcactcagactgccggggtggttgggctcctgtggccacctttgtggggaggggtcaggtcaagatgtccccagtttcttgacttctgacctcatatgttttcccattaagacaaagatttaggctgtggttcacggcagctctttgcaccaatgtcggcttgtcatctggtgcggctgtgttggggggcagaatcctttgtgggtagcctaggaacctgacccttccagcaagagtttctctgacaacacatggcccctcttgccttaacagtcagtggaaacacttaaaaaaaaaaacaaaaaacctttatggagatataatctcatataccatataagatcacccatttaaagcatacagttcaatgacttttagtatatttattcagagattggtacctcacc

SEQ ID NO: 61404 - DNA, 628 bp, Homo Sapiens
  misc_feature (512)..(512): n is a, c, g, or t
gatcatcagatggtcgagtactcttggaatgtctctttgctgtttactgtggcctctttacaatggtgagacttatttctaccctctactttccactattatttttttcccctatggataatactagtctgagcagccctaatactagatgtacctaaacagagatacaagccaagtcattgttcagtgtagtcatttcttagtatctgtttatattttgtcacacatcagaatgtatattttatagagcatgtgttgtctacttgtttgtctactataatatgtctttaataaagctaaaaacattctgaaaaaaaaaaaaaaaaaaaaaaaaaaaaaaaaaaaaaaactaaaacaaaaacaaacaacaaaacccaaacagcacaaaacagaaaagaccaaaccaacgagaaagggggcggagcacgctacgaacaagccaccccctgaagggggggcaccaacgttaactcacgaacacccccgcgctttacttgagacagaactgaccnagcctgataggggaggccagcgatgacagccggaagcggccgcccggacggagcgacaccgcgggcgcgtcgccaacactagccaagagactgggacgagcccacaactgtggagg

SEQ ID NO: 61405 - DNA, 832 bp, Homo Sapiens
ggtctggccgctgcggtgctagcccgaggtctccaagccgggctgcggtccatcctcggctcctgggcaccgtctgcgaggctccgcgaccagagtgagaaagccgcgagcccagtcatgtcagccaaggacgagcgggccagggagatcctgaggggcttcaaactaaattggatgaaccttcgggatgctgagacagggaagatactctggcaaggaacagaagacctgtctgtccctggtgtggagcatgaagcccgtgttcccaagaaaatcctcaagtgcaaggcagtgtctcgagaacttaatttttcttcgacagaacaaatggaaaaattccgcctggaacaaaaagtctacttcaaagggcaatgcctagaagaatggttcttcgagtttggctttgtgatccctaactccacaaatacctggcagtccttgatagaggcagcacccgagtcccaggtgatgccagcaagcgtcttaactgggaacgttatcatagaaacaaagttttttgacgacgatcttcttgtaagcacatccagagtgggacttttctatgtttgaaagaagaatgtgtgtacgtatcaagaagatcgtcgtctaaaaaacatttgtttctatgataacgttcccagttaagacgcttgctggcatcatctgggactcgggtgctgcctctatcaaggactgccaggtatttgtggagttagggatcacaaagccaaactcgaagaaccattcttctagcattgccctttgaagtaaactttttgttccaggaggaatttttccatttgttctgtcgaagaaaaattaagttctcgag

SEQ ID NO: 61406 - DNA, 343 bp, Homo Sapiens
aaatgctaaatactttcttgaaataaaatcgcacctcccggccaggcatgatggataatgcctgtaattccagcactttcagaggccaaagggggaggattgcttgaagccaggaatttgagcccagcctgggaacatagcaagcaagatcccatctctacaaaaagttaacaaaataaattacacctgccttttgttttgaagacttaaagaatctgctcaaatgatttattttgtgagtctcttcacattaacttttatatgatttttaaaaaattattacctgcttatattttttgagtatctgtttcatataaagagatgctgcatgttcactgtgaag

SEQ ID NO: 61407 - DNA, 2490 bp, Homo Sapiens
ggctccgtgacctcctcggcctcaggccctgcccaatctgttgccaagatgttcagggcagtggaggagggcctgacgtacaaattccatgcggcctggagctccgtgttgcagctgctgtgtgtcttcttcgaggcgtgtgggagacaggcccaccctgtgatgaggaagtgcctccagtccctgtgtgacctgcgcctctcccctcatttcccccacacggcggctcttgaccaggcagtgggggctgcggtgaccagtatgggacctgaggtggtgctgcaggctgtgcctttggaaattgatggctctgaggagactctggatttcccacggagctggctgctgcctgtcatccgagaccatgttcaggaaacgcgacttggttttttcaccacctacttcttgcccctggctaacaccctgaagagcaaagccatggacctggctcaggcaggcagcacagtggaatctaagatctacgacacactccagtggcagatgtggacactcctgcctgggttctgcacaaggcctacagatgtggccatctccttcaaagggctggcacggacgctgggcatggccatcagcgagcgtccagacctgagggtcaccgtgtgccaggccctgcgcaccctcatcaccaagggctgccaggcaggctgaccgtgctgaagtgagtcgctttgccaagaactttctgccgatcctcttcaacctgtatgggcagcccgtggcagccggggacactccagcccctcgccggctgatcataagggaggaggcagacggcaacaagatggaggaagaggaaggtgccaaaggcgaagatgaagagatggctgacccaatggaagatgtgatcatcaggaataaaaagcaccagaagctcaagcaccagaaagaggctgaggaggaggagctggagataccccctcagtaccaagctggaggctctggcattcatcgccctgtggccaagaaggctatgcctggggctgaatacaaggccaagaaagcaaaaggtgatgtgaagaagaaaggccggccggatccctatgcctacatccccctcaacagaagccagctctgactttaccagattgtctgtcctggacctggtcgtggccttggctccgtgtgctgacgaagctgccatcagtaagctatactccaccatccggccctacctagagagcaaggcccacggggtgcagaagaaggcctaccgagtgctggaggaggtgtgtgccagtcctcagggccccggggccctcttcgtgcagagccacctggaggacctgaagaagacactgctggactcgctgcggagcacctcctcacccgccaagaggccccgtttgaagtgcctcctacacatcgtgaggaagctctcagctgaacacaaggagttcatcactgccctcatcccagaggtgatcctgtgcaccaaggaggtgtcggtgggcgcacggaagaacgcttttgcactgctcgtggagatgggccatgctttcctaaggtttggctcgaaccaggaagaggccctgcagtgctacctcgtcctgatctaccctggcctggtgggcgcggtgaccatggtcagctgcagcatcctggccctgacccacctccttttcgagtttaaaggtctgatggggcccagtacagtggagcagctgctggagaatgtgtgcctgcttctggcctcccgcacccgtgacgtggtcaagtctgcactgggcttcatcaaggtggcagtgactgtcatggacgtggcgcacctggccaaacatgtgcagctggtgatggaagccattggggagctttcagatgacatgcggcggcacttccgcatgaagcttcggaacctgttcaccaagttcatccgcaagtttggatttgagctggtgaaaaggctgttgcccgaggagtaccacagagtcctggtcaacatccggaaagctgaggcccgggccaagaggcaccgagccctgagccaggctgccgtggaggagatctgtgctgttctggctgctgtcactgaggttcccaggtgggacacaaaaaccgcagaaaggatcgtcgaccctgaggcccagggcccctgggctgccctgtggtccagtctgaggccctttcagcccccaggctgccttgccaccagctccaggtgctcaagattctggcagagcctggactcaggatgacttggaactagggcttggctctcagaagtcctggattttggaaactccaaatggaatcacccttcagagacatccctggtgcctggagatgggaatgtggcctcagtgcctctgagtaggtgccatgaggcacctttgctttctgcccagagtggccatgagcaccagaacagatgatctccatttccgccagctgcctgtagccacgtggcatcctgcctgtggtctgggtgagatttactgtgaccagatgtagaataaatgtgtctcatcctgc

SEQ ID NO: 61408 - DNA, 1278 bp, Homo Sapiens
cttcaatatcttgcatgttgacagatttcactgctcccaccagcttggagacaacatgtggttcttgacaactctgctcctttgggttccagttgatgggcaagtggacaccacaaaggcagtgatcactttgcagcctccatgggtcagcgtgttccaagaggaaaccgtaaccttgcactgtgaggtgctccatctgcctgggagcagctctacacagtggtttctcaatggcacagccactcagacctcgacccccagctacagaatcacctctgccagtgtcaatgacagtggtgaatacaggtgccagagaggtctctcagggcgaagtgaccccatacagctggaaatccacagaggctggctactactgcaggtctccagcagagtcttcacggaaggagaacctctggccttgaggtgtcatgcgtggaaggataagctggtgtacaatgtgctttactatcgaaatggcaaagcctttaagtttttccactggaattctaacctcaccattctgaaaaccaacataagtcacaatggcacctaccattgctcaggcatgggaaagcatcgctacacatcagcaggaatatctgtcactgtgaaagagctatttccagctccagtgctgaatgcatctgtgacatccccactcctggaggggaatctggtcaccctgagctgtgaaacaaagttgctcttgcagaggcctggtttgcagctttacttctccttctacatgggcagcaagaccctgcgaggcaggaacacatcctctgaataccaaatactaactgctagaagagaagactctgggttatactggtgcgaggctgccacagaggatggaaatgtccttaagcgcagccctgagttggagcttcaagtgcttggcctccagttaccaactcctgtctggtttcatgtccttttctatctggcagtgggaataatgtttttagtgaacactgttctctgggtgacaatacgtaaagaactgaaaagaaagaaaaagtgggatttagaaatctctttggattctggaggccaagcacttgaagctccaactcagggctgcgcttaaggacatttacatcctctgaataccaaatactaactgctagaagagaagactctgggttatactggtgcgaggctgccacagagtcttctcttctagcagttagtatttggtacttcagaggatgtgttcctgcctcgcagggtcttgcagctttacttctccttctacatgggcagcaagctttagag

SEQ ID NO: 61409 - DNA, 355 bp, Homo Sapiens
aactgttaagaactgatgtactacataatgacattgatactatgttaaaatgattcatagaaggcagtcaagacagagattcagaaacattttattagaaaagtaatgcgcattcatagtaacattagcttttatttctgtgtactgtaggaacttcccaaaaccattctccaaagctaaccatttaaaactcattcatgtattttattatgcatcctacaacaaagactaagaagcaggcaagaattactataaaacacaatctaattacagaaaagttaatttatttttacatgaaaacattttgaaaccaattttgtgtttattgaaggatttttctcatgcatattatcca

SEQ ID NO: 61410 - DNA, 466 bp, Homo Sapiens
ttttttttttttttttttttttttttttttttttgcaagttaaagtccattttattgtgtgaatttttagcagtgcagtgcagtggtgttcttttgcatacgaagattgatgaatcctacacagggagaaaaagatttgacagcagtttaaggagacgttgttagcaaaaaccaaggcgagccgagtaagtggcttctccccgaaagcaattcttccctgtctaatctctttttgcagctcattagttctctgggaatcagaaaaaggttgtttcccaattatcccgccacaggggcacatcatggatggaagccggggctccgcggcacagcatgtgaatcggcgcgaccccatcccaagagccagggctctccttatctctgttgcctgggcccagcgtggtgccgtggatgtgagagtttaggcaggaccacggccccggctgtttgtttgggaggcgcttgg

SEQ ID NO: 61411 - DNA, 389 bp, Homo Sapiens
gggagcaatttataggaaagacgtcggctttcgtgccatagctttcctccagcagcccaggagtttgacttacaaggaatctggagtagatatcgcagctggaaatatgctggtcaagaaaattcagcctttagcaaaagccacttccagatcaggctgtaaagttgatcttggaggttttgctggtctttttgatttaaaagcagctggtttcaaagatccccttctggcctctggaacagatggcgttggaactaaactaaaggtgttaagagcagctaatcaaatggataagatacaattttgaacttattccctaatatggatgtttatattgttcttacatagattgcccagctatgcaataaacatgataccattggtcaaga

SEQ ID NO: 61412 - DNA, 609 bp, Homo Sapiens
gccatggatgaaggctcagaagcatcctcctgctcatctgctttggctaccttccagcataactaggaacattattagatttagtaatacataatttaaattctaaagtttaccattgttttgtctttttatggttatgggtgactatgtcatgaccaattgtcatttcataatctagagatttctttaaaacatgactatttctgttggatgtacatgtgtaagataggaaaactgccatttacatccattgtgtgcattatttgccctcatctccccaaacagaccaaaacaaaaaaccccaagaaatggatttgtcttatctttgtagtttatataccatggtataatgtaattttcaaattcatagcgtaacttacttgtttccataagcaaagctgtatgtaaactgtgtatcagtgcttctagtaatcttgctattgtcttggtactgaaattttagaccaatataatttgcccaggaatcctttgtatgctaaacataactacataaaaatatgaaaaatattggtaacaatatattaccattacatcgtttcataacaattcaaataaaattcaaagtccaaaaaaaaaaaaaaaaaaaaa

SEQ ID NO: 61413 - DNA, 584 bp, Homo Sapiens
ggtttcgcatgttcccttaaagaatttcctgcactgtaactttatttttaagagtagtttgagtgcaaaacaggaataatccccagaaaaggtgaaaatggtcaagaaaatggtacagaaagaatacactttgcaaagaatgatgccctcagacctctcctaccaaccaacactccaccattgacaagttcaatagacttgtgtttgttgtgtgacatagcgtgcacagtatgttttcacatgctttctgttttatagtaaagaatttgactggcttttgtctctggttcctaggaggcagactcaaaataattagaattccctaagtaacagggatatctttgtttttcatgagcctcttggatcacacctgaatttgggctggaagatgagatgacccaagatggaggccagttaccagcgagaacaaccatgtgattacatagctggtgctttgagtcagcctgacacccagagtaaggggtagggtggagatttagttcaatcacttggccagtgattcaatcaattatacatatatcatgaaaccccaataaaaactttagataccgaagcatggggaa

SEQ ID NO: 61414 - DNA, 332 bp, Homo Sapiens
gacccagtctccatcctccctgtctgcatctgtaggagacagagtcaccatcacttgccaggcgagtcaggacattagtaattttttaacttggtatcagaagaagccagggaaagcccctaaagtcctgatctacgatgcatccaatttggaaacaggggtcccatcaaggttcagtggaagtggttctgggacagattttactttcaccatcgccagcctgcagcctgacgattttgcaacatattactgtcaacaatataatgatcaccccctcactttcggccctgggaccaaagtggatgtgagacgaactgtgccgcaccatctaa

SEQ ID NO: 61415 - DNA, 489 bp, Homo Sapiens
ggatcccggtgtacctttgtctctatacaacttctcacactcatggctgcttagaacaaataaactagcaaacaccttagctgccgcctgtttctaaggggttgaggtcagctattagaatccagtgttggacagacaaggtaccgcggcctcttggtcaaacgcggcttctggaacgtgagcgcgccctcgtgtggatctccaggcccctgcaaacggaaaatggtatctcgggttcggcttgccttgggtggtgggcacacaagcttgctacgtttagatgcagttttaaaaaatagatggaaacagaaagaaaaaaaacagttttaagctcatggaacgatcatactattagggcactgacattttaaccgatgtctagaataccaaaggaatccccttcttaacgaaatttttcgattgtaggctttgtttccattgcatctttcaccaaaggatgcttttaaaagcattagacaaagggaaaca

SEQ ID NO: 61416 - DNA, 470 bp, Homo Sapiens
tttccaagaattaaccaagagaaatgccttttaatgagtgtcacatgtgagataactaacttgacataatagtaccaacaagaacagtgagttaatttttcataacacaaaagtctatcatttcctttgctttggatcacttgtttttcttttttatttccttaacaatatttcctatcaagcttcaaagtgtgaaatcataacatagtttggttctaaacatagcagaaaattctccaaataacagaatagctttttgctacttttagaaatcaaccaaaatataaacacttcagtcaacattggatcaaaaaacattattattgattaaattattgttttaacatcacttttctgcttatatctgaagattaatttattcttcatacagaatatgaacagattttatgattttctaaattaatttttacaaatccaatttctaagagagaaatgatataaaagcatac

SEQ ID NO: 61417 - DNA, 498 bp, Homo Sapiens
tttttttttttttttagttaaggtttatttatttctatttatagcaaagacagctgagatgtcaaactcttctctttcatggtctccagtgcggtgccgtggtaacagcgtttcacaggaagcaccgtggagacgcagcccaggggactgccatggccctgcgaaggggcagcgtctcttccctctgtggtcccctttacccattccatgacaaatggtaggcaaaaaaagatatcgcaggaaggccctccgtgattcacttcatatgtttatgtattggttgaattatttttgtaattttaaaaaaggaaaggcaaagtcattttatagcaaggccggatggaactgggcgccctgagtgcagatgccatatgtttcttctgcttcacaggcttccctctggagagaaccaggctgccagagagtctgtgctgttctcagcagcacaaacagttgctagaggaaaggtgttaattccacactctgaggaccaggctg

SEQ ID NO: 61418 - DNA, 594 bp, Homo Sapiens
  misc_feature (561)..(561): n is a, c, g, or t
ttttttttaatcataacacagaaaagcttttattatcatagcaaaatcacttgattcctcatcctttagcaagaagagctggtaagttacaatgttctttggatgggtgagagcactgaatatctgagtttactttcacaaattataacttcaaactaaccttttgaaatcttctgccagcagtaatgccacattaaaagatttctaacataagttgctgaatttcaggcatacatgcaatgagagtcacccctctcttaacagactccagaaattgagcatttgttggttcattgtaaggtctcaattctccatcatctaaactgaaaccattgctccacagtttaagcaaaatctgaacatcttgcagctgattttctccatagatatattcagaccgcttacaaaaagaactacccaatctgtatcctccacctgtaaatgacttagatttatcatcacctgaagctcttgtggcttcattcagagggacagccccatgttcccttgcctctttgaaagttcattcacaattttcccagttgaaggtcgaactatatntaatccactgtattcatgttcacttgagtaaaa

SEQ ID NO: 61419 - DNA, 1719 bp, Homo Sapiens
ggccagacacggcattaaaaagctagatgcatccagtgaaaagcagtcagccgaccaccaggccgcggagcagttctgtgcgtttttcaggagcttggctgctgagcacgggctgtccgccgagcaggtttacaacgctgatgagaccggccttttctggcggtgcctgccaaatcccactccggaaggcggggctgtgcctggccccaagcagggcaaggaccggctgaccgtgctgatgtgtgccaacgccacgggctcccacaggctcaagcccttggccatcgggaagtgcagcggtcccagggctttcaaaggcatccagcacctgcccgtcgcctataaggcccaggggaatgcctgggtggacaaggagattttttccgattggttccatcatatctttgtgccctcggtgagagagcacttcagaaccataggtttgccggaagacagcaaagccgttctcttgctggacagctcccgggctcacccgcaggaggccgagctggtgtccagtaacgttttcaccatcttcctgcctgccagcgtggcctcattggtgcagcccatggagcagggcattcggagagatttcatgaggaacttcattaaccctccggtccccctgcagggcccccatgcccgctacaacatgaacgatgccatattcagcgtggcctgtgcctggaacgcagtccctagccacgtcttcaggcgggcctggaggaagctgtggccgtcggttgcgtttgccgaaggctcctcctctgaggaggagttggaggcagagtgcttcccagtgaagccccacaacaagtcctttgcacacatcctggagcttgtgaaggaaggctcctcctgcccgggccagcttcgccagcgccaggccgccagctggggggtagcgggaagggaggcagaagggggacggccccctgctgccacgtcgccagcagaggttgtgtggagttcagaaaagactccaaaagctgaccaggacggcggaggagatcctggtgagggcgaggaggtggcctgggagcaggcggccgtggcctttgacgcagtcctgcgctttgcggagcggcagccatgcttcagtgcgcaggaagtggggcagctgcgggcgctgcgtgccgtgttccggagccagcagcaggagactgtgggccttgaggatgtggtagtgacctcaccagaggagttggcaattcctaagtgctgcctggaggcctctacagagacataatgttggagaacttctgccacatggcagtgctgggtaagacccctctgtccccaccagtgcccttgaggttatgggtgttggtaggtctgtggcctccatttccatgacgatggtgttaaggactgcatgtttgtgtccccccccaaagtttatatgttgaaaccctgacccccaggagggtggtattaggaggtggggcctttgggaggtgactaggcttaggtgagatcgtgagggtggggctcgccgatgagatcgagtccttataagaaaaggaaggaactagagcgaggtcactttgtgctgtgtgagcatacaagaaaactgccatcttcaagctgggtgcagtggctcacgcctgtaatcccagcactggaaggccaaggcattaggattgcatgagtccaggagttcgagaccagcctaggcatgataagaccttattgctaaaaaaaaaaaaaaaaaaa

SEQ ID NO: 61420 - DNA, 298 bp, Homo Sapiens
cttgtcctggaactactcccagtgctgttcccaccaccagcataacctctgcacctacaaccagcacaaactctgcccctataagcagcacaacctctgccactacaaccagcagaatctctggtcctgaaactactcccagccctgttcctaccgccagcacaacctctgcttctacaactagcacaacctctggtcctggaactactcccagccctgttcctaccaccagcacaatctctgttcctaccaccagcacaacttctgcttctacaaccagcacaacttctgcttctag

SEQ ID NO: 61421 - DNA, 134515 bp, Homo Sapiens
gatcctccaaatgggggccttgtggtttggccacacggagatatctccacaagcacagccggggtggggacagctgcccacagggtagggcttgagggtaacgtggtgcttctcctcggccgccccatcctctcctgtccttggcattattcttacatgtcgcctgtattctggcttcagactctgctgagagaaacgcgctgtgttagggccagctgggccctgagcagactcctgagagccaaaaagcagggagaccagggtgccaggggcactctggagagtgagaggtgctcagagtgacagcacccatggggggtagagatgccaggctgagaagagggagagggagaggtagctctacctggagcaggccccagtaacctccaccccctctagaggcagaggcttccgtgacccccagggtcagccctgtccccctcagccctcggtggtctcccctccagcaccccaggtggttggctatttccacattgtgcctaccagacagctgtggcaggtgctttaaatatgtctgtggagtggttgaagaaatctgaagaaaagagggaagtctgatggtatctccaaggtgacttggaggggctctgggaaaggatctgcccactctccagcttcgccatgatgggtaggctctcacaggagtgtggcgggtaaccgccctcactcctggcctttgagtttcatttccggtgagtttctccttcctttttattccaactcttcctggaagcagtgagtgctggtttagttttaggtacacataacatttgtcttcatagcccccacagatgcaagaggcctcatccctgttctgtgtcccctctgggtaggctcatgtgtgcagaaggcagcctgggaaagcccgttcacggagctcactttgcttgttctttatcgtggcttcatgcctcccatttgatgctgcaggtaagagggctcatgaccatataaagcaaattgggtgccggctgttacaaaggggaggctgcaaagaaacaaaagcatttcagccaagtaaatgcccagaatgtgctggggagtggggaagggaggggataacataaagcccctgtcccaaggatgcagcttatgccccctggtctaatgtgggagggggacggtaatgataatatagtgtgagaagagctaggacacggtgagtgactgacaagtgacccaacgggcaaagccaatggccccctccacgttccaccccctgggcatgagcaccctctcccatcttgccccttgatttgttgtgtccttgcctgttgccttgggcaggctgacttctctccttccacacagggaggtgggcaggaggatgccaggagcccgtgtgacatccagctgggccagtgagccattcggtgggttcgcagcagttttgatgatcacctgtccatttgtcaatgcttttcctcaccctcattgcctcagaggctgttagtgtatggaactgtgatgcatattctattatcttcccagggaattacctcaacgttggccagagcttagcattcttagccacacggggctctggaggtatttttggcgcaactcggaactcctgagtgtccatgcactctagactcgggctaggatgcgaagtagggataaagcagatgtggcgggtgtggcatgtcccatggacccaggcttggccttgcgtccccttctccctgaagcccgttcctcccacttgcttcctggctccttggcctcccgctgtcgtcaccctctgaatcctttcttctcctccccaccgagcaggcagagggaggcaactctcatcacagctcaggccagagagaggagtcctaggcccttgctattttcagagctaaaattaaagcccatggtttgcttcctcagcacttaattagactccagcgcctcacagggcagcctccttcccgcccaccagtgaaggcctgaccggtgggtttggaagctgacgccatgttcctggcaggagggctggggcctggggtatttttacatatgagaggctgtggagagcaaaatgcttggcactgagccagttagactaaatcagttgggagagggagggagcaggaaagctgttatatcgtccttccttctttgaactgcactataaatctgctagacaggaaatgggattgggagggtagaggagggggctgtacagtgaggctggactggggcctgggataccaccaccctcgcagcctggctcaggtgaggccctgccctgaaggtggggtgaagggggcctcacttggggctgggggtgaggcacactggtgggtgttcagagttgtctgggtcagctagggtatgggctgactgtatctgccctcgtgttatttctgggccccttcagatcctccaactaaaaccaccatcggtggaacagcttttaggactggaagagacttcagagaccctgtaattagggttttgaggacaagagagggaaaataaattacccaaagccacataccttatgagaactggaagtggggatgggacttttgacctaggacacgatggctgtgcactggctctctccccttcttattgctgtctcttggctttcttgggggcacaaacttttcattccagagtaaaggtaagatataaaatgcagatgtatgtaagtaaaatgacatacagtcaattcacactaagagctaaataattgatatttagcactgttactgagtagagattttgatgagcagaaggcccctgtgctccgtggaggtgtccttctgaccgtaagggtggtgaggcatcattgacttcataatcaacctaaggccatctggcctcagggtttctggagggggcaggtgggggaagttgagacctgggatgtacctgaaacagaacctgctccctcccagggaagagtgaaaacaggacacctgactaatgacatctcatatttatcaatttacagcatttctccagaaaggtctagataccagccttaggggaacctcattattgttggattaaacttatgcctacccatgcatctataagccaaggaacctctcctgttttttatctctccttttccctcctataacactcctgaggctgcctctcaaatgtaggaaccaataggtgagaaccatgtaagatcttcgtatatactcctgaaccctgaattaagttaaggaatagccatagcctgtatttattttgcttttttttttttttcaagcactatactagcattatcttatgtcatcttgaaaactattattatcatcatccccatttcacaatgaggagaatgaagctcagaaacgttaaatgatttgcctaagatcacccaggtgtcagggccaagatttgaaccaaggtaggcttattctagagactatgcttcacatacctcatactgcttccactggcagaaatgaagttttgggaagtatagagggaaataatagaattttgtccagtagcaagaatgaggaacacactgtttattgcctgggctagaggagtcagagtgtgaggagtgtcaggccttggagagtgtttggctgagagctgaagttggcgtgggatttccatgttccatggctggtgtttggcatatatttctgcttttctgggcaaatagcctaaatctcctctttacttctcttggatagggtcttaggccaaaaatgccatactgcccccattccgttcttgcctcaaatctgtcacttagctcatttcagtggcttaaacctgcaattttttgatgtctactgaatgcaaataaagctgattcttgacaccgaggaacagttgacacaagctctttgttgttgttgttgttgatttcaaatcctcctcctcttcactctcctgttacttctctgttatttactttagacatttcatcaccaccactaggaagcacacagtggaaggaaaccatgtttattgtgagccttatgctggtaactaattttgctaatagtgccactggaaaaagactagtggggaagtagtttgaggcttggagattacctttttgcctctgcattccctgtaatctgagatcccggataatgtctaatgagctatagagaagggaaacagagaggtgaatggtttgacaactgcaactgctttcccatgaggcattttctgattttgaagcactagcagttgctgagcagctgagcagaactcgtggcagccttacaggcctgatgggacaaaagttgggattcaagaattgtcaaggggaagggtcctaataaacatcccagtctttcagatgggagccttgaaaggctatatactggtaataaagctagtctggtaatagactagcactaacaaagactgaaacccagatctgaatcattttgatttcagattagattaaagagatattctcctagcaaactgcctgctagaaacaaaagtaaattcactctagaggaagatatctgctagaaccttaaattatcactacagtttttcatgcatagtttctggcatgaacttttcaaaaactaccaggcataccaggagataggaccaaatgactgaataccaagagaaaaaaaaaatgttatgattttaaaagatatgtagagtctgccttaagaagaaccaaattctaggaaaactgtaggactgaaattaagaacttggtagaagggcttaaaagcagattagacacaagtgaagagaatattcatgaacttgaatataggtcagaagaaaatatttattcagatgactataattataacaagataaaaaatttatgaaatacagaaaagagtctaagagatatacaggacccaatgtaaacatttgtgtaattagagatctggaaggagagaaacaatgtagcataaacaatatttgaaaagaaaatgaccgaggatttaaaaactaacaaaaacataaagccacagattcaagaagtgttacaaactccaagcagggaaataaccccagaaacaaatgaaactacaatatacatcatagtaaaacagctgaaaaacaaaggaaaaattgcaaaagtagctagtgtaaaagaaaataaaaaatacattatacgcagacacaatattcagctattttttcaacaaaaacaatggaagccaaagaacaaaattatgtctgtaaaggcaaaaaaggaaacaaaaaaacccaaacaaaaagacagctaaacaacctaaaattctacacccagaaaaaatatcactcaaaaatgaaagtgaaataaagagatttccagacagacaaaaactgagatggtttataagtagctgacagacactaaaggaaaaactaaatagtttttcaggtaaaaggaaaagaatttcagatggaagcaaggagttgcagaaaggaatgaagagcattgtaaagggtaaacacatgggaaaatcaaaattaatactgactgtataaaataatatcttgagagagaatatatgtagaattaaaataatacacaaaaaataagaaggaggaaaagggagttgacacattccaatgtccttaacatagtccaggaattgaaaaaagtactaatttatattgaactttaataagtcaaggatgcatattgtcatctttaagtctagaagcatatatttaattccacagaaagagaagtcttgtgctcatgttagaaggtagtcttgatttgtctaccttcctctttgagaaatttatttcttccaacagcctaattgtcaatcaatgttaaaaaaagattaatgaaagattttgtagcggaaaggattaacccatagatctcattatcccaagtaatgacacaagataaaaataataaatagagctttttttaaagttttggataaattcctggatgtgagatccataattgactctgaaagagaaactggatgctgcttgagtgtagctccaacctttaaagttgacttcactgaggaaaaccatatgcttccaccgtggatggactttgggtttgactcagtgcagccatcttattaagaataagcaggccagggccaggcgcggtggctcacgcctgtaatcccaacacggtgggaggccgaggtgggcggatcatgaggtcaggagattgagaccatcctggctaacatggtgaaaacccgtctctactaaaatacaaaaattagctgggcgtggtggtgctgcacccttgtagtcccagctactcaggaggctgaggcaggagaatcacttgaacccgtaggcgcggaggttgcagtgagctgagatcgcaccactgcactccagcctgggtgacacagcaagactctgtctccaaaaaaaaaaaaagaaagaaaagaaaataagcaggccagctgcttggttcagaaacacaggctttttagctaccaggatgaagactctgaggattcaagcactggcctcactactagtaaattattaatattgaatgtggctcatgcccgtaatcccagcattttgggaggctgaggcgggagaatcacttgagcccaggagtttgagaccagtctaggaacatggcaaaaccccatctctacaaaaaatacaaaaattagccaagcttggtggcacacgcctgtattcccagctacttgggaagctgaggtgcgaggatcaatggagctcaggatgtcaaggcttcagtgggccatcattgtgccactgtgctctagcctgggtgacagagagagaccctgtctctaataataataattattattataataacgttaacaactgtgtgtttgcatgtggaagcagtcaagatcatacaacttaatatgattttggagttggtgacctgattgtccctggctttagctcaaggtctatgcctaaccagctgggagatattgggcattaggcatgccactcattgtatctgggtctcattcatgaatagggatacaaagtctacttctgcaaagttgttttgggagttgaatgagaagtggcatgaaagcacttggttaaatatgatgcgctgtttgaatgtgaggtattgctattttaccctcaaagaaaaaaaatagtgtcctggttaccatattttatggtcagaaatatttgtttagtgcagtaagatgccctgtgatagaaggatttcatggtcaaagaagcctaggaatccccagatgcctttctgccttcggtgatccccagcgctcacaacccctttttctcctccagaaatacaaacactcattagcctttgaaaggccctgagaagtccagcagcaaagacatcagttgaagtgtgttttatctggtgttttccaacataatttgacaaataaagcttctttgtgtaacatctcaccacatctctatatacattcatactttcattctctccctctgtggcctcatccatacccacactcatacaccggtgtctgcccagctgatatttctagtctggactgctcctgtgaagttcaggccgattcacccaattgcttccacttggttgtctgaggacaactcaaattcaatctatccaaatgtctaaaatcagaatcagtaccctccatcccaaacctggatcttttccaggattccccagcttaatgaatggccccagcatccttccagctccacaaagcccaaaaccttgccacatctcttcccctcttccctcacatcccacacatatattctatcacaatttcctacccaacttatgttctacacatgtttcatacctatcctcttctctccagccccattgccaccatcctggtccagtctacccagagctatccccgggaccagtaccagagctttccaactagtctccccactatctcatccccctaaaccatcttctatgaaggagtaggataaggcttcaaaatccctgtcaaatccgtcttaaaccttctaataatttcttcttgctcttaggttctctgtgtcccaatcaccaggatttttctatttcttcagatgtccccaagacagggcctttgcttatgcccttcctgatgctaggatactctcagtgccccagtccagtccctttcctaattaacttgctccctcctgtagctctcaacccagatacaacttcctcagggaagctgtcccccagacttagtcaggaccctggtcgcccaccccaccatgggcctctgcttcatttgtaagttgcctctcaacttacaactgcacatttccttttttttgttgttttttttgagacagagtctcactctgtctcctaggctggagtgtagtggtgtaatctctgcacactgcaacttctgcttcccgggttcaagcaattctcctgcctcagcctcccaagtagctgggaattacaggtgcctaccaccacgccaggcattaataaaattttgtgtttttagtagagacggggttttaccatgttggccaggctggtcttgaactcctgaggtgcccgccaccatgccgggcattaataaaattttatgtttttagtagacacagggtttcatcatgttggccaggctggtcttgagctcctgacctcgtgtgatctgcctgcctcggcctcccaaagtgctgggattacaggcctgagccactgcaacgggccacatttgcttttgtattatttaaattaatgtcttttctcccagactagattgtaatgcacctcatcagggtaggaccttgcctatttaactcaatattttctatcagaaagcccccacaagtaatttttgctgtagaaaaaaaatctcctcttcttcaccacacattccacacctccgtttctgctctcccgcctctctggtctccagctttttcagaaaacaaaaactcaactgttaggctaagctcctcttttctctccaaagattaagccatcttactgacttctccaaagagcctctttcctgctcgtctgtttccaagttcacattccggctgccacccaggctgcccactgcctgctgcagggctccatccacatccatcacactgtgcacggcacccctgcactgtgcggagctacagcccgaggccactctgcctcatctttaatcaaaagggcaatttctgtctgatttaagtatctgacccagagcagttttggaggctaattcgtaccactattccaggtccctgttcccctgctgaaaccccaagccccctgcccacatacagaaacttgctgacgcttttgcttcgatccttggggcgaaatgagagccttggtttgcttgcttgttctggtttcagttgggtcccaagtcagcccctacctttcacaagtctagggcttaggacaggctgttctctctgcccaggaaggttactccacatcccaccttcttcccctgcttggtttagtcctactcatccttcaggcctcagtttaggtgccacttctgcaaaggaatctctcctgacaaatcaacttaaagtttcggttaccctgctattctctcctatttcatgctagtccatctagacatccattgcaatttgtatttctatatttatgtgtgtacttatttgcttaatgattttctctttactaaaccataaactacataagggtagggccagtgtctattttttcaccaatcccacgtgcagcacaatgcctgtttacacagcaggcactccgtcaatgtgtacctcaaggaagaagcaatgaatggaccaatgaatgtgcttgctcttgaaacaccatttgacccttggaaatctgcccggcttgaaaacaactctaagcccaagcaaaacttaaggaagtgtaatttgaagaaataatttgtgtcttgaacttgtcaatgccaattctctgtgtattttgatttgttttttcaccccttgggttcagagtgaccttgccaggccttcatctcctggggcacatacttccttctgccctgtaataataggctgcctggggctcactgggctatggtttaaaaagtccgcaggtggcttctcctctctccagctaggctggctggaaagggagggcaggattgtgtgtccctccctttctgcaccccctcccctcgccccgccagtcctcagagggaaggctgggctttcggtgcccaagctcgggtacatgtggtcttttggttctgctgaaacagacgtcctgtgccttcttggttccatgttttttacctgaattcattctcacttggagcaatgcaatgccaaagccatttttgcagtaaagcttgcagcagaaaatgttagtggtccacccatattccccccagtttaccattttctgtgtaccctgggttttggtgtgcattctcttccaaagccagcactgtggctttttggcagacagccctcaggggctctggagccactttgtgtgcgtggatgaagagtctggaaactgacttgccccccagctccctggattaggccctgagaatgttggcctgagatcctgctctgccccgcccccccgccaccactcctctcctagtgtccttacatcacatccacacaaagcctcagctaggggcctgtttagcgggatcccaacctgagacactagacatcaggagtggggctgggaagcaaaagcacactgaagccagggtgaacaagaaccacaagaaggggtccaggagcgcctgggcggagcacagacactgtccacttacatctcacattcaagttcacaccttcctatcacggagtcttcatcttggtgatgggccacaatttatggggggagccttacaagaggagagttagttggatgatccaccattctcaccttttatagcttgtctggaggcaaaacagatattcattacaaccctcctgggccccccatcctcagctggctggcacttccactggttgtttcctaatggggtgacccagcccgtcatccttgaggagtctaagctcctggttaccatggctgtggttgctataatgacctggtcacagttaaccctgggcatgggagtgacctagagatgccctgcgttccacacatcctccccccggctccattgtaacagggacagagcctcctcctactgactggggccaatcatgcctgccagtatggtaactcctttctttgcctgatggtctgccaggatgaggggaccaacctcaaatgacaaggtggttgccatcgatttcggtttcgtgggactctgtccctggtagaagtgtctcccttcccttctaggaattaggacttctagaccaccgaacctaaagttgtggcagcaggaagcacaacttcctccaagtaggtccctgggaatggtggggagcaggaccaccctcatcccattgcttcctccccctctcgtggggacgactcaggtgtgtccattcaggggtcctttgcaggatcagcctaaagctgcactcagagcctctgctgtgactttgcccttgcttggctttgtccccttctctgtgctgcttcccccactcccttactggttacccctgggatcccttccttaatcagttacttgtacctaaagtctgctttctggagaagccaacctaagacagagctggaagccatgaggagtcgggcgggccaagcactccagctttgaacataagattgagcacggccggggctgaagggaggaagtcagagctactgactagaccttgaactgcaaaccgaggatcctgcccctgtttctacctcactaaaaaccaaaaaaatgggtctctgccttcccaggtatctgataagatgataatgctttaaactctgacagtgtaggagaaatactgtcccaaagtgcttcttgcacgtttacttaaatgtgatgaattttaaaaacaatgaagttacttgcaaatagtgtgtcatataatagtataacaccactgcatatgacgatagctaacactccccatgcatccctctggccatgacctctgcgaagtaccctacgtggttctctcctttccttcttacaactaccttatgcagaatgtacgactattagtccgtcatcccattttacaaatgtggaaactgaaggatagaaactgatccacctgtgtgagctgcagagccaggatgaaacgcaggcctgtgctctcagccgcccgctgaacctccagcagggagacagaagtggtccatctccttccccagctgaggaagtgggatgtctgtggcaggcagggcatttgccattcggatttttaagcttgcacgcacagagcccatggtgtatttaagctgacaagaaactgctacttggctagcctcctcaaagaggccaggagcaagacccaaagctcctttgatcctcctccaatacaggaatccagctgatattaatatttggtattacgatggtttcatttgacattttcatgaggaaatcttggctttacttggttcccgggctggcaggtggggccagtgccaggaagcacactgtatactgtatactgtatacagagtcaacagcctcacagcaggttggtgttccaaacctcctcctgaggccagagccatcattaaaacacaccttcacttagagctgtttttctcaaataagaagattacattttggctccaagaagttgtttgtcaggactgtcttcatcatgaggtgaagttgaatttggcttggtgatttgtgggtctgggttgcccctttccctgggctgccctcacagacaagacacgtcccctcatggaattaacgtcccagactgcaagctctgggcgggtgaggactgttctgtttactgctggcagtaaggcctgtcacgcagtgggctctctgtgtatggttgttaccaattaataaacaatttagtaaatgagtaaagatagtcagcatcgtttgctattaagagcccagcctctggaaccaaacacttggattcaaatcccagccaggcatgtgaccacaggcaggcaacttaacttcttagtagcttggttttcccctccgtacaatgggtgtgacactacctccctcgagactgatgggaggatgaactgagttattatgtacaaaatactcagagcttgggcacacagcacgtgctgcctccctgagtctttattgactgggacatcaaagtgtggcattgggctaacacgctgtctcctcaaagttgcttccttctgctaattccacactggaagaaacgacctttgttgtgtctgtatttgtgtgagatcccttcattctcattcctatctcgaagggctttttacctggaggtgtggtttgcaaactgctggatctcactgtttgcacacaaaaaaagtgctgatattcttaaaaatctcccttgtgaggagcgaaaagagataatgcttttttttttttttttctggaagcaaggtcgacaatttatcaccagctgccaaaaccttcctctaaggcatcacttctcaaacttttaaagcattctccctgtcagcccagtcagaatgacaaaatccagagtcattctcaagagagaggggtgacaggaatagaggggtggctgagagcattagcagggagggaggggcggctggggctctagcggaaaagcctgctcaccaccaaatctaggaccctgaagtctgcaaatggctatagttacagatcagtttacctggaggggctgctttccacgggcttagcaagctgttcaattcttcatttgttgaggcaacacatttttattgagcacttactgtgtgccaagtgttggggaaaaggtgaccaagacaaaagtctctgcccacaggatgcttacattctgccatcactaacgtctccactcaccacccactgaaaacacgactcacgcaggaagcgtttctctgaatgaaacccttaaacccaggttcaaatcaaatttaagacacagaaagtagaatagtgtttgccaagggcagtggggagggagaatgcggagttgttcggtgggtgttgagtttcagttttgcaagatgagaaagttctagatattggatgcacaataaacactatggaactgtatactttaaaattgttaagattgtaaattttatgctacttacattttttaccacaataaaaaaaaaatgaaaaaaaaaaacatagttaaggatgcagtgtccaaaggctgtggctgctgcccagacccaaagggaggaatgggaggtatgtgtgtctgggtgtctgtgcgtgtgtggggcagggtgggggtgggggaagttctgctctgcctcccctccgtttcagaggtcctagaagcccagattaaacagtcactagagagtctgcggttattttttcttggagaataataggccccgccactgggcctccagagaaagtgaattgaggctcagtggttggcagttatctccgccaggtctccaagtccctgactttctatcacaagagaggaactagaacatagtgcagagcaagcttacaagagttcaaatcccgtctgtgccactgacttagctatgtggcctcaggtgaagtacctgatttctcaagtgcctcagcctcctcatctgtaaaatgggggagggaggggtagtaatagtacccacaccataggcacagagccatcctatgaaagcccttggcattttgccccatgctatgtttgtgtttagggagttcagggattcttgataggattgaagcatgtatgtgtgggagaattcatgtcacatttaagaaatgggaatcaggccgggcatagtggctcacacctgtaatcccaacactttgggaggctgaggcgggcaggtcaggagttcaagaccagcctggccaatggtgaaactccatctctactaaaaatacaaaaattagctgggtgtggtgatgcacatctgtagtcctagctacttgggaagctgaggcaggaggattgcttgagttcaggagatgggggctgcagtgagccatggttgtaccactgcactctagcctggacaacagggcaagaccctgtccccccccccccaaaaaaaactgggcatctgggtggcaatgtgttcagtgaaaacgtggcttcttctggccaggagaagctgacagcctgaactggcctttctctggccagagggcattttgctcagccatggaaggctaacctaagagcaggtgggatgacagtaggatgatgggatggccagtgcctccctaaccacgctcccctatgcatgctgcattttccttctctgcacgcccacagctggatgggaggaggtgctcaagtgtgtgggaggtgaccagccacatctgcaggaagttacaggtgccctgggctggggccctgggacacattccatttctggggctggtgcctcccatccaggctccagaccaactccttagggtgcattttaaaactggttcttccagctattaaccctgcagttcctgagagaacacacacccaggtggagctaattagggtgggatgagagattgggactctaggaattcagtgccagcctcccctgcaggtcactcaggagtggggccttgatgggcctgctgcagacagctgagagcccacatctgtctaatcagggccccactctcttcaggctgcttcaggaataagtccccagtctaggggtgctggggaatcctgcaccgtgattgctgtgtaatcacaacacctaaagatgaaggatttggacaaaggagcatttattgagcactttgtctgtggtactaggcccattacattcattgtttccagcctcacaaccaccctgtcatacaattatgattcccatttttttcaatgtggaaactgaggctcagaggtggtaaggtgcttgtttaagctctcctgcctttgagcaattgaactggtatctaaaaccaggtctctcagactccaaatcctacacgtagctgcttcccctttcaggttgataaaatgatcaacctgagctagtctatcttgcactgcttctcctgcttagaggtaattgcgagtgttagatgttgataaacagcaatgtagtaatgatgtgaaccagtcaaaaccttaatcctctccacctaaaatacgatcacatcacttcctttttcaaaaaaatcttcattgacttctctactcaccagatcaagttcaaactctttagcgtacaagacaaaacactaaagagactatgaccaaatgccaaactcatgtttcccttttctctttcaagaatgatgtccagtctgggaagggaaaaataaccctactgagttggaattggggtccaagattggtgagaaagcgcccaacaaacatgacagagtttgaagggagtccaggtctcctcaccctgaccagtgactgctcagcctcagctgcagcatgtcgagattgctcaacagctattgttaatctttcacaaaccataacaaatgtgagacagtccccaaggatggagtgggcaaaagtcccagtttttaaaagggagaacactttagatactgcaaactacaaaccaataagtgggaaggggagccccaataaaattgtagtgcatgctgttaaacggtttgtgccccttacaaataggagcacagatcttcgaagagcttcatgggactgctggaaacaagtcatgtcagtgtcacctcatttcttcttctaatggtgtggcagggcgggtagatcagggagacgttgaggatgtggtacatctggatttcagcaagacagctgataaggtctcttgtgacttccttgtagacaaaattggttaattgtgagctagaggtgcttttaagtagaactcacaacccattgaaagcataaacctgagacatgcagatagagagtaactcggaggaagtctctagtggtaggcaacaaggctcagctctgagccctgtgttttggacatttttaatcaataacttaaagggcagatgacacagcttgccgggggtgggggtggtgggggggattattaacagcttggatgccagaaataggatccagaaatttaagtggaataaatggaaagttctggactttggtttaacaaacccgtgacacagctgaaagattttagctgactaaatgctcaatatgagttcataggaaccaagccacgttaagcagctcatgtttcccctttgccttcaggatgccagatccctccttagtgtccagcagggggtcctccagatgtgagctggctaccaatcctgtgtcaggctgcagacttgccatgtccttgaacacctttgcacctctgcacatggtctcatctctttctcctgtagctcgccagctgaggtcctattcacactttctttctttctgagtcagaatccctgtcccccaggctgcagtgcaatgccgtgatcatggttcactgtggcctcaaacttccaggctcaagtgatcctcccacctcagcctccagagtagtcgaaaccagaggcttgtgcgaccacacccggctaatttttttattttttgaagagacagggttttgccatgttgcccaggctggtcttgaattcctgggctcaagcggtctgcctgcctcaggattcctattcactctttacaatccagctctgctgcacccctgagcttctggagatgccacagaacacttgtctgtgctcctttgtggcactcaccacgttttgttaaaatgaccaatcgccctccttgacagggttgtgtgctgcttgagggcaggggctgtctcattcacgtggaggttcaacacatgtctgtggaatgggtttcgctgccccaaagctgattctatcttttgctgtgtttgcattggaacaatgggcagaaatgatttcctaattctgcttgcatggggtaggtcagacaacttggatgtgggttttagttctgggtcttatacttcaaatgatgcagggcagagtgatcccacgccagggcaagctgggtgctaaaggatttaggcgctctatcacaagaggaacaggaaaaaagaaggcttaggtggggatacgagagctgtcttcaaacatctgggagaatgtcctgtgttccctcaccgtctaaggctcagggacttcttccagaacaggatggagccctggacacacaactacacacacaaacaattgtcacagagtgggaggcaggataaagtggtgagtaacagcctggcctgagacacaggctcacgcatctgacactggctgagccgcgcactagctgagtggccttgggcatgttttgtaacctccttgactgttcccttatctgtgaaattgagataaatgtactacccacttcataaaaagatcaaatgtgataatacttgaaatatgtttagaacaaagttggccatattcaataaatgttagcttaaaaaaaaatcagagagtgtgtcatccctcaaagcctaaaggagttcccttcagaggctgcagacaccagattcagaacctcgggactcagcttctcaaaggtgcttttccagattcccacacatccctgatccctgagcatctgtggttctcagccgtctgtctttcttctctgcctgagcctcatcctctcagggcccaactcaactttataaaaattttatttatttttaattttacaagtaataattgtatatatttatagggtacaatgtgatgttttgatatatgtatacatcgtagaaagattaaatcaagctaattaatatatcaatcactttaccaacttactgtttttgtgtgtggtgagaatgtttaaaatctattcttttagcgattttgaaatatacgatacattttccaacctctgcttttaaaagaaccagcccactgtgacccaggcagagtcgtgggggctggggcgggaaaacaaatcaagctgacaaccggtaaatacaacatgtcgacagttactccttcgtaatatcctagcgtggggagagctgccctcttcttttttttttacacccctagagacatcccttgccatgagagggttcacatgcaggtatgctcacaccccagcctgtgtgctgagtgagctaaatttgcaaccataactttctcttccctccgtactcccggcagaggtcagccctcaggtctgaggatgcgccctgtgtggagtggtgcgcgctcagaaggtccggcaagggggaaaaggccagccggggctgtgaacagactcagggctgtccgggcagggacactcagaggaaggggtagcggccaggtctccttggttcttggaatcctggccgtttaaaggtggggctcagagcaggggctcctccgcccgggcccacgggcaattctattcctggtaaccctcgaaagcctgcaggtctctgctctggctgtggcccgggccaccctgcctgacgcgtgtgcttggagtgagggccgtgtgttcaccctcgaggaagactgcataggaagagagtggcaggtctatttaccccagggcgggttgacagagagaccgagggtggtgacagggtaaagagaaggagagcaggggcggtgtctgaggtctgcaggcagcagggagaaggctgccctgacccgaagagggtgcccgaggcttcggtgtgctgaggccggggcagctgctggacttcgggtcttcggtgcggaccctggacctgcctcagatccgttcctagccgcccctctgctctgtatggcagggaagaggccctaaagaatgctcctctcaggatgccgggccagcaggctgccggctaggtatggaccatggacggaggctttgatcagagattggaggctgggtggggcaggaggaggcaccttctccccgctccttctccgtcttgggtgccttctctggcaggagctgcatttctctcatgaccccgctcccactgtggctgcagtttctttgcagtgaccttgatgcgtggccttggtcagcggcctcctcccttgtccctcagcctcaggcagtggtggcttcctgctgttgctggtccctgggttgccttactgacccctggttgatttcctgacctttttggttttttttaatcacctgtgcaatcaattccccacattaaattcctcctgttttatatcttctgttacacttatgggcaattttaggatttagatcaaaaccaatgcatattgttacactcatttatatagtgaagaaattgggttttagagacgctaaataattttctaaggttaccaactaataaatgatagagcaaacaggatttgaatctaaatttgcttcacttcctagcctattctctttccaataggccttactgcctctgggaatacatcttggtcaactgtattggggaatatgtgacgcagtgtgagaagccagaggaaggagagctgatgggctgaggatggctatagccttctaaaatcaccccagcactctcattgctaggaagccaggaataaatatcatttttaaattctcattttaaatattttcagaaaatctgaatagaaagaaatctcactgtatccacagtagactgttatttagactgctggaaatagattgaaatcgttaggcttaatggaaagctgggtaagatactatgatttttttgagaaacaagaagtcaggctgaaaggaaatgcctgctataattagagaaaattaagatttaatccagtaaataccaatgcaaacaattcttcccttctctctctctctctctctctctctctctctctctcgtgtgtgtgtgtgtgtgtgtgtatttctttcatttctcttttaaaactttaaaccagtggctcctagtgaatacccttgcatcacatcttagactggagtgagttgttcccaaggcaaagaacttggtcttgtctcagttcatggtaggggctagggaggggtgttgagggggaagtaagagaggaagaagagggaaggaaattaggttaatggtataattttccttaattttaaaattttttgttttgtttttcttaaatatcaccagaaacacttgcgtggactagcatctatagtataagatgcatctgacttatcataagttttcttttcttttttttttttttttgagacggagtctcgctctgtcgcccaggctggagagcagtggcgggatctcggctcattgcaagctccgcctcccgggttcacgccattctcctgcctcagcctcccgagtagctgggactacaggcgcccgccactacgcccggctaattttttgtatttttagtagagacggggtttcaccgtattagccgggatggtctcgatctcctgacctcgtgatccgcccgcctcggcctcccaaagtgctgggattacaggcgtgagccaccgcgcccggcttcataagttttcttattaataattgatggtgtgccacagagtggcaggactccagtggctctgccctgaaaacaaacttgggaactgctgcctgtgtatgccgggacgccctcctgtgcatgctgtgtggatcccatcccagaatccattctaggagtggtgatgttagccctcagcttcctgaactcacccagccccagctcttctcttcctctgcatacacaatggcactccagaccacaagtgccccagccccattttggttaagaaaacattgttgtttcagtcagaggaaccccttggagttaggatgagctgcacacatctcagatggtgttgttctggagtgacccggcagcatctagaggatttaggaggtgccttctctgctctggttgggggagaaagagacttggtgaccatcactccttgaacttggactatctcaaaggcagccaagacctacaggtggattgtgaaagccatcagtttgaccttcccagcctgggagtgcagggagaacggcagctccagttcagggtagacactcccctaaacatttcccctggagcccgaggtcctcagtcctccagcccccaggacctcacttcctccctcccctccccaatccctaactgtttgctggaaaagaagactcttgtcaaatagagcatagcaaagacccagcctgtctctgtgtgttttgccaaggacgaaaacaattttccaggaatcaatagttggtggcgtttgaagatctcatcccaaaccccatctcattaaaccaggccattttattcaatatttgcaccacagccagggaggagttaatgggatccagattcatcttggaggtgagagtcttttataaattctaataagtcacaagaattggcagcttgcaggccaatttttcagaacagccaatatttaatagactacctcagatgattaagtgaaatgatttcttggagcagtcccagagatggctctaaaagttgtctcagctaattatctcagaactaaagaggaaaattgcaatgccacttgccagtttaaatctggtttctgacaagagtagagcttcttaatttaggctctacatgctccgaaagtccaaggtggggcaacagagggacagtgagcaccttaggtgtgtataaaattatgtgcatttttatccatttttcatcagattcccagatgaacctatgactacagaagtaaaactactgacttggattattgatgccatttattttactggtctatttctacaatctggttaatttttcattttgatttgtctttttttttttttctgagacagagtctcagtctgtcgcccaggctggagtgcagcggggcaatctctcactgcaacctcagcctcccgggttcaagtgattctcgtgcctcagcctcccaagtagctgcgattacaggtgtgcaccaccacgccaggctaatttttgtatttttagtagagacgggttttcgccatgttgaccaggctggtctcgaactcctgacctcaggtgatccacccatcctggcctcccaaagtgctgggattacaggtgtgaggcactgcgcccagctgattctctttttatccccttcctctaggtagtctttgtattaatatatggaccactgaacccaagaaaactgctggatgatttatcaaactgtttttgcagtaagaaagagatggcatcatttatttgggaatctaacacctcactgcccattcctccccattccccacccctgcccaatgttaaaacattccattctaaacctgggaatagcgtggcaaggttcagtgatttcaaaataaaggcaaacctgagttctcccttcaaagtcagatttccaaacatctgaggacagtgtctgtttcctgtctcagtagaattgctaaattacacctagcttcctccgatgagatcttttcctctccacaccctgccaattacttgccaattaatacaatcaagtaaccactttgaacaacttttaactttgaatgtcaggttaacatttttcctcactctcctccacccacgatttcttgaattttcaaggcttgagctttcccccatcctccctctcaatcatcttaaaactctgcaaggctagggctagtgaagaatatgcacatgaatatccgatggacttctgcctacttccttcctaaataagcaataaggtcaacaagggctgggtaaaaagcctcacaaatacgaaagctgtcatgtttgtgagcccagaatttcagttctgagtgatgattggctatggaaaatatctggtgtctccagaaaacaaagcccttttgttcagggagctcaaagtttttaaacgcccacacattcattccctcttccgaagccccacctgtgaggaaggttaggtgggggtgaccatctgcacctgcacgctggtgtcctccaggaggaacttgcacttgcatctctgtccatttttgccccagtgaccagctcacctcacgtggatggaggcaactatgataaactcctgccctggtgcccgaggacaggacactcttcttattcctccacaagctgtgtgaccctgaacaagttacttaagttccttctactgccgtcaaatggagataaagatgcctacatatccgcgatgttaagaagattaatttagatgaaatacataaagtggctagcattccatgttagatttcttccttatctgtagaatggggtaataatacctgacaataatataatcctacttatccatagcctactaagggctctgtggaaggctgcaaggattgaatatacctgaattcttctaaaaatgtctgatttggaggttaaaacttctgaaagatgatgtcaccgaaacacgagtaagaactacatcaggctttcctagaatgtgtccttttggaaccaagagacagtgaattatgaaagaattctgaaatcagatatgtttgggaaattctgctgtctctttctatatatatatatatatatatatatatatgtatatgtgtgtgtgtatatatatatatgtatatatatgtgtatatatatatatgtatatatatgtgtatatatatatatttttttccccagtcctcagaactgaaattcttggatcacaaacctgacagctttcatatttgtgaagctttttacccagcccttgttgaccttactgctcacatatgactagggtatttaggaaggaagtaggcagaaatccttcatcggctgttcacatgaatattcttcactagccctagcccccttgagttttaagatgattatatttatatatataaaatatatacatatattctccttgtaggttcacattgcacattagtatcttcaagtcctgtgacttcaaaaaaactttaactataactaaaccagtgtttgcacatttgtttgaccttggaaaacttttattcatgtcacactgttaatatccctgatttgacataacacactttgagttatgctaaactaccctactctcagtgtaggctattccaaggattggatgacccacttgctgtgataattttaaagattgttttaaaattgaattagaaatccaaagtggggtgttccatgactgcatttagtcatcaggaagtcttttttatcctatgattgaatagtttttagattcatggcctaaactcttcttgcaaaagaggaattttatatcttctggattcatcatttgagcattttgttttacaaaaaaaaaattatttttggatgtataaggctttttacctagtatctgtctggtacttaggatcatcaagacatccaggaaagaagtggaaacaaaggttttatccacatattcccacaagtagctttcaccactttctgctggcagtgggttgggatgtttgtctttgccatcacagttgtacctaccactttatcttcatcctcaaggaccaatgcctccagagtttcacattcagtgccagatgcaatggtgtctgttatttacatgtgctatgtatgtatgtgctatgcaccgtgcgtgtatttttctaatttaatccttgccacaactttttatgttaggtattttttccttcatcttacagaggagaagaagatggaggctcacagtggttaagttaacttgcttataataagatgtagaactaggactccaaggcaaggtcgactggctgcaaagctggtgctctttctaatcttcacatcaccttcactcctattccccaagatgtttggggcttcccatcctggcaggatctcatattccacaccttctcttatctttgtaaaattacacctgttttagtaaaagaggaaaaccatctgatcatttcaatcaatgcagaaaaagcattgacaaaattcagtacccatatgatgaaaactctcagcaactaaaaacttccttagctgataaaggacatctttaaaaaacaaacatctaacatcatacttaatggtgaaagattgaaagctttctccctaaaatcaggaacaaagcaaggatgcctgctttcacttctattcaacattgtactggagggcctggccattgccataaggcaggaaaaagaaatgaaaggcataaagatcaaagaggagcaaataaaactgttcctgtttgcagatattataattgttcatatataaaatcccagagaatctacaaaataaatactaaaagtaataaatgaatttagtaaggttgcaggatacacggttattataagaaaatcaattgtattcttatatgccagcagcaacaattggaaaataaagttgtcttttgctttttttttttttttgagacagagtcttactctgtcacccaggctggagtgcagtggcacgatctcagctcactgcaacctccacctcccaggttcaagcaattctcctgcctcagcctctcgagtagctgggactacaggcaccagccaccatgcctggctcattttaatactttttttttttttctttaatacagtcggggtttcaccatgttggccgggctggtctggaactcctgatctcaagtgatctgcttacctcagtcagtctcccaaaatgctgggactacaagtgtgagccactgcgcctggtcaaaaataaagttttaaaaaagcaattccatttataatagtaccacaaaacacaaaatagttaaaaatagatctaataaaagatgtccaaagcttctacactgagaactatacattattgtggataaaaatgtaaaagacatacttaactggaaagctatactgtgttcattgattgaaagactcaatattgtttaaatgacagtgcttcccaaattggcctataagttcaacatattctccatcaaaatctcaagaagatcttttgtagaaagtgagaagctgattctaaaatgtatggccatgcaaaagacataggctaaccaaagctaactttaaagagaacagtgtagaagaacttttcctacctgatttcaatacttttactgaaaagttagagtaatcaagacagttttagtattggcaaaaagattaacgttcagatcaatggaacaaaatggagtctggaaatatacccacacatagtgataggagatgtttgataaaagtgctgaagcaattcatcagagaaagaaaagttttcaacaagcggtataaaataactgaatactatacagaagaataatgaacatcaattcttacttcccaccacatacaaaaattaacttgaaatggcctatagaccttcctagttttagtaacacctaaagctaaaaatatatatagaagaaaatatttgtaaccttggaatagccaaagatttttttagatatgtcacataaatgacaaagtggcttcatcaaaattaaaaaaaaccttttttcgagacagggtcttactctgtcacccaggctggagtgcagtggtgtggtcacagctcactgcagccttgacctcctagactcaaatgattcttcttctccagcctcccaagtagttgggaccacaggtgcatgccaccacacccagctaagttttgtattttttgtagagatggggcctctatgttgcccaggttaacatttaaaacttttatcttcaaaagacactgataagaaaatgtaaaagcaaaccacaaactggaaaaaaaaaactatttattacacatatatcagataaagaatttgtttctatactatataaagaatgcttacaacgaaataaaaaaacaattaaaacttgttgaagtatttgaacagacatttcatgaagacataacaatagccaataaacacatgaaaagatatcgaacatcattagtcatcacagaaatgcaattaaaaccacaggaggaagccaggcacagtggcttatgcctgtaatcccagcactttgggaggccaaggtggggggatcacgaggtcaggggattgagaccatcctggctaacatggtgaaaccccatttctactaaaaatacaaaaaattagctgggcgtggtggctgtagtcccagctactcgggaggctgaggcaggagaatggcgtgaacctaggaggcagagcttgcagtgagctgaggtggcaccactgcactcctgcctgggccacagagtgaaactcccgtctcaaaaaaaataaaaaaaattaaaaaccacaggaagataccactattaccctactggaatggctaaaattaaagcatgtcatgctaagtattggtaagaatgtgaggcaaatggagttattgtaccttgttgggaaaaccaaatggtgcaactactttgaaaaacagtttggtagtttcttaaaaagttaaatactcatctaccaagtgacccagccattctactgggtcacttggtagatggatatttacctaagaaaaatgaaaacatgtccacagaagaactgttcataaatgctcatagcagccttatttgaaatagtcccaaatgggaaacaacccaaaatgcccatcagtaggtgaatggatgccaaattgtgccacagttgctctctcaggaactacattccaagacccccagcggatgcctgaaaccacagatagtactgaaccctgtgtattactgtgtttttttcctatacacacatacctatgataaagtttaatttataaattaggcacagtaagagatgaacaacaataactactaataaaatagaacaatgataacaatatatcataataaaagatatatgggccaggcatggtggctcacgcctgtaatcccagcactttgggaggccaaggcaggcagatcaactgaggtcaggagtttgagaccagcctggccaacattgggaaaccccatctctactaaaaatacaaaaaaaaaaaaaaaaaaaaaaaaaaaaaaattagccaggcacggtggtgggtacctgtattcccagctactcgggaggctgaggcaagagaatcgcttgaaccacggaagcagaggttgcagtgagccaagatcccaccattgcactccagcctgggcaacaggaacgaaactctgtctcaaataaataaataaataaaattatgtgaatgtggcctcttctctctctctctctctccaagtagcttatagtaccgtactgctggtaactgaaaccagggaaggtgagaccgtggataagaggggacggctgcgtatcaatataacctataaccgaatgtgactagtgataacaaggaacaaactgtcactgcatgcaacagcgtggatcaatcctaaaagcatcatgttgagtcaaagatatgagacactacccccaagtacacacacagtatgtttccatttatttacagtttttttaaatctacactaatctgtagtgatagaaagcagatgagtggctgctgagtatgcagtgcagacagggatagattacacaaggcacagggaaacttttggaggtgatggaaattttcactatattgatcatggtaatttgctaaaactcatcaaattgtacaattttactttttgcagcttgttgaatgtcaatcatgccttaataacactgaaaaaaactccacctgtcctgggcccattttttcagagcctgctcctggtttcctaagggccaaatcatcaagcagtaaaatcatgagaggcttttgagaacctaaggaagaggaactactaaaagctaagaggggccatcaagactaggtgcattctcctctcctaaagcttcttggcttgggaaagaaaaggggtgtgtagacataggctgaagggaggttagtaggcatttggggcacttgtgtggtgccctggtgaacaagacttggaggtgccaaggtgcataggccacgtgaagatacaggaggatggcgctgggggttgaatgacccaggtggtacagatgaggggcctgacatcacccagagggtgctatctgctggcagccacccttccgctttggcctacttctgcttggcattttcaactgtgacttagatgacaacataaattacaagcttgttaaatatatattcagcaaatatctattgagtcctacaatgtgacaggcaccatgtcggtcccacaagggatagatgatgggaggagatgacttggccacctggagcttaaacaataaagaaaggctgtgagacttatatactcacaaatatcccgttcaaagtcttgatttgacacacagagctgtgcttagagaaggagtgtggggttccaaggattgcaaggaggaggagtgtgtacagggacaggcgagcacacggccagggagcccagagggctgggtgagtctggccttgcacgatttgggcgtttggtctgagagaagggcagcgatggaggatttagagcagcgagggttgtggtcggatttgtggttttactagattgctctgggagctggagggggacttggaggcagaaggggatggcagcccaggggagggaaggcagggcctcaggggcacaagggagtggcctgcatacacggcccccaaatgcactcctcaaccctggcctcccttgtcacgtgctgtgaccctaagctgtctcacacctcttgtcccctatccctgcttctccagctcaggctcttcttgtcttggtgtgtcactgtgagcatcgtgtttctgagctcagctctgagtgtctgccctaatcctcgcccctcataaaagcataccgattttggtgtggacagatctggctgcaaaccttggctccattacttatagctatgaccttgggcaactaactaagctttctaagcctcagttttctcatctttacaatggggatatctccctcagtacgatgactgtgaggattaaactgaataaatatgtaaagtgctaggtaaactttaggctttccctcaggttttgccccacaaaatcagaatgattctttggcctttaatttggggacagagaggcaaatgacaataacattaggaaatgttggaaatgttaaaaatcaaacaatctctaggggccagaacgtctctaggcagaaggagggtccggtaaaatctcccctcccccattcagttaggaggcacgtcagaaagtgttgagagtgtagggggcctcagtggcccctgcactaggaaggcagcagcaggcgttcctgctcctacaggagacaggctggcccatctcgggaggcacttagtgcttcttaactaaaggcgattctgccctccagggagcattggcaacgtctggagacatccgactgtcacaacaggggagtactactggcatctggtgggtggaagccagggatgccactgaacatcctataatgcaaggagagggaggacagggtccccctacaacaaagaattctccagcctccaatgtcaatagtactgaggttgagaaactccgggctagtaagaaagccgggtccaaattccaactctctcattaatagcattgttactttgggaaggtatttaacttctgtgtgctggtttctacatctgtaaaatgaggatgataatcacagtaccgtcataaggtggttgtgagcatccaatgagtttacagtagggattgtgtttaaattactgactaggacataggaaaaccctatgtaggagctgggaattgaaccatctcccattggagatgccacctggggtcatagctcttcccccaggggccacatccttgcctccctcccagagagtttctctcttccctaggctacacatccccattcttttcagctgacacagtgcccagaggctttaccatgctgttctgttttctggaaggattctgtcagagttacttttttaaaaagccaccctaatcacaaggtcaagagatcgagaccatcctggccaacatggtgaaaccctgtctctactaaaaatacaaaaattagctgggcgtggtggcgggcatctgtagtcccagctattcaggaggctcaggcaggagaattgcttgaacccgggaggtggaggttgcagtgagccgagattgcaccattgcactccagcctggcaatagagtgagactccatctcagaaaaaaaaaagccaccctagattgtaccccacaagcccagtgtcctgaaagcacagagggaccaccacactatcaccttcctaacccgatgcaaccctctggtgaatgttatctaagatggggttggcatttgtcatgagagttgtgagctgccgttggctacttatactttgatcaattggaaactgccagccctgcttcagcagaggaggagccccagggtggaaagggtcctgagaggacatcacagagtacgtggctctccagcaacaagtgctgtatcaaaaaggaattttctactcagcctgaaaattcagtgaactaaaactctgctttccttgggattaggtagggtagcattgaactgaaaagatcctcccagaaaagctatgtcaccaagcaggagaccctgacccttgcatgccttattcctctttcgcctcatctcctcagtggggttattagtctgattcactctatcatttcctaaactcctcagaggatagcctcttctggaaacaggatcatataaaagattctcctggccgagcgtggtggcttgagcctgtaatcccagcattttgggagaccaagacgggtggatcacctgaggtcagaagttcgagaccagcctggtcaatatggcaaaacactgtctctactaataaacaaatacaaaaattagcaaggtgtgatggtgcgcacctgtaatcccaggtactcgggaggctgaggcaggagaatcacttgaacccaggagacagagggtgcagtgagctgagattgtgccattgcactccagcctgagtgacactccgtctcaaaaaaaaaaaaaaaagaaagaaagaaagaaaagattctcctttgtctaacaacttcaccccacagcagtctgcagagtagcagtttgacaaataaaacgggagatgcagctactgcaaatagcaaaaaccacttcacttccaaatttcccaagtcccgggggagcccacttaagcattcctccaatagagagcctgttaaaccgtaatggctttaatttggtccaattaacctcacactgggctaacttctgcccttagctatgggttggcagctactgctgactccaggtacagtagtgggcaggtaacaccagaaactaactcggcgaatgaaaggaaaatatgttcgccacatcctccaagcaggaggggaaaaacgacctggctcaggcatgctgctccaaagtgcacattcaacccagaaatcttccaagaagccaaatgaggtgaaaacaggacatgtcaactgagaatgcgagtgagttttgtttgtttgttttacattgtcagttgcctttcatttgcagaacatgctgaatggatgtgatttccagctctctgtgattataagtctgattcaattcctttcaaggcataaaagccttttcttgccgagttgtctttgggaattcttcacttgaagtttattctttcagtataaggctgccctgcccaagtgggagaccgagagcctgctgtctcttttacacacagcgacctgtgtggggtcctccacacccaggattaatgttcttctttttggacatttgaatggtggttttcaccgtcaatgggctatggtttgtaactgaataatgggaaatgacaatagaacacttggggcggggactggagagctgaggtcctctgacccagccacctgtattatataagagaaatcagaacccagactccagagcgtgctcccagaaccctggggtcctgagagggttaagtggaggggtgtgggggaagaagctgagcacatcgaacccctcttcctgttcaactagagcatctccattttgatatattttcaacttttaaagttttacatttatacagaaaagtgcaccaatcacaaatgcacagctcgatgaacttttacaaacagaacacatctgcagaaccagcccagatccagaaacagggccacccctcactgctgcctttcaacaccaccccagaaagaaaccactgccctggactctcacagcatctcagtgatacattttatacattcaggctccacataggattgttttaaactttttattttgaaataattatagattcacaggaagttgctaagagagtacagagaagcacattgaattttatattcattttcaacgttcagaaacaaaatttttaagttaaaaaaccggtggtttaaactaaattagcaaatggacgggttttggagccaggccacgtgagattgagtccacattctttcccttaccagcacatgaccccagacttgtcccctaatcatcctgagctgcagatgaggctcatacctccttcctgctattggtgggattaaaatcaaagtgagaccgtgtgcactgcaggaggtgcccggagtgatggatgcggcaggagtgttcaagcagtgcctctcccatctgcagcttcgtccggtttccagtcaagcactactgcacgcccagcaccccagctcctccaccattcctctgcctcccatgcctgcagcagcttcgccctccagctgttggggcaggtggggtctggaggagtagccacctggataggagagctggggaggactgacgaagcaggcctgccctaggtgcctcacctgtgggctggccattgtgaaatcagccctgttcatgtgccacctgaaaaggctaccctaccctccccccccacccccacccccgacgctgggaaagggtgtggctctctgctcattaaggaagcattcccactgtggatgggtaacaaaaggcaaccctcaaggagtgaccttactaaatccaaaggaatccggcctcctctcattagtgggagggtagctgagggtgactcttggccagccggccctgagtcattgagggaagaaaggccaagcctgcatgacccatctcagaggccttgccctggacagaaagggacctggagccacccgagagataacatctgggcgggcctggggctggatccacctgtccactctgcgcacctaaggccgtgcctgccacacctccagatccaggaagttagcaggcaggcagcagtactcagggaggcctccagatcagcccccaaaggtctacactgtggaacctgcttctcctctcaggaaagacttctggcctcaccccctcttctagagcatgcgattctaatgaaatggagcttctcactggagcccaggtttccattctacccatgtcacctgtccctagaggaaaggctaccctccttgcccctgcaggggttgccctgttgtacctctgtgagggcttggtcctggccctacgtgcctcctctctctgccttccagaggcttctctgctccagcacttcccttgggcccaccctctgggggttttcagtccaagaatggatggagaggaagaacctgtccctctggttgcctaccatctctcaggtgtcaaaatgtggcacactccagtgacacctctggggaccagagcatgagccagcctgtaccttgaggcagctgtgccattctgggaattttcccctttccttcctcagtggttaatcttagggtggcagttttaagcctaaggtcaggaagctctggcagaagaggcaatgatgttgatggtgataatgataataataatagatagggtggctggagggatggtgagtggcgtgggagtgaggatgagtcccaggtggtagtcttaagcagtctggacaccctgctgctaatgataggcatcacttattgaatacctatatgaaccatgggttgcactacgtgctttgcacgtgttgtgccacttaatcctcccaataactctatggaggtcatcatcatagggttacgatgtcctgtaagtaacttgcttaaggtcatgtagctagtaaacacagaactagaacatgaatgcaagtctgtgtgactccatgctcctttcctttttctctctctgtcccttgttcaccctacagaaactcttaaccttcctaattttctattctagaaagggtttatttttagctaaccacctgctatgcttgttgagaataaccaacacctgttaaagcttaaggtgtcacccaccctgggggtatttgcattttaatggaaacctgggtgacaagatagtaaccaacacttgcgtagagcagtggctctcaaagtgatgatgtaggcattacagtttgtagacactgtttgcattcattatcccattgttttatagcagtgcttctcaaactttagagggcatcggaatcacctggagacttgtgcaatcacagattactgggcctcacccagagtttctgattctgcaggtttggaagggcctgagaatttgccttttcaacaagttccaggtgatgctggtaatgctggcctgggaactacattttgggaactattgcattgtagcaatccaataaaattagaatagcaagcattattgtttccattttttagacaaagaaattgaagtgcagggacattagatgacttgtggttgagtgatggagttatcaaaaagcaggcgaaggactttgacccaagataggactcttctataccattatttctcaacaggtctgggcagtactgagattactgcaaagatgattcaaaaaaattatatgagcctctactagatcacccaggtggctatggagacctgaatgctgcctgctcttcagggcacatggctgcatttgtgtatgcaaaggcattaccccagtgaagtgagagcacgtggcagggaagcctgccagactcaaaggcctcattcacgtgtatgcagacgtgtcgcacacagacccgttttactttactttcatctaacagtttgcagcgagaattggccaacaggacccaaattctgtcttcaagtggaaaaggcagaggtctccaaaggctggagccagagctggctctcaaggattgctcctagcagagctttggttaagtatgagtacgacatccctgaaggaaaaatagccctgcagttactaacttccacaatgtacctgggtgcaaaggcatcctctgctaatggcattattaaagtccagtgcagaaacagatgcagactcatgctaacttgaccacttaattcagtgttggcaatttagtttcagcaaaaccagacacttacctgagagccataggattaaggagtttttattaaatgtcatatctagcttatatttaatttggacatattcaagaaacaaacatggcgaaaataatttaaatccatactaagaggtttgaggggttttgttgtttgtttttttaaacagacagccatacttcttaagtttcagaaatgctgctgtatctatgttgccctggcttgagatcctaataaatcccaaggtatcaccttgggataccccgggatgcagaaggcaaatcccaccgtacgtgatgcctctccttccccaacccccaagtgctgccgtgacttctcttacaaaagtgaaattgagttataagaatatgatgaaaagttttgataaatggaactaaagaacataatagtaaattaaagtaaaacggtataaaaaaaaaaaggaagagagagagatgtccccacaaagcattctgtggcctgaatggtagtgtggcagggtaagggtcatggggacctggtcacaccattgccccagggcaaccagtatcaggagttttacagccaggtagtcaggaggaacttagtcatcctggtgcagtggaaagggcattggatttaaaggcagtctgtatgggtgatgttgtacaagcttgtagtcccagctactctggaggctgaaacaggaggatcacttgagcccaggagtgggaggatggaggatgcagtgagctatgatcactccactgcattccagcttgggtaacagagcaagactctgtctcttaaagaaaaaaagaaaaaaaattacaaaataaaaataaaggcagactgtaggctctgctctagcatttccaagtcatgtgactttagacagcttatttagcttctgagcctcatttttactgtctgtaaaatgggaactgtgctcagagtgcttcccgcttttaaaggagatcaagcaggagcctgtctacactgggaagctccagacacatttgcccttattgtttcatctgtcctttttccaagtgctgtctgtctcccccaccaattctgtaactctgctcttctatctcactgctcctcctaccccatcctcaaggcattaccagcctctcagtccccattggcaggagggttcggctccacggaggccaatttccagggcatgccaagggagggtcgattctaatcttgctaaacctgggcgggccctggaagtcttctggtcccacccctcttggagagataaggaagtgaaaccagacacggtggatgtgaccttcttaatgcatcacctggacaaagatcgaggaatgtactctcggattctttttcaataagttctctcttttccccattcttcctcttatatacaaggatggaaaaggggccagattttctggaggcttgaggcccatttggcagagagagtgacacacagagaaaagccagagaaccccgtctgggtgggagaagcaggtcaggagtcaaatgcctgggaacagagggcatggtggcaggggacaaaaaaagagagctactggagagttccagtccctgggaggattcagaaggaaagctgagatattcctgttaggaatattctcggcccggtgccgtggctcacgcctgtaatcccagcactttgggaggccgaggcgggtggatcacgaggtcaggagatcgagaccatcctggctaatatggtgaaaccccttctttactaaaaatacaaaaaaaaaaaaaattagtcgggcgtggtggtgggcgcctgtagtcccagctactcggggaggctgaggcaggagaatggcatgaatccaggaggtggagcttgcagtgagccgagatcgcgccactgcactccagcctgggtgacaaagcgagactctgtctcaaaaaaaaaaaaaaaattctcagaatactctccttgggagtagagaagttctatttttttttccttctctttttacccattatgatggtaattccaaaagatcacttgcagggagaggggtgggggccgggagtgctgagagaagtggagtgagtcattgcagaaaacttgagcggggcagagaaggggttcaggatctgaaacaggaaaggctgggccctctgttactcataggatgtgtcaatcattccagcttggcaaatggcagggaacccagagggactttttccactggaatcaggaccctgagcctgaggacgtattgaatttaaataaaaattatttgactggaaattaaaagaaaggtaagttagaaagaaatacgttaacctcaggaatatgtagactccagagaggttagggccaggcaagggtctaagagaggagtgtttctttttcatctgtgagccattctatcagaaatccttatctgtgcatgctgctgcatgatatttttgttttttatttattaattttttttaagctcagtggcaagacatgcatggcattttctatggcaaaggtttcactattcaggcatgtagatgtgtatccgtaacacaaaagcagtccaaataattcttttcagatcatagtatacagtttactggcctagaattagtttataatcagttgtggtcgggccaagaaaattattgatattgggccgggcgcggtggctcacacctgtaatcccagcactttgggaggccgaggcaggtggatcacctgaggtcgggaattcgagaccagcctgaccaacatggagaaaccccgactctactaaaaatacaaaaattagctgctgttgtggcacttgcctgtaattccagctactctggaggctgaggcaggagaattgcttgaacccgggaggcagaggttgcggtgagctgagatcgcgccattgcactccagcctgggcaacaagagcaaaaaactctgtctcaaaaaaaaaaaaaaaaaagaagaagaaaaacaaaagaaaattattgatatttagaagtcggaactatcctcaattattggatttaagtaaatcaaaaacatgcctcgtttttggatgtaggtttactggagatgacttaacttcattccagccgatttgtgatgagtgaggcatggagtctggctcatagcagacaattcagtactgattctgaaacgtatctccaattccggaagtaccgtgtcttctaggtggtcaatccactgaaactgagtcaccctcatgggacagatgcttgataacacagccacgcccccacactcaaactccagaggcagctagagaaacttatgcatgattcatattgcttcatctgtgactccttcttaaattgtgacttcattttctccaaatggctctgcagtgtttcaaatctgggactctgtggcacccagggcagttcaggaatgggacagaaaggctgtctcaggttcattttcaaacctcatgcccatgtgaatctggacacccacacttctgtgttcacgttagaaaggctctcctctccccagcagcctcaattcgatacattcagacaatttgtatcacagcaagaaggtacaactgaagcctctaagttgtctggggtaaatacccgaggttcccagtctggcaccaagaaaatttaggacacagacacacggacacacatgaggagtttaggaaaggaggtttaataggcaaaagaaagagaaagagaaaggaaaacagctctctctagttagaaagagagggcttccgagaggaaaaagaaccagagaagagccagttggccatggatgtgccggatttcatagtcaggcttgaggaggtggtatctaatttatatagggctcacagattggttcgatcaggtacgatgtttacatagcgcgcagggaaggatggccgccccaccctaatcttataaggcaaatcaactttccccttagctggtgccatcttctctgctccttactgtacaggtggctggcaaagaagggacgatggagccgccattttgaacatggctggcacaactgcctgcatgtatgtctgcagctcgattttataggctgctctttgctggaaaggaaaatgatttggggctgcttttcattaaaaggaaaaccttaccaaggacttccataccctcactatctgcctaagtaattgcatcttcactcctgtatcacagctttgtgagccacgtcagaataaattctgacaagacctgggtctgaggacgctgcttagtgtatctctccaggttttgacagcccagccctttgcctgcatgaaaataaacgggatgtgcgcactctgctttaacttcttccaagtgccccataaactggccacagcacagggcgtgagcgtgaaggaaactcaccacctcagtcacttcctccaccacttcatatctgctaggagcctgactcgccaagtccaccaagtcttctgaagaggattccatagaaagtgggcacatctaccttccctgttaacttgaataaactgttccatctgcatcaggtaaactcacttttccatgctgagaccaaatgtctcaaattcctcatagggaagtagttagcccctgcctaatttgtatgcactaattgggtagaggttaaattttgctaaaaacaaacaaaaagcctcagtcctgacgcacctggtagggagttggggcaagttggccaaatgcctatctgttggctgatccttcctgaagccagaggcaaagcagccagtgtttgctggaagctggatacagcctttgccactggctgatgcatgtatctcactcagaccgtaggatacgggacagggagaacaggaatgacaagtccgtctcacctgccgaatccaaagagctgttcatggctactgacagcaccttgctgagaaggatgctggggcagcatccaggctccaggagacagatctgtgattgttcagccacgtctgcagcaggcacaggctggaggagcagcagtgcctggcatcataggtctgtgtaccttagacaatagccaagaattcagagatcaatttttccagcacagaacccacatcagatgtaatatggcctccagtctctacacgttggcccaaaatccaacaccaactgggagaagctacttgaggtcacataagaaagaaaacatcagggtccaatctagggtataccttggagaccttggggagattcctcgaactttcctagcttcctcgtacttgttatttttggcacccgccattgattttcacaaaggaattggcagtaagtcttttgaattccagggaaaccaattgctcatttgcttgttttgaggaatgtggagttggggagattgtgcctagcccaagaacaggtcatgaggggaaaaaaaatgctctttgttgggggtagcagcattagaatggaaagaaaagcaggtcaagtgcctggtgtctgggtaccaggagacatgaggtgcacctagaggacaggtgagagaggggtgggcaggtgagagggaggccatggggagaatgaacaggtgggagtcctgtgtgatttttttaaaacatcgagaatgctttctggcttttcctgttataagatgatgattcaagggaaatattgataacttggttgtatatgtggcaataaaaggacctgacctatagtttgggcaaagaggacctacatgtaggtttgaaaatgtcagctttaggccaggcgcagtggtgcacgcctgtaattccagcactttgggaggccgaggcaggcggatcatgaggtcaggagttcaggaccagcctggccaacatagtgaaaccccatctctactaaaaatacaaaaaattagctgagcatggtggtggacgcctgtaatcccagctacttgggaggctgaggccggagaatcgcttgaacccaggaggcggaagttgcagtgagtggagatcacaccactgcactccagcctgtgtgacagtgcgagactccatctcaaaaacaaaacaaaaacaaaccaaccaaacaaacaacccccaaaaatgtcagcttcacaaatgaagactttgcttttccttctgcagaagtagctcctaaatctataaatctacacgcttatagaaatggactatagcttgctgaaggaactggaagaaactggtgtgtgtgtgtgtgtgtgtgtgtgtgtgtgttttatttgtggctatcatagaagttaaactggttctaatttctaaaccataaaacatttatattcccattaaactttttctttttgtaaccattctatattccctcataaggcacattgccaaattaagtcttctaaggaaattcagtacaaattcttttcacggcccaaatactctttgaagaatgaagaaaaacaaaatatgcccattttccttggaagattagctgggctattttatgaattgagactcttaaaattaaatcattttgtttgaaagaagccagaacgcacattcattctcaatacttcctgcctctcgatgggatagtagacatttccagagaattgccgtgccaaagttctacaagtctggtctttaaacctgttttccaagcctgccctccagttgtttgtggagaaacatgcctttcatggtaaatggaaacatacccagtgtcaagttctctgctcttagctctaaaattagaaagtcttgggtgggggagtcgagtaggggcgaggagtgttggactgactgtacttactcaaaaactcaaattagatggcattatcgtatgtaatgtgtactttattttccatgaaaccagggtcttttgaacattgaggaggggaggggggatatgttccagggagtgtgaggagagaacggtgatcctgggttgacggtttgtattcaaacaggaagccctcttccagtccacaatactctggcctctgtttgtttgttttttaaatttttacttctaaaatcaaagtggaaagggcaatagatggatggatagattgtatgtgtgcgtatgtgtgtgtaatgttgggcaagttctgaaaacttgcagttttacctctgaactgtccctgaaagtcaatctcctcctgtcatattcttcccagtgtacctgtccccaggacactccagtgtcctgacttttccatgtttctaagcagaactatgagggtggatgtccctgttgccagagccacagagatggggcaggagagaggaaagagctagtgtccaagtgcatctacttctgctgcaggctaagaggcggattctcctttctcttccactttgccagaaggggaggaagtatgtaaaagaagtccttgccctcagtctagggtcctgtgagcagttttgccctgcccatcgaagcaaagttttgccaaacccattgcatgactgtgcatttgtttacttcctcctttgcttaggttgtaggtcctattacctaaatgttagctcttctcttcatgtccaccattattatacagccttctggagtgtaggggctagaattcatttatctaagtctctctttggggctggcatataattaagagttctacaaacatctgaatgacatctatgtgtgagacccatattccagcacttgagtatgtgtctgtgtgtattggggttgtgggattccaaaggtgactcaggcacctgcagtttgcaagatcctaacttcagggaagggagaggacataatctactgtggtgccaggcagaaacaacactcagtgcccgctaggagatgcacacatacacacattatcgagtctctaaattgaacccggtgcttagcacatagtaatacatgcttgttggttatgtttaaatgttctaaatccaagaaatactaagtttaaatattttaaatccaagacatactatttctttctttctttttttttttttttgagacagagtctcgctctttcgctctgtcgcccaggctggagtacagtggcgcgatctttttttttttttttttttttttttttttttttttgagacggagtctccctctgtcacccaggctggagtgcagtggcgcgatctcggctcactgcaagctccgcctcccgggttcacgccattctcctgcctcagcctcccgagtagctgggactacaggcacctgccaccatgcccagctaatttttttgtatttttagtagacacagggtttcaccgtgttagccaggatggtctcgatctcctgacttcgtgatccgcccgccgtggcctcccaaagtgctgggattacgggcgtgagccaccgcgcccggccccaagacatactatatgagtggtgtttcaggtttccagcctccagcccgctcttgaagctgcactttggtgcagcctttctctttccagtctttgaaggagccttgaatggggtccaacaaatggtcccctcgccctcatccagggtctgtggcacctctttcccatttcctgaggccatggggggatgattgcagcctagggctctagaagccaagggcttctaattagcaaactgatcccatttgtgatgctggttagttggttagtggtcgtagtaaaacacctaaaattagtctctggtgaagtatcggctttgctcaggcaacctcaggtcggtggaacaaagggactgggggcaagatttgcagcctggccactgaggaaaaactccagtggggtagggtgaaggggaggaggccacatttactctcactaagtaaaatctgaaaaggcccaaccaagttctgttgattgctgcttgctggcagtggtggcaagggagagaacagacggatacaaggctagggtctgttttgaagtcacaagaggagccagaaatcgctggtagaggtcactgctttgtttcaaacaactgagatgacgttgccaaaagggaaaagttcaaaatctgaacctattgtagaagttatttggcacttctcccttcatttatttgacattaaagtgtggtgtaggctgggcgccgtggctcacgcctgtaatcccagcagtttgggagaccgagatgggcggatcacctgaggtcaggcggtcaagaccagcctggccaacgtagcaaaacccaatctctactaaaaatacaaaaattagctgggcatggtggcgcatgcttgtaattccagctactcagaaggctgaggcgggagaattgcttgaacccaggagatggaggttgcagtgagctgagactggggcacaaaaactccagcctgagccaaagcaagactgtcaaaaaaagaaagagagagagagggagagagggagggcggcagggagggcagaaagcaagggaagcaagggaaggaaggaagaaagaaaggaagaaaggaaagataattgtaatgtacactctttgcatgtggcaaagtatactctttgcatgagaaagttttctggcaatagctaccagtgttcctgtttcatagaggactccagcccctcacagcattgtgactcttgccgtctccctctcttttttctgaaaccaaagggttctttgctctttaccaaacaatttaagccttgttctcatttttcacttgggatgttaaaaatgctctcgggaaacagttctcccattcagaaattccaaatatatccgtgagcctttattattcttcaaggttacaggaattttccttggaagctgtttggatttgagtagaatttttgcctttcatgtctcctcttgcttttaaaataagttttggtaaattgaagtcgctgagcttatatttgcttatttattttgccaaatttagtctgtctaaatatgctttgtcattacaaaacaaaaaaagtagttttaggctctcctcctgaatttccttttaaaaattaactgggcaagatattacaatgtgtcatttgttaccttcaacagtaagctggtattgacattaaaaaatgaagccagctgtacataaaaagacatcttttggcgtctgttttaacaatttgaacaaaacctcgaaagccatttcgtcttctggtctcaacttcgtaaattagacccttgaatctgccaaatttcaggagctcctttatcttaatgcggagatactcctccaaagagaactaactatatagaatgttgccagtagaaacaaaagcatgtgtatttgagacacaaagggaagaatgctgtcggtctcacttcttgcctgacatattgagtggtaaatgacagctggcacagtagcctctcccagaggcaagtgtgttcactccagagccacttctacatcccagcaatctgccctgcccaggcgcagcactgctgtggtggcccaagtcagaactggattctgcagacaggctcccaggatacaaccagggaaccaggaggagggactgtgtcatcactcttcctgggaacgaaagtgctgcctagccaaggtgaactcatatggggcgaagtggaaggacctcaaaaagatacatgaaaatcaaaagacgttgctcctgacattgatccgtaactaacagggggcatctgggtggatcctgaagatgctccgtgtgctcttgtttggttgggtttgactaggttcggtgggaagctcacagatttgagatcacatgattggagttcatgatgccttcctcctttaatagctgtgcatcctcaggcacatcctctaccgtaacctctctggacctgtacaatgtggacagtaatgtctgttatggttctgtctatgtccctgtgaagagtaagcaagttaatggctatgaaaccattcagtaacctgcaaaatgccagcaatggtggcattatgactgtctgggctctgtgctaagagtctatgcttggagaatgtattctggcctctaggcaactagctttggcttgagttgactgagacatttggcttcatagttattttttgcagtccgtcagcctactctagtctcatctgtccaactacttcaccatgggatgttggccaaaccaccccacctgtctgtgcctcagtgactccttctggaaaatgggtctggtatatagctccatttgtctcagggagacccatcaaagcaaatcaagttcattcacttaaccagcatttatcaagggtctactctgtgcctggcacctttagggtagaatcatgaataaaataaagctcctgccctagaagaagagacagacaagtgatcagtcagttccaaggcaataaaatcaggttacaaaagaaaaacaaggatgatgacatggggcccaccagaagccttgtgctaaaacagcaggattagaagagaccttcttgccaacttaatttcactaatgtctccaggaaagaacctgtgctgtgctcatctagggagaaatggttaaattgggaacattcacccatcttgcacagtgttggtcccccgtaacacagagagccacagggggagaagtgtctatacttcttacagtaatctcaggcttattgtccagagagtgtccaaagtggagatgtccttacctcagtaccaaacagagggtgatctcacacctggatactttgctaatttgcccccgaaagtcatttcttattggggccgaagtaacactcagcagttgcgagatttgataaggtgagagtgaatccacagcacacctgggagaagtctggattgccctgaggtcagccttccctgactcactgacttggtggcttcacagcttcacctccaaagctggtggacaggccttatcctgccctctgcctgtgctgatgtgaagacatcatctggactcttgtcgtatgtagggtgggcgggggccactggacaggtggccatagcaccaaattatacagaaattcattcttttattcattctttcattcacttattgaatggaatcgaatatatcacatgggctgaactcgatatggcataaccaggaaatagcagcttctactcctccctcaactcccatcactgcccttccaaccttctctgtcagatcttcttccactagtaaacatctcaggcagatcccacacaattcagtcccttttatgttgagctgttttcatgttagagtgttttaaaaagcctagtgttaaaacagtttaaaactgtttcccatcaagttccatgctctttcccttcccccgagctcaggcctgacccaagctcgtaaagattgcatagtctgtcttttattattgctctgtctcttgtcactcgctagctgatttttgctcccagggtagggcagagagtcgggggagagggaaagaagcaaaaatgtctttttcctttgctcctaggtgctgttgtctagccattggcattctttgaatacagatgctgaaatactggttcttataaggtactttagttaggtactttggagcgaccccatccccctgccccaggtcctgtgccttgcagtgcctggacttggaagagtaccctccctggcagattcttaggattccccttcaacccaagggtcattgggacaccccacatggccgtctcatgtcgggttcacctggccctggcagtcagggcccatggctggggacctattaagaggactcaagctcaactcccatcttcagagttcacgtggcccatgaaaatatgttccccctattaaactctgaaaagcaaggcttgccgagagctttttgctccccaagatggtggcaaccagggcaggccaaaaccctgcaactcagaaaacatctaccagaaagggagattttaaactctgctccgactcccatactctcctgaagctatctttacttggctcaaggggcggagaagcagcccacctctaccacctcactcaatgagaggaaaaggaaaataaatgcacagtgcttttgactataaatcccttacaatcaatccaaaaccacatctctatacttctatctgtatctatctattgttttggccaactcttaaccagtcctgcatggttggtaagctgcatctctctttagaatatggggccacttgtttcacatctcagctttggtcatgaggagaaattctcaaacagaaaaatttcagcttaactttctgctattcactcattcattcatattattcagcaaacatttatccaatgtgtactatatgcccaggactatgccaaggtgcacccagtaagaagcaaaactgacacagactctgccctttcctagatatgctgggtgaatctaccaactgctggctgcttgaaacctttcaagaacatctaaatttgatgaactcaacctcctatcaactggaactgttactctgtcacttggtgcatgactacaaagatagttctgacttcatgtttataataatgatccccaatgctgcaagatcctgaagtgcctttgagtcatcaccaataacttactcatcagaattgctttcgtgttgagtagattttgctgatatctgattgttcagcaagtacaaacttaattaagcttctattttagtactagatacatgctctaagatcaagacagaattccctataaacagaatatttgctagatcatatcccattatttgagcaaactggatccagaatattttcttgtttgtttgtaaagtagttcatgtgtacatttgtgtgtgtgtttgtaaatccttcctttcttggtgaattttcttttattagattgaattctcctggtattttcctttttatccagaaaataggagtacccgccttcctggcttaaatggataattcattgaaaggtttaacttgattttttaaatgcaaagagatatgtttttaaaacactattcctgttcttggcactgccaatcaaaaacattcaacttagaatatctgatttgttcctgaagttggatcctatgtattttgattttgtgagaatttaaaaaatctaattaaacctcagtgtagataaaaagttttgatctcatacaggggaaaacaccagaggatctttattgttgccaagttacattgataaagttttgcattctaaccccagttccctgatgtaatatataaatctcgttaaccttataaatatgatttttcaagagcaaagaacttctcccttcttcctttattatgtctaatttgcatataagcacatagtccaaatgttggcagataataatattttaaagggcatcgaagtataagaagaactacatacttgcagatgtgttatgaaatataccccattagtcactttgtatttgaaaggcagaaaaacaggcacctagcaacagcatgccgtcactcaggattagagaaaagccactttacatccagtaactattaccccctcatttgggagctgtcaagctagtacatttaattacacaaaagatccttggctgttgattgtccatattcacggtgaatgacagtaatgacatcaccaaaggatgccttttggtggtggaggagacaggagactgggcttagtaggagctctccagataggctcgtcagtcagtcctatgcagagagacccaaggctccacttgagaactgtgctttctcttctgaaaagccattcatccttccttctcttccctctgagtggattactgggtgggtggggaagggggttgccctcctagaacacagaagtaagggtccagaacttaacactgttcaggagcaaactttcccccaccagccatgggggaaagcatcaaatgctgagctcttattagacccaatcagatggaattttcagcaggttctttcttcacactttttaggagggtaaaaagtaacaggaagcaaaggagatgacgagaaagaagaaaacatccaaacctaacattggtctggggagagattccttgtggaacatcagcaggcgcttgcatctgggccagacaatgtaggggcccccaaggccactctgcagacatcactgagcccctgtagcaaagaccagggtccagaatgaagatgcacagctcagtcctcaagcagctcccttcaggcaggggagctcagcacctgaggaatgtcccagaagcaagatgttccctctgtgtcctagagacttgggtgcagacagaaactcacatatgatcaggtcatatgatcaggtcttgccttccagtttgagcctaggttggataagtagaggagtgtcaagaagagcagtggggatttgcatgcatggggaaggccagggctggaggcgagatggactttccctgtctcctaaaaaactgaaaaataaacataagagaaaggaaggaggaagagagaaagggaaaaagagagggaccaaaaaaaatagcatccatttgaaatagatggttttaatgattgtattgcaatgtcatgcacgacattgtgaatgtaattaataccactaaaaatagttaaaatggcaagttgtatgttatgtaaccattttaaatgatgtaatatgccaaaaatcacagtgtgcattttaaatgaaggaattatatggtatctgaatttatatctcaatagagctgtttttagaaggtggtatccacaagcaagcatgtgtgtgtgcacgtgtgttggagtacattcacatgcacatgtgtgtgtggcaagagtgtcagtttcctagctaatctactttgggtggaaactgtcagtgatgactaggcaaaggtggagaagagaaatgtaacctacctgtccattgttcactggtgccctcgagaaagagagaaagaagtatgacaaatgctaaaataatatgatattataagcttcacatatttttataagggggagtattctccaccacaaattccacgcctggtttcccgttctcaatacactttgtttacagagtcagtctcatgaaagctgtggcatgaattatcaagctgaagctcctattttccccttgaaatatgcgcttgtgcttaggaatgcagcatctctcttccaattataccttggcgccagagtcccttttcctggaagtacacctccaatgtcaagagggtgtggtgcagtggagatgatgctgtgtctgggtcaaagacctgcctccctgcctaggagaccttgagcagtcattgcctggacgtctttgaccataaaatgcagatgatgatgatgcctcccttgccttctccctggagtagcgtgcgaagcaaaatccaaacaggataacatgtgaaagcgttcagtaaactgtgaatcactgccttagtggaaactattctggatgcacgtaatagaaacccaatcaagtaagcaaaaaggaagacactgagttgaaaggagactgggatacctctcggaaactatggcaggaggtgaggctggatccagaacccgggtctggagagcggggaatgcaggcagctcactcccgtggcttctcgctgcttttccatctgttttcatctctgtctctctctctccagagtggcttccattgttctggcttgcagggccaagcagggataccccatggctcctgtgactacatagccttcattcaagccatgagcccagacgtctacgccaggtcctaattcagttggttcaactgggctgggtgtggacacgtgttgtccagtgagtcatgaatatggataggggtcacacagaataaacttgaccattctttgtccatcctgtgggtgtgagctgggcaggtaccaggagaagtgccttctacaaacatttggcaacatctagtggtgtgattacaatagtcagcgaaagaggaagattcaattttgaggacctcctttcctagtgtccccatctttgctgccttctgtgagtttgatcatgtggactccatggaggttggccactgctgggcaatgcagccaaacaaagtgagcaaaagtaggctggagggctccgtgggtgactggggctaggctgcctctggtgccccaagaaccctgaagccaccttgcagctcttctgaaatggtgagtggactgctgttcttcttgtgccaaggtgtccatgttgcctttctcacaaaatgtattgcaaataagagtgggtacaagtcatagaaacccattccaagctagcttacataaaaaggagaccattctggggctgcttttccagatccctcagtcctttctctcctgctgccctttgagccattccactgtttccagctctctggagacaggcatggtgaggtctgcattgatctccccccatgaaatgaaggagaatatgctaaactagtggctgctgatttttcccccttctttttctgtcattgcctgtggtctgcaattacccattcccctcttggccttcagagctgtgcgagggtgagcaggtgttgagagcaactttgttctttttgagtcaatttcattacgtggagaggatccaactctctccgtgtagctggcagctcccaaggccagaccactgggcagggctcccaagagcagtgctagcctctttggtgtcacaaagggccaggccaggcctgttcatctctttccccaagagcaagctgctttttgagcagatgtacaaacaattggatgcctctgatagactgcagttctgtaaggttgcaatcctaccagccctgcagagaagtaaaaagaaaagctccaaactgaggcctctcaattctgccgtctttcagactttcctgcgttctcacaggtgggccagcaactaaccatgggccagtaggcctgtcccctgcactgtagaagatgctggttatgggatgtataggtggaagagggaagggagccatgcagaacacccaggccttttccttgcccagaacttaactgggcaaacacataacagatccctgcagcatttaacccttaaggattagcccttaagaagctacaaaggtaaacaagtacatgattacattcaggctagttgctgaataataatagcatctgttcctggcaccatactaatcagtttacatttgtcaattcacacagcaaataagtgacagagccaggatctgaacccagacagtcactacacaaacttcctcccacattatcagcctctcacaatgcaaacaaaacactgacacagaatgcgatcgtctttgctcttgtgtacttgtggtaatttgcgtgattgaaagataccattaggaagaagaaatgttttaaatatctaacccctggaaaagcaagatttagagactaaaaatttcatgacccatccgaagctcagcagtcaagtttgcaattctgccaacttcccgcaagagtaaaactggctgttctcactgctgttaatagaggaggaccatgaccttgatgtacaggtggtgggagggtggggcattatttaagcaatgggatctgatggggggtgctggaaaatgaacaaaagtgtgaattattccacagctgctcaccctgacgtttattgtgactttaaaatctgagaacatatggtaacggctggaagcatgaaatagcagttggaaacgtgtagacttaaggaaaaaccagccacccttatacctccccacttggcttctctgtagaatgctgttgtcttgctagcctttttcgctcccaaatctgaagaaagccctggaacaaatgtccccttttcttcagccccatccccccatgcatctgcaagagcttttccccctcctgtgacagaagttagtgttttgattcttggctatggtatttttatatattgtgcccttccacagtttttgttggatcttgttaaattccacatctttgttttacaaggctggatagagagctggaaacattgggatgacattttgtttgggaatccatggtggtccttggaaattcaggccaacggctgcttcaattgccagttgagggagccccgctgtgtggctaggtgataccaccactccctggcccctcaataatccccctggtcatccagcaagcctcacatcttccccttcctcttgaaatcctttgggagcatcctagtggcaatgactgcccccttctctgtgccaggcgctgacttccacttagcctgtataactttctagttttctttctttttttttttttttgagacggagtttcgctcttgttgcccaggatggagtgcagtggcatgatcttggctcaccacaacctccaccttctggtttcaagcgattctcctgcctcagcctcccgagcagctgggattttaggtgcctgccaccatgcccagctaatttttgtattgtttttatggtagagacggggtttcaccatgttagccaggctggtctcgaactcctgacctcattatccacccgcctcggcctcccaaagtgctgggattacagcacctggcctactttctagttttcatgttttgtgtttctctcttctaatttgtaagattctgaaggttcagaagcatgtcttctttatccatcccctgcctcactacattgacaagtagtagccgggtgcctcctctgtcaacatacacattcatatttttatgcttgctgccaaccaccatgcctttgatcaaggaatgaatccactgctttacagagatttccatttcccaatcctctcctttcctaatcaaattgacttgggaactaggggcactcatagaacagaagccagttcacctctctcagagtgagagagacctagaggtcagtttcatgggtaaactgaggcttcctcagatacctgctctttcacataacaagctctcccagaaggaccagttcagacagcaacttcttttctaaacacatctctctggaaagccccatgcagagagtgctagcttcctacccgatatccatcctcaccttctctcttagagagccccagtgttatcctggttagcacgtatccagtgaaaagatgagttctcttgcagaagataaaagcagaagttgttgggtgggacttctaggaaagccttgtttgccatttcatccttcctaattccttttgtttgaaatgtggatgtgatggctggagctgcaacagacacattgaggctatgaagaaaagattaaaagaatcacaggccagatgcagtggcttatgcctgtaatcccaacactttgggaggctgaggcgggtggatcatgagttcaagagatcgagaccatcctggccaacatagtgaaaccccatctctactaaaaatacaaaaattagctgggtgtggtggcgtgcccctgtagtcccagctacctgggaggctaaggcaggagaatcacttgaactcgggaggcggaggttgtagtgagccgaggtcgtgccactgcactccagcctggcgacagagtgagattctgtctcaaaatataaaaataaaaaaattacaaatacctgtccctgattttctcaagccaccaaaccaatgccagtaattactcatgtctgcatttctcatgacatgacaaaaataacaccttcatgcatttatgccactatagtcagttctctgttgctagcaactgaaagcaattcctaactgatatactgtgttagagagagagtagttcagtgattattcacaggcttgagtaacagggagctgagctcttatgaagccagttcttaggagttcttcctttgctgacaagccctagagccaatcttctctgagttaagagattctttttggtgttcccaaatataacttcttcagtgaaagtgaaacacgaaagccaccaggctccctccctagaagcagttttgggaaagcaagtcatcatctgtctttgacatgtggtcacctgccaaagtgttgctgataccaaagcccacgagctacatgtccaagttatccaacatctggcagctgagctgctacttgcttttttaagcacaaaaccaagcattcaaatgttcccaatttagcctcataagcattatgctgggctcctctaccttggcccacagctgccagcaattcaaagctctctcttatacagatatgttcagtttttcttccctgcatgcattcccttcatccccaactgtgatgaagtcacactggaggaatttttctagaggcagccactcttgtgtcttaccaaggttaggtgtccaaaaggtttctctggggctgaggtggaggtgggagtgtcctcaaaaggtggccctcttgaaaagccagttcctctctgtagccaggccctcattgcaagcagccagtttaacttgtgccatggagggggtggtatggtgttggtggggaaagctaaccccgccttttttctccttcacatctgggcagtttgagaagctggttggtgggaggctgaactctggagtcaataaactccattctcaagggctaagcatcccattttgtgagccccttcatctcttgctgatgctgttcaggacctgagtgctcctaggccgcctgatccctccctgtgtttttttctcctgtcatgctgcagtttagtgctgccttctgtagggagcctgtgcagtcagggaatatcggcactaaggggcttcaagcttgtctcatctcactttttttttgagacagaggctggagagcagtggcgtgatctcggctcactgcaacctacacctcccaagtttaaatgattctcctgcctcagtctcctgagtaactgggactacaggtgcccgccatcacgcccagctaatttttgtatttttagtagagacagggtttcactctgttggccaggctactctcaaagtcctgacctcaagtaatctgcctgcctcagccttccaaagtgctggaattacaggtgtgagccaccacgccctggcctgtcttaccttctagttcaaagtatgggcaaactgacgtcgatggcagtttggagacctggctcaggtcatatcgctagctagtggcccagcttttagtcctgatcctaaaccagcatgcctgtcacaataatagattagtaatagattaaagctgattttttttttttccagacagagtctttctctgtcacccaggctggagtgcagtggcgtgttctcagctcactgcaggctccacctcccgggttcacgccattctcctgcctcagcctctagagtagctgggactacaggcacccgccaccacgcctggctaattttttatatttttagtagagacagggtttcaccgtattagccaggatggtctctatctcctgacctcatgacccgcccgcctcagcctcccaaagtgctgggattacaggtgtgagccacgtgcctggcggagctgattctaaaatagcatttactatgtgcaggacaccattctaatgtatacctaaaatcttcccatgttatgcacgaagaacgtaaggcaaagaaaggttgaataacttgcccaaagtctcagatagtaagtggcagagttgggatttgatcccaggcagtccggctctattcttgaccactccaatataccaatacactaacgtagcccattctttgacttgtttacatcaggtccagatgagagatctctaataaaactccttggtcagaggaatattggcttaatatcttacccctggaggagcatttcccaaaatatgatagcaacaggtgttgaacaaactaaccaaaacaaaaataaatgctatgaccaaataaatttgcagttacattaaaccaagttaaacaggttttatattacggaacttctcagagcctttaatatgctaatagacattataaattctctaaagagtctaaaacatttccccaacttctgggaccatagaagcctttttgatgcaatgatgtcatgacatatcatgtgccctgtggaaaactcaattgagtaaaaaaggcaaattgtgtattattacaaaaagagttttgacctcaagaatgtcctaagatggattcgagagccaggcatagtggcgcacacttgtaatcccaacactttgggaggctgaggcagaaggatcccttgagcccaggagttcaagaccagcctggccaacataggaagacccccccccgccccccgccatctctatattttttaaaaggctttttaaaaaaatgaaaaaacaaataagattaattcaagcacccccagggttccctggtccacactttaacaacagctgtctagaaaatactatttaaaatataagacttgaagctcatcttcaaggaaggctaaataccatatcatactgccccatgcataggatgaaggagaaaagcgaatgaaagaatgtggatgtgtgtttttaaaacagtcccctttcatttcacactctatgtccatataaataaaaaataaaaataataaaaatcagtcccctgtcctactagttctttcttttttccttttttattctctttcctcctttttttttttcatttaaaaaatctcttgttgctccataaagatttaaggtagtttaatcttccagtgagtcaatgttcctgttgacagagacatatttaagtaaagggtcattattttagggggactcctaacccttcactctatcctaaaaattccctattatcatcctacaggtcaacctaaattttctgtccttagcattttgtttattggggtaaggccatgtctttctagaaagaggccttgggttaagatatagtttcattatacggctaggtgtgaacacacatggctactgccacatgggaatgtgtctctcagattagggcactcatccaggaagagacccctaaggacagggacccaggatgggaaagtactgcagtgggcacttgcatgcagccctagaaagtgaggtgccctgctaagaagtcactctttcctttttagggaaatgtccaaagatacgtcttatttctttaacaggtttgcttctttttttttcttttgagacagagtcttgctctgtcacccaggctggagtgcagtggcgcgatttctgatcactgcaacctccacctcctaggttcaagcgattctcctgccttagcctcccaagtagctgggactataggcgtgcgccaccacgcctggctaatttttttgtattaaagtagaaatggggtttcaccatgttgggcagtctggtcttaaactcctgacctcaagcaatccaccagcctttgcctcccaaagtgctgggattaaggcatgaggcactacacctgacctctttaacagttttatctacggcctgcccttatctgaggtcattttgtgtttatattagactgcaggtctttgaacctgatttcaaacctcatgtcaaagctaatgcagcatctgcagtactgcacccaaatatgacaacccagaccaggtggggaaaatgaagtctagttcaggctggtggcccaaggtcccccttgttacactggccagcaacaaggtaacactggccttggctcgcaaggcacataaaccacacaagatgctgcagtcaacaccgctgaggtgagagagagaattacagactggaggggatgctaagggttctcttccctgagaagcccaccgtctcccatgcttctttgttctgtcttcacagggttgggggatccagctatctgtaattgtgaagtgaagaggatgtgactgccaggtaatgctaaccccgaatccttggtgcctgtgttatgcaccatatgctgaatttcggttccagctgtgtgctaggtgagtctttgggtgtttggctgaatgatcttttaaggctggtgtgccccttttcaagggtaacccatccagctaagtgttttctaaacaacaaaacagtctgggcacagtggctcacatctgcaatcccagcattttgggaagccaaggcaggtggatcacctgaggtcaggagtttgagaccagcctggccaacatggtaaaaccccatctctactaaaaatacgaaaattagccgggtgtggtggcaggtgcctgtagtctcagctactcaggaggctgaggcaggagaattacttaaacttaggaggtggaggttgcagtgagccaagatcacgccactgcactccagcctgggcgacagaaaaagactctgtctcaaaaacaaaaacaaaaaacaaaacaagcttattagtcgtttttgtacatgtgttagtaacgcatactaattatagaaaatttagaaaatacagataagaaaatggaaaagtcgtcataatcctatcacccagagataaccacaggtgactttggatgtaagtcgctcctgcccgtgcttcccacctctaactctcattacatatgctgctgatgggattcacgtgtgatccaagcattgcactgccctacctctcagacactgatcggcagccatgactgacttaggggaaggggccagtttttctgttgggcttcttgggcctggagggtaaagggagaggctaaaagggagcctggccctctctctgtctcaaggctgggtctgatctggcaaagaggaactggctccacagctctgggcagaatccactgctgctcccacacagagaagaccaggggaaccgcagtcccactctggtaagtgaagggagggaagctgtttatcttcaatagtgcactggggctgctattttctctcctggcacccccatcccggggcaaggtcctcggcaggagtggacagagataatctcctcttggccatgcgtccacgtccttagctcttcacaccccctccagcactggccactgaggctgctttgctattccttttagatttcccaattccaagtctatacttagtcttttctgcactagaacacgcacggcagttaaatatgaaatctaagatgtcatcaaccagcagcctaggattccacataaaatgcatgcagaaatgtactgaggcctggctggctgtgatgagtcaccttagggcccccagccacttgccaccactcttaattcttcacattaagcagggagagcagctggggaagctgggctctttggaggcaaacactggccaactaggggatgctcctctgctgtttccacttctccctaggcagcccctgctggctttctgtttattttgcaattagcacttgaaggagactctggggatatttttgcttgtgggctgagagctgatatttcagaaattcttcccctccttagagcactaggttctggaaggagggtttggaaacaacagctctcagcgttctttccaataatactcttgataatgatccttggcaatttcattatccacagacacaatccttccaatactcagcctcctggttcctctccttgctcttctccaccaatcttgtcctttatggcattgcggccactcacccctatggccgttcccttgactgtgtcattactcccagttgtgctatctgtactatcttgacttcaaacatcccactctcctaacacagttcccatcccactcagtcttccctctccagtgattcttcagctttactgggacccacaactgactgatctgccatcttttcactgttcctcgctgctacctgcaagtcctccctgccctctgtacccacttagatgctgcgatctggggccttcatccctcccatcaatacacagtcaactcccttgaccccctctcctttgttgtacctgcctggtaagaccacagtcctggctgaatcctactgtctgcccactgtgtgtacctgcccagctgactggtctcactctaagttcagcctcactagctgcaggtgggtcctggtgtttggctggcccttctatttcatttccctgcaccacttattctcatactctccaagacagtgatttcatattttctccccgctcaaattcacaacatgtcctcccctatcctcaccctcacctgatgaccttgcttccaaattcactgagatagtaaaataagtggctgccaagttcccatcttcccaccctcgcctgtactcccacctccatctgtgcctacccgctctgccttcccgccttggacaaggaatgaatttcccaagcgcctgtcagcaatactcagtgtgggcctgaatcttgactgcatcagtatcacctgggggatggtcagaaaatgcagcttgtccacccccagtccagacctgctgaatcaaaatgtctggggcggggccaggtgcagtggctcatgcctgtaatcccagcactttgggaggccaaggcaggtgaatcatttgaggccaggagttagagatgaacatgtgaaaccccatctctactacaaatgcaaagattagccaggcgtggtggtatgcacctgtaatcccatctgcttgagaggctgaggcatgagaatcgcttgaatctgtgaggcagaagttgcagtgagccaagattgtgccactgcattccagcctgggcaacagagcaagactctgtcaaaaaaaaaaaaaaaaaaagaatgtctgagttggggccccagaacttgtttcaatgggctctccaaggcattcttatgcatgacactgagctaggtccctttctctgtcacctactcaaggacatccctccagcagttgtctcttctctacaggatcatttccaatatcatacaaacaaaccagaaacaaaacacctctctagatcccaaacctgccttagctaccaccctatttctctacttcccttttttctcttgaactcccttcaatcagtctttggtttccaccctcctctaaaagtgctcttgccaaggtcattgtgagagaaactggctagatggtcaccaaaccacttcctcttccagggcacacaaccaaatgatgtttcccagttactttgcctctaaatgaggctgtgtgactagttcttgtcatgggaactccagtgggtcaacgtgccagcttcaggctgaagcaccagagctcaggtgtgcttctatatggaccactccttccctttccaagggaaccatggcaggtgtgcactgaagatggaaagaacctggtacccaaatcacaaagaaggccacctgccaaatacttgactggactgtgagatgagtgagatagaagctttttattgtactaagttattgattcaggggttattcattggagaaataagattgccctaataaagtcacgagggacctccaaatttctaaatccaatagtcaattcttagttattgtcacttgtgaccaaatagcagcatttggcaaagttgatcaatggttactttttgagaaattttctttatatattctctaggttgtttttttaagaaaaaattatttaactcactttagtatcctttgctaagtcctctttgtgtaagattgccccaggacttagtccttggatctcttctctctcagtactcactcctttgttaatatcaatctcattcttggctttgaatatcttctctacagtgatgatttccaagcttacatctctagcctgaacctaagacttgcttgatccacaggctactagacatctccccttggtgtctaatagctacctcaaacttaacgtatcccaaaccatacccaaaaccatatcctgatgcctttcaccctacttcacccataaccttcctcttcccagtaaatgttaactctctccttccaattgcttcagcaaaagaaactgtggactaatccttgagtctcgctcatttctcatatcctgttattagattctgcaggtcttaccctaacaacatccagactctcagctcattcttacgctgctgtcgtggtctgagccaccgccaccgtctcctccttgggttgttctgctctcctcctcacggtctcgctgttcacattcttttctgccttctttatagtcttaattgagcaccctgcatgagcttcatacacaaaaatcaaattgtctcacttttctgtttcaaccctccccctccgccagtattttctcagatcacttggaattaaaagtgctgaaggtggctcacaggctccctgttgcccctctgccttcatctctctggactctccttggctcaatccattcctgtaacaccctcttctttgctgtttgaatcccgctcttgcctggaatatgctggcccagaaaatcatcacttgctccctcactgccttcaaagctttggtcaaatttaccttaacagaggggccttccctgatgtcagctcgtgctctacactccctgtgcctcttagcacttatcactacctagacagttactttattgtttgtctactggcaccagaatgtaaggtaggcagggactttgtcttgtttattctgtgtctccagaacacagaacagtgttgggtacacagtaggtgctcaataaacatttgtagaatgaatgaaagaacaaacagctgaaagggccagctacagcctccttggcttaggtgaagaagcaagtttttcccgttgcattttgcacgtgtgcttcattctagtggatccagagtccgtccttcctctccttgtgaattttgtctcaaggatcttgtttgcctcttgtgtgacctcttttggactgtcctgggcgattcacccatcttctcaaagaattggcctcgcagatacctggtgacatcgtacgtgactctctaccacaggttcttgttcatgaggctccagaactccgttttacaccatggggagggctgatcctccacctgctgaggtctgaccagggtcaccaagggcagcaccgggttctccttttgcaaaagtgcagaaaagcaatcatgaaaccatcagaggagaggatggaggtgtggaggcctgcccagtcataggattctggaggagggatgagtgcgctgggcaggctgctgaggaggtgctgcttcctggtgccccctcctttccagcactgtctctgggaaaggttgttggaaccagaaaacacacagccttggttgatgaaaagcctgtttattcctagtacactggacactttgttcaggaatagttcatccatttgaaaatattgcccttgtaatggtgccaaggtcattgcctgctggggttatcagcactgtgtgtgccagctctgactgggtgttttaataggtggatcatttccctgccagagggactaaagaacgttgaatggttaatttgtattcagtgctatccctgcatacagtcttcatattaagtttttgttgggactttaagaaaaaaaaagagaaatgaataaataggttaggatgcaatgaactgctttaaaaaggaattttaagtggtactgactcattttagagttctccatacccatctgataataatagtatacctacctttgcaaagtactggggagtttgccaacaacaacaacaacaacaacaaacccttgtattcattgtctcctttgatgctcaaatcaatcctgtaaggtagggtggtgtggtcccctattttaggtgagaaaactgaggctcagggaaattaaatggcttttgtcaaacaaggtcaaagaattaacacagtggaaccagcattgtgacccacgtctcttcatgcccaggtttgaccgtgtccagcccatcatggtgagctgggcaggtgtagaggggaaggatctagctgggtttggacagagatgcttgaagtgtcgaggtgaatgtgagtgaagaataattttgttactagctatagccctctgtcagccaacacatggtaataaatacagttgctcaccttgaaaatggtgtgaagcccctacctgccgagtggatgatgagtatccactcaagtgtggccaggcctggggaggcaaacatcccaggcagcagcctgtggcactgtgggaaaatctctactctggtttttaagagatcagagttctagtgccagctccacagtacataggtccattgtgtgactttgagcaaacaaggtctataatctgtaaaaacagatttgatcacatctgttcatccccctggtatacacagccaagttttattgcaatgtaccagtggctggaataaagaaataaaaagctcgcccatcaagtttgtgaatgccatgaagctagagtgtagctaataatgacaaatgacagataagttttcttgaagaccttgagacttgtaggaacatttagatgaaacgtctaaggtaaatgcacagaattgtatttaggtttaacaaaaattgcaccagtgacagcatttgttcttgatgcacatcttgtttacttgttgaaaggatttgttgaaagggaatacacaggtttgggctcgagaagatttaagagttttaattgactcaaatctcaatatgaatggggattgacaaagaagttagcacaaccatgggcactcccaacacaagtgtagaatctaggacaaggaaccacattgggcttgcatgcacggccaggagagcattgggttctgtaagcatgtgcttaataaggttattgacaaactggaactagcgtaaatggttgggaaatcatggtctatgtcaggggttttaaggcctgtaaggagaacacttagtgggctgacatgatggtggtttgcacagaaataaatggcaaggaggatgaggaagtgcataatccatgtgggtatctgcagggccaaagctaatccagcaaatgaaactaaagggaggcagagtttacctgtaaaaatggaagcaggaggccttgccaggtggtgagcttcttgtcagatgtgcaggcagtggcagcctgacctccttgtggggactggcgcggaggttccagcaccatgtgggattggagctaaggaagggctcttgactgacagcagcaatctaggaaatgggacaatgagtgagatgaaaactggaaacgctctgtaaatgtgaggttgtactgttaggcgctgaggaggaaggccctgagcattcccctcaactcagactttccaccattcccaggtagggcgagaagtctctgtctatagtcactccttactatctacagccagtctctaagctctgcccatccctctgcatatgcctgcacacagtcacacagtttgctaagaagtgtttgttcgtttgttttagacaaggtctcactctgttgcccaggctggagtgttcctaagcagctgggactataggcatgtgccaccacgccaagctaattttttaatttttttgtagagatggagtttcgccatgttgtccaggctggtctgggactcctgggctcaagcagtcctcccacctaagcctcccaaagtgttggaattacaggcgtgagccaccgcgcccagcctgctgagacttttgaatgtgttctgtttccactacacaattgagaacactgaagtaccagtgacttccagggtggggaagaaatccagaggctgctcctgaaaggggtcacccttgagtgtgagtctgttccaagtaaatcaagtgagctggaagatcggtgagcttggatttattttgtatctttttttttttctttttaaaggggagctgtagaattaagggttgaggtttttcttattctctttagaggttttttggctacctaatacatcagctgaactaatctgcagaaaataaatttatctttaaagtagagctatttagatgcctgagtaacaaactctatctcaatagaagctattggcaaaatgaagctcacctcttaggctgacagcactgtggaaatgatgctcaaagtttcaggggtgaaaccagattggcttctggccaagggtaccttactaatgggcgtatttgcatttggggaggaaaagacctgtgacaacacagccacgtggttgttcctcataacccacagttgggtttcatctggactccctccccacccctaacgtctgccgatgtatctgtgtctaaagccatagtttactcttttttatcctcatccttcaaccagccctacatcttacgtgcctgctgtccagacttctcttaaatctatctgttcctttccaccccaactatcaactcaactgaatagccactaaatgaggcactgtgctaagctctgaattgcaaagatcattagggcatttggtcttattacttcagtcctgggttatgcacctgtgctaggaggtgcagctgattttcctgattatgcttccagacgtgccactccttctcatacacacaactcttgctcagacactgtcctgtacttcctgtaaggtacagtcaaaacctgcgtttttcagaggcctctgcagcctgcacccattgtgattgtgcagtcttagctccttttggccttgtggaaggagagtggattctagaaagatccctgcccagccacttcctgcccactgtgaccttgagcaaaatctctggctccaagtgttgcatgggtggtggtgaaggggtagcaaggaaacttgagtgggtttgtcagaactaggagcagtaagaaaacttgaaagagcctcctgtcttaagaaggcacttgactgcctctgatcaattcagggaggcttcaacagctcttaagaggattaggccaaaggacttcagtgaaacttttgtgcttttgttccctagagtggaaacccttgacacgtgttacacacaaacaacacttggggtggaacaagaggtttacaatgatctgtctgggacccataatacaattcagcatctctttagagcttcagtctatcaaacattttcagactatttcatttaaccttaacagttattgaaatgcttgggggggaaaaaaacctccacatttgagatttccatagcagaagcatcaccagcagcctcaacagccattcaaaaagatatcgtctgcaggcttgttacctcttatcgtccctccattgtattatagaactcttattcttagagagattgcctggaaagaggtaaagtatgcatagacatggtcagccccatttgcagctgaggaaatgagactcagagtggcaaagtgactttttcagaatcatagcagtaaatggtagcattaggaagctaagcctgatcatcctgttcttgtcctgttgaggagatagtgagagcaaaggaaagtggcaacaatgaaggaataaaacccagctcgtccccctgttcctcatgcccaacccttgccaagacttcaggtaacagaaggaagagaacacatggatgggcacatgctgggcccggaagagctgtgcatgtcccacagaccacgagtgtggagcccatggccgtgtgaagggggtggggtcccagtcctagaagcaggatcatggaagtggccttggaggacctgacgaggaagcctatgatcttccaggtacttttaggtgatgtggatttagacactggatgtggctgtgaagcgggcttttgcttttttggttgtccggcatccatttaatcacgccccagcttcctgcttgggaacttccactaacgctgtcagtccatggacttctagaggagctgaatctaccgctggctcaggaacaggaacctgacctgggcctaagctaatgaatccatcaaatttaccttggcaaagtgattgcctcaggaatgggcagtgacccaactagagccaataggacttttcccaggtatcctgaaacagacagtctttttctcatggatgtggacctgagacagtatagttctgggagttgctgacaaccatcttatggtcatgagctgatttgagattggcttcaacaagcaggaagtggaacagatggagataaattggatcctggtaaaatttgtttggaatcttgtatatgttgatttttctcctgaatttttttcagttatatgaaccaatacattttgtttgtttaacccaatatgggtcatgtcttctctcaactgcaggtgactgcagtttacttgtttcataaagtaggattttaaacataaacagtatgcagaataaaagtttgtcatacagatttcttatcatggaacttcttttttatagaattgtggaaagcttacaaagggcttctgcttctgactacgatggagtgactggtatcagatggccctcttgtcaggaacaaccataaaagctatacttcacccagctttttgatagcatggagaaatgtcaaggcagctgggattggaaggagtagataggatccctgacagaatgaagtacagttccaatagaaaagaaagcccagattttgtggaaagtgacaagctaatttcaaaatttatatggaaaggtaaaagtccaagaatagcaaagattctcaggaaaaagaaaaaacattttcttaacatgactaaatatgaaaacttattatctggttacagtaactaaaacagaatgatatgacctcaagtatagataaatagattattggaacaaaataaaaaatccagacccagaaatatacagtcttttattttcagcaaaggtgccactgcaatgcagtgaagaaaagatgagcttttcaataaacaatgtgctgagtcaattggatatatacttgagaaaaaatgaacttgacccctacctcacactatacacaaaaatcactttcagattgattacagacctaaatgtgaaagataaacagtaaagcttctaaaagatagcattaaagaatatcttcatggccttgttcattctggtatttcctcaagagtttggtacgtggtcagtgtttgataattgtccattacatgaattatggagtaggggaaataaagtgagagcaatggatgggaggctggtgtgagagcagcaaaggtagcagtcataggatcagggagaaaggacacacttcatcattctggggtaatttttagcaaaagatacataatccctccatcaaggaaggtggaagccatggcaggttggaggagcaggccaggaaggctctaagccagccaagcccacagaaagtcaaacatttgtactctcctgaggactccaggcttttagcttgtggcacttcattcaaaatttctgtccttgtatttcgtagttgttttaagaatcggaataactatatattattagttaataacttacatatttcacttgttaaattttggcgttgctgcttacaaagtgccacagctggccaggtcttgtggctgatgcctataatctcaacactttgggaggccgaggtaggaggattgcttgatcccaagagtttgagacgagcctgggcaacatcgtgagaccctgtctcttaaaaaaaaaaaaaaagtttaaaaaaaattagccaggtgtggtggtgcatgcctgtagtcccagctactcgggaggctaaggtgggaggatcccttgagcttgggaggtcgaggctgtagtgggctgtggttacaccattgcactccagcctgggtgacagggtgagaccctgtctcaaaaataaaataaaaaataaaacatgtctgcaaattctttgatgcttctgccattgagaggtaggtttatgtatccttccgcttcaatctgggccttagttatttgttgacccactttagtgactggttagccatggaataaggcaaaaattatcctaaatgtctacaatgttaggttataaaaagcaacaccgctgtaactggttctcttgggatacttgcctttgcagccccaagctgtcatgtaagaagtccaaggttgccaagctttgagcaagtctcagccacatcgaaggccagatgagggttttctggataatgggcccagttgaaatcccagccaacagatgccatcaattaccagacacatgagtaaggctgcctccagatgactcctgtccctcatgactgagttgctcccagcctccaagtcttgccaatcaagactctagacattacaaagccatggcaagctgtccccactttgcctttgccaaatttccaacccacagaatctgtgaacataatacaatgattatcttttactgctaagttctgtaatagtttgttacacagcagcagatatttggactatcagtcatgatgtactttcatcagaacacacagtttgcagtaactgctgttatgaaaaaacagttgcttgtgtcttatgtttcaaatatacatctatatagtatctaacagtttctatttactctaacagtcaatgatgtcaatttcagtggcgtctacaaattaaaagccccaaatacaatgtccttccacccaaaacagacgtgtgaacacgttgatattgtgtggtttctataacacgctcatgagactgagggaggagtaaatacatagcacttttatactcaattctcgagtaagtgtcctgcattttgacttgggctcagaaggtgtttctcacggtctggtaggaagcctggtgagggaggctgacactctagttcacctgaaggcagaacagaaatgacgatggggagctggtgttggaggcagggaggagaacgtcctggtaatctggttggaagtggccagtctttctgtttagataaaagaaaaaactcaaactagacttcaacgtaaaaatgcctcatgggctatacataagactccatgtaaaactatgtgttactgaaagcctaaaaacaaaggattgacaaaatcatacgaagcaaaggcaaataaaaaatagggattggcacctctaaaatcaaacaagtttgaatttagagaagtattattaaattatcagaagaagtattaagcaagacaaagcatgatgttttgtaatgataaaagtgtaaaccacaatgaaaccctagctatatatctagttacaaatagatatatagtaaattataatagtgataaattcataagacataaactacagaaattcaaagagaaatagaaaaatactaatcgtagaagattttaattcttttacctgagactttgacaggtacaaaaaaataagaatattgaagactaaaataatgtaatttaaaagatagactttatgaacatatattcaaatgctatatcagaatatatcttctttaaagtactcatgcaataatcacaaaatgttactcttacattagattgaaataatgcttcactaatttgcaaaatggagaaatagtgcaggtaaaactctcagacagcatttccacaaaatggaaattagtttttaaataattttaaatctaaaaaccttatcatttagagcatttaaactcttcattaactttctgatcaaataggaaatttaaaagtataggaaatctacaaagtaacagcaacacatatataatcagaatctatgggatattgctaaatcgataaacaagaaagaaaataaatgaagtatccagttctagaagtttaaaagaacaataacactaaggcaaacagatggaaagaatactaactaaaaaaaaatcaatccaataactgattctttaggggaaaaataaaaaactatgtagatgttaattaatctaatcaagaaaatagggagaaagcacaaatatataaaattttaataaatgaagtgaagaaatcataaaaggctactttgtttaactatatgtaaataaatggctaaatggatgtttttcgaggaaacataaatttccaaaattggtcagaacagaaagctaaacagacaaattaacatggagaaattagaaaatgttattaataatattaataactaaatagcaataggctcgtatagtttattaagcaaattctataaaacttttaaggaactggtaatttcaatgctatttaagatgtttcagaacaaaggaggagaatcaaaggtgcaaattcttcttatgaaggcagtataacattgatatgaaaacccaacaaaatggcaacaaaaataaataaaattatagcccaatctcacctaatgaatattgctgtaaaaatctagaataaaagaaacagacccattaaagtcagaaaatagatgaaaatatgtattattatttaacaatgaactggaaatgctagtcaacataattaaacaagagaaaaatagaggtttgaaaacttgaacgtaggaagtaaaattaccattttgtgtagataatatttactttagaattcaagacaatcaactaaaaatatgttataaataataagaatatttaagaagcatgttacagagttaacattaggaaatcaatagtctaattatgtagaaacaatagccagttaaaatgtgacagaagaaaaaactcatgtataataggaacaaaaaaataagttgtccagaacaaattgttttgtgtgtttgttttgagacagagtcttcgttatgttgcccagactggattcaaactcttggcttcaagtgctcctctcacttcagccttaagagtagctgagactacaggcaggtgctactactgcccacagccagaataaatttaaaaggaaattgtgcaaggactatgtagagaaaacttgaaaatgcaaatgaagattttaaaaaatagaaagacatgatgttcttgggtaggaatattcaacactgtaaatatgtcaattctccctaaagtaatatataaatgtaaaacaatgacaataaaaatactatcagaatattcttttggaattaaataagctgattgtatagtctattataaaaataaataattactaaccagaaacaaatctgaaaaaggatacaaggaggtgtattagttttctattactgcataacaaattatcataaatttagtgtattaacacaatacctatgtattagctctcagttctgtgggtaagaagtcccagcacagcaagaacgggttctcaactcaaggtctaatgaggctgaaatccaggtgtcagccaggctgcattctgatctggaggagggactgtgggagaatcagcctccaatttcattgagtgtgttggacaaatttaattccttgtggttctaggattgaggacccagtttcctcgctgactgtcagccagggcctctcagctccccagaggcctccctcattcctggccacacagccccctccatttttaaagccagccaggaagaatctccctcatattgatttccttcttgttttgaatctagtctccaggaaaagcccattctattttaaggtctcacctgggtcaggtctactcagcataatcgctcttttttaaagtcagctgtgctaaataacataacttaatcatggagtaacgatcccatcattcacaaattccaggggttataaaagatgtttatacctgggagcaggaatcttggggatcaacttagaattctgcctaccacagggggtaatagccttactattactattactattgctattactaatataaaaacatactagaaggtaacagttaaacagtatgacactccaaggtgggcggatcgcttgagcccaggagttcgagaccagtctgggcgacatagagaaacccccatctctactaaaaataaaaaaaattaaaaattagctgggcatggtggtgcatgcccatagtctcagctacttgtgaggctgaggcaggaggatcacttgatcccagggaagttgaggctacaatgagctctgatcgtgccactgcactccaacctgggtgacagagtaagaccctgtctcaaaaaaacaaaacaaaaccagtatgacactgatgaacaaataggtcaatatttattgatcaataaataatagattcagggctgggcacagtggctcacatctataggagttcgagaccagcctggccaacatgttgaatccctatctctactaaaaacagaacaaaaaaattagctgcgcatggtggcaggtgcctgtagtcccagacacttgggaggctgaggcaggagaatcgcttgaacccaggaggcggaggttgcagtgagccaagatcacaccactacactcctgcctgggcaacagagtgagaccttgtctcaaaataataataataataataatagtttctatagataagtaggtctaaattgaagtcaaggaataaatccaaaagcatatagagatatagaacatgagaaagacgattttcaaatttttggtgaaaaagatcaattatttcgtaaatgacagccatctggaaaaagtagagtaagatcttatattaattatataaaaatcacataactgctataacaaaccccaggttctcaatggtttcacataattaaagttcatccttatgtatgtcatgtacggttggctgttaccaggttgtgtagtctctcttatggtcattcagggagccaagctctattcatctggacactctctagagctgtgctgtccattgttttggttactagccccagtccaaagtgagatgtgctgtgagtataaaatacacatcagattttgaagatataatatgaagaaaagaatgtaaaatatcccattgatacattttgtactgattacttgttgaaatggtaatatttttgatatattgggcttaataaaatatattttgacaattccactttttgtttttttggttttttttgaaatggagtctagctctgtcacccaggctggagcgcagtggtgcgatcttggctcactacaacacccgcctcccaggttcaagcaattctcccacctcagcttcccaagtagatgggattacaggcacctgccaccatgctcggctaatttttgtatttttgtaaagaaggggtttcaccatgttggccaggctggtgttgaactcctgacctcaggtgatctgcctgcctcagcctcccaaagtgctgggatgacaggcgtaagccaccacacctggcctaatttttcttaatatggctactagaaaatgtaaaattccatttatgtcttgcacgtatggctcacacttatttctattgaacaccactgctctggaatcttctccagagccttccccatggtgacttgagatggcagatagggaaaatgagagggtcccatgactgtccctcacattccactggccagaactcagtcacatggtcatacgcaactgcacgggaaggggagaaaatgttgtccagctgtgtgccaagaggaaggggagatggatttgatgaacaactaggcacctcttccacagatccctcactcacaccttgcaccaaaacaaacagtaaaggaatgagattaaaatgtggtaaagaggaaggaaggaaaaaagagaggaagggagggagccagaagaaatgggaaaatttttaattttaaaaataatttttagaaatatttttagaattaaaaaaaaatctcagaatataaaaggtccaagtatgactcagaatgtagagctataaaagaaaaaagaaaagatcaatttaaacaatcttgaaattaaaaaaaattctacctgacaaaagaaaacaccacaaacaaagtaaaaacaagtcaaattctaactgggaaaaatctgacacattgatatctcaaccaaagtataaatttcctaaagtataaagacctcttacaaatcaattttaaaagagcaataaaaccctatagagtagtgagcagaacgtgtaaagagataattcactgaaaaggaataaaaacagtttctaaaagtatgaaagaatgattcttgacttcacctataactagaaaaacacaaagctatatgtttaacctgtcaaactggcaaagattaaaagatgggtaacacgttgtgttggtgatggtgtgaagtcaggttggtggggtataaattgctctaacctctgtgaaaagcaatttgacagttaaattcagcatatccttgctctttgatccagtaaacccacttctagcagtttatcttgcagatgtacatgatgaaaagacaatgtacagtaatacagtagtcatggtgaagatttgacatacttaaatgtttgtcaatgtggaaacagttaaatgcaatggaataccgtggagccatataaagaacgaggcctaatatatatgtgtggtatgtatggtcatgactagtattccatactctactcttagtcacaaaagcaacataaaaatagtgcatagtgcggaagggtagacagagattgacttctgagagaggaaggagaatatttagaaggtaatcaggggccggaggaaagagatgagagggcaactttccagccgggcatggtggctcacacctgtaatcccagcactttgggaggctgaggtgagcggatcacctgaggttaggagttcgagaccagcctggccaacacggtgagaccctgtctctaataaaagtacaaaaattagctggccatggtggcacgtgcctgtagtccaagctactcggggggctgaggcagaagaatcacttgaacccaggaggtggaggttgcagtgagccaagattgtgccactgcactccagactgagcgacagagcgagactctgtctcaaaaaaaaaaaaaaaaaaaaaaaacaactttccttttatagtatatccacttcaaaaactttttgctgttcaaattttctacaatgtgcatgtattggccatttttaaaagtagataatatatatttaaattttggaagcaatgcccttctttgtgttatttgtgtcctctgagatgcaagtaatttattggggaacacacctgtaatggaaaatggggatggagccagaggcgatggggaggacgctcagagtgtgatgaaggtctgaccctggagaagacaggagagagggaaggaaatttggacaaggtcagtgaacgtccttgagccaaaattgcccatcagaagtcccacctctcccaggagaaggcgtgccttcctattcctgctacactgagaggttggctgagggcagcccctgggaagcgcagcctcagatgtgttgatggattcagagcacagcagctggggccctcgatcagctgcactccctgcagcagatctcatggctgtggcccctccaaaatctgtgctgatcacctcttcactgaagtttgcaaatattgctcttatgtgatgacttccttgattttatagttacagtgacttggattcttctgattctaggaagtaacttttttctttaatcatttattcatccattcatttaaccagtctttattaaatacttaccacatgttatgtactgagctaagtgctggggacacaaaagtgaataaaacagacctgggtcccagattcatggacttgaggatctgctgagcaggcagaaatgaatcaaacgatcagccagcatataacttccaactctagtgaatgctgcagagaaaaagtgtagaaagtcatgatgcatctgacaccagttggagtttggggaaggctccacaaaagatgtgaaatattagaaataaatgcttattgagaaaacagtgtgcagaagagtgtaaagtacaaaaccaggccaggtggtggctcacgcctgtaatcccagcactttgggaggctgaggcaggagaattgcttgagctcaggagttcaagaccagcctgggcaacataacaagatcctgtttccacaaaagatcaaaaaatgagccaggtgtggtggcacgtgcctcccatagtcccagctactcaggaggctttggtgggaggatctcttgaaccagaaggtcaagggtgcagtgagctgagattgtgcctcagcactccagccagggtgacagagtgagaccatgtatcaaaaaaacaaaaactaaaaaaagaacaaaactaaaatcactcataattctagaaccagaaataacatcacctggcagctttctttgtcttttacaaaaaatgcagttgtctaatacagcattgttcaatagaacggaatgtgagccacatatgtaattaaaaatttttaagactcttgagacattttataaaatttttggagaagtgctgttctcatttgcattgctggcagtccccagagtgcatgtctcactgtgactctggcagtggtgaccaatgtaatttcctctaaatttgttaatttgatttgtcaaatttggcatttccttattttcacaaacaattccgaagtctttgcattctagagaggctgaacattctttgtccctctgctcattagctaattcatttctagttttacattactaattttcttcttttagaagtgaatgaatggtgcctcttacattgaatggagtcagatgaagcctgatacttgtatttattttcatatgctaacatggtttgatttcaaatctcaccaacaatggttaagctttgccgactgggagatgcagtgctgagtattaggggaaatacactgagagctggagggtgctcacaggaagcatacaagtcctggaggaaaacagcaggccgggcacagcagctgaaccatgaggctgtgcacactcaggtaccatgggacgtctgggtgcccacgagagcaagagtggggctgggtagctgactctggagggatcaggttcatggaagcagtgagatttgaaacagatctgggggagaaggatctccgcgagcagggtgggatgagaggagccgagggctgggctggaacgtagtggtgtctaatagcagatgtgggagacaaagcaggaaggtctgctgggcccctgttctagcagaatttaaataaccccctgaggctttattttatagattttgagaacctggccaggcgtggtggctcatgcctctaatctcagcactttgggaagctgaggtgggtgggacacttgaggtcaggagttcgagaccagcctggccaacatggtgaaaccccgtctctactaaaaatgcaaaattagctgggcttggtggtgcacacctgtaatcccagcaacttgggaggctgaagcaggagaatcccttgagcccaggaggtggaggttgcagtgagccaagattgtgccactgcactccagcctgggcgacagagtaagactatttcaaaaaaaaaaaaaagaattttgaggacttgatggtgcttttaagctgttttatttttcctttgagaagagaaaatcctaattcacagagcttttcaagggaaagggcctaaagagagaaaaggtggcgtatcctcagctcttccgctgaggtcagcctaccaaggagagatcagctttagttcctcagagacatgcccagtgattccaggtgtgtgcaggagagtggccaaacagctaaggcaataagtctgttctgaagaagacttctgtgtgtcaggggcccacctgccgtggccagggaggctctgctcgtgcttgaaccaggcttctgccaggcgccctccacccactccatgcctgccctctccacccaccccctcctctaccccctccccttcaccacctcccacaccctcttcacccctgcccctaaacccccacctaccccggggtctagtcctttggggggaacatgaacttggccttctttagagcaggctgaccaatggctacctccattcagaaatgcttgctgtaactcaggacatcctgtgttggctgtgtcccaaagtccaggtgaaaatctcccgggcctctgcacatcttaggaaggaagagggaccaagcatctaatgaggtctctgatctggagaggagaagcaccttgagccagggaaagcctcttccagcacagacaaggcagccctttctttagtgggtgtccttttcagaaccaggtgttgctaagatttaaaaggtattctgtttgctaattcaactgaaatacacacaatccgcccccagtgctgggttcaacatctttttgccaaggcggtttttacaaatgctgatgaaccactccatgtggcttcctaggcaagcacattcctcaagcattttgacaccggctaatgatttaaagtccctttggctccataaacagtggaggccggcccaaagtgttggctgattagaaacccactgggcaggctcgcccaaaagggcctggggctgggtgagcgctctacctggcttccctccttgggtgaggaggagtggggtggaaggaaggtgagaaggtggtgccccttttctggatctcttggtttccctttgactctccatctagtattctctgcatacacacacactcgcacacacacacgcgcacacacatgcacactcatatgcacacgcacactcgtctctgcctatgactgttcgatatcttgttgaataggctctgtgaagggctgggggaggggcacatgttggagagaatgcctacttttacttcactcgcaaagattcatcccaaattctgtgggggtgtgttggcaaggaggggaggcaagactaaacagaggggataaaaacttgcatccgcatgattgctttttaaaaatatgacaacttgtgaaagctttattttctgtttatagtgaaaggcatttcttcttgccatttacagagcaattctgcaagagagcttcagcaaaattccaaaacaatcgcatcgagagtcggcacaacgcaggtctcccgactttgactggttccagacgaagtttcttttgtcgtttgctagcctccagggatgcaatctctacactctctgtgggatggagggggaaggtgagtggagggaacattaaatattaggaaacccgaagaaaaagcaaaagcaactgctttctcaggctgcccttcggaggttcgtagtccgggaacgatgaagggagactgccacctatgggccaggttccagggacgcccgcacgtggcgttctgcgggacagacgcagtcttaaggtagaagggaaggcgtcttcatgggacagtgagtcaccgcacactctgcttgcaggcagaagcactcttaactcattcaggacagatgagcattttcccaatttaaaggacacttttttttttttttaaacaagagtgtgatcttgtaagccaagttttgtaatacaaacaaaataatggaactgacaccccaggacccaccatttaaattaaacagatgttcagttcagtttggctgctaggttccacagtgggatccactccagcactatacctgaaattgtgtggctgcttaacaaaaatgaatcagcataatgaatcagagataaacatcctcttgccgtgccgtcccagtagaaaagcaacaggataaataacaattgggcaaatatcaaacccattccagcagatgcctgtgggtgggggcaagggaaatgaaagtggaatcagacacaaaggggaatataaaaggaagcacagttgtaaaactagagagggacctcacatacagtcacggtaatgggataagaactgaggagtataattcaatcacctctgctcccaacgtgaaaaagaaaagttatatgctttgagcttggcaagtgggagacggctactgtgttataatggttccaatggtatcatacagttgtcctttgatatttgagatctatgtgttcgtgaatagcaaatcctattattcccattgtcttccattataaaatcagatctgccacacaacacctatacgatactggatttagagtaaccaagcagtcccgactcctgttgcagagaagggagtggtgtaggtatttgtgtgtgcatttttttgtctgagtgtgtgtacatgtgcatgtatatgaaagcatgtgtgtatgtatgagtgtttaaaaaaggagctcaggaaggattatggttctgtcactccaaaccaaaggagatttaaggtcctctgcccagcattgtagcacctagagaaaagctaaccctgtccagggaggcatctcccctgaataggcacatgtactgaataggcacactgccttccagacccatcagaaaggcagagttgggctgtagagtcttcaacagaaatcagcaagtaaaacttgggatgctagaatggtactgtactttcagcaagtggcaaaggaaacacaggaaagaatccaacagaagcaggatggggattttctgggcagactagtaggctgggtgagggagaataacccagtgttgcactctatgtataatccacattttgtttgcccattttgctcctgaaggacctgtaggagacaggagctaggccagaactgttctcttagccccaccaactaagggttagtagcatcagttcctaagtgaagaagaactggcaaccgataccagaatccatcgaatgtcctttagggttctttatacataaaaacataaatagtgccaaattctcattagtagctcagttgctctttaaaaaaacactccttttatcttttatgaagtgtaagttcaagagtctttctagatgttgtaatattcggacacctggtttaggaggcctctctctccccccttcatatatgtgaaccataaccaggaagatctgagtatctttaacgtatattagtaaattatatatactatcgtttcatgtactttacattttatgtaaattatattgtataaatatttatgttgcatctttctagtttatcattacacattttagatgtatccatgtaggtgataaggatctagttcactcattttaatggctgtgcagcattgcattgcatgaataatccacatttgatttgcccattttgctcctgaaggtcaggtagcttgtttccacttttaagctattacccagagtgctgaaagaatgtgcttttgttcatatctccttggacccacgtgtctcttgggaacttctagacatatagtggcagaatttttggtcataggttatgcattaactttaccaggtgttgccaaatcgctctctacagtgggtctgtcatttttacatgcccactagcagtggatgtaagtatccatttctccattctcatcaacttttggtattgtcagagttttttcaagaaattcccactctaataggcatgaaatagtatctatttgttttaatttgcatctccttgactactaataaaggcgagcacattttcatgcgtctatagaccattaaatgtcctcttttgccgattgcttgttaacatccttaagcttttttgatgttcggttgttgctctttttcttgcttatttgtaggaactagttgtacattttggatagtaatctttggttggaaatgtgggatataactattttctccaagtctgtgtttgtcttcttgctttgctgttagtgccatttgtcattaagaagtttaaaaaaattatctacttcaacttctcacttttccatgataatttttggttttgtattgtttaagaaaccctaccctccttggatgtcattgaaatattttcctgtagttctgtctaaatgtttactgcttttccttaacacatctgaaatttatttttgttcacacagtgaggtacgaatctaatttttctcttagaaaatattattagccaatagtcacagtgccatttattgaatagtcatcctttccctgctgatttgcagtgtcacctcttatatcctaagttcctacttatgtgtgtttctaactttttcagaaaatttgccccattgatctatttagctaaatgctgataccagaatattttatttcattttccaggtgtaattttattccactttctccaacttcagagttccaaccttagaggacagagcattatgtggagggagggtaaagacttgatatgaaaaaagtgataatgacatacccctggttcatttctgggtttcttcctaggccaattcaaagcctcaaaataaggtcaagtaacacaataggctcacacttgcattacaagctgtttagaaaatgtgcctagatctctgactcagacaagatgtcctccccaccatgggcaagggctggtgggcaagacactcccagccttcttccaatactaataaataacctgcagaatgagcagcgctggagagctggcccttgacccacccactgctaccgttgtggagccaggcctgcctcatagccctctgtcttcatgtcattgagctctagctcctcattttagtcaaaggtgtgcttataatgctccgccttcatctcaggatcatcttcagttgcatacacattctgcaagtaactgtttcctgctgaatcatccataataaagtcggtcttcatgttaccttcgatgatctggtccatcttctggctaaactcctgcagtctctccgtctggccaggattggaactgtcgcccagtgtgaaagggtttttggtcaccagttcccagatatctttcagcagcccttctagtgtggtgaacttgcacctgaggatggccattcccagtcaaattctggctctgggatttccacactacaagtctcagacttgaggaggtctctggtcatatctgagggacctgtgatgtggagggtgatcctggtgcccaagggttctactgcttctccagatttcacctcattggtctgatgcacgcagttcttgtacttggtccctccttaaagtgagggatttgtactagcttcatgttggtctgagtgggggcattgcattctgggccgtttgtgttaaactggagcacttcatttctgagatcttcctcttctggcttctctgttggtgcttctgcttggagccccagcatctcttcctgctgtcgggtctggttgtagtgtgtgatcaccagggcatcatctttctgagcagcctgtgggttttccacaaagctgttccctgagggatcatcaatgatcagagtgaaaggggaggctgattgctttagctccttcagtttgacaatgaactcatcaattctttcagctgtggcatctttgttgcccttcgcgcaggctagtcctgctcccggccagagatagcacgggtgatcaatccttcaacagtgttcagacctcctttctggctaaaggcaggaatttgaaaatctagctcaggaatccttgtggtagcagagtcagtcttcaccacttctctgttcatgtcctccagagccctgatgctcaaagtgtagcgcactccctggtcctggatcctgcctgccgattggatctccgtgttgttccagccacagtggtggcaggaaaaggagctcacgattatttctctgaagaagggaatcttggtgagcaggaggcgcgtcatgccattgcggtaacagttcatgcacagtgacttgatctgggtgggctgctgctccttgtcctcggcgctgatgggccagaacagatgacccagggcaggcagcaagtccagggcgggcgagggggcaacggctgaccccggggaccccacttccacagccccggtggccgccatcaccaccctgcatccaaatattttaattacttatttaattatttaaccactgcacttcagccttcagcctgagtgacagagcgagaccttgtctcaaaaggaaaaaaatatatatatacatatatgtaaatgtatgtgtatgtgtatatatatgtatatatgtatatacaaaaaattaaataaaatttaattttaattttattcataaaataagttcatttttgttaagtatattttatttgccccacatttactctcaatataacaagggtacaagatattaaacgacaaaagatgactctttttcaacaaatgatattgagataactggataggcatatgcaaaagaatgaagttgcaccccctcttcacttcatttataaaattaactaaaaacaagttttgctatctgttagggtgaatcctttctctttatgctgtctcaaaattgtggccaggcaccatggttcatacctggaagcccaacactttgggaggctgaggcaggaggatcacttgggcccaggagttagaggctgcagtgagctatgattgtgccactgcactccagcctgggcaacacagtgagatcccgtcgcttaaaaaaaaattgttttggctgttcttaacccctttatttttctggatggatattctgatatgcttatcgaggtcagtgaaaacaattctccacggattttgaatagaatttattaatagtataaatttaggaaagctgctactgttaagctgttgtctttccatacataaacagggtgtatctcatcatttcttcaggttttctatctttcagtgaggttttagagctttctttgtaaaagtttcatgtcatttattagatttatgaataacatagttttttaaaaactataaatgtaaatggcatgtctttttatttcatcctcattcttgaatgatagtttagctgtgtatagaattctaagttagctattttccctcaacactctaaatagaacttctctcagataactaggtatagaaggaacattccttgctgagcacagcagctcacacctgtaattccagcactttgggagaccaaagccgaaagattgcttgagcccaggagttcgagacaagcctgggcaacataatgagatcccatttctaaaaaaactttaaaaacttagctgggcatagtgatgtgtgcccgtagtcctagctactcgggagactgagatgggaggattgcttgagcccaggaggttgaggctgcagtgagccatggtcacaccactgccctgcagcctgggtgacagagcaagatccagtctcaaaaaacaacaacaaaaaaggaacattctttaacctgaaaatggcatctaccaaaccctaaagcaaatattattctcagtggtgaaatcctaaaaacatcccatttgaattcaggaataagacacgggaaatactggaatgcaacatcatcctaattatcaggaacaaacaagatgcaatttttaaaaaccatgacatatagctggatttatttaaattaagtctcagccctttaacctatgaagttagttcatttacattattgtgattatatactgtggtggatttattctttaaccttgctttgtgctttctgtacatttttttctttttctcctttttttgccttttatagaactgatcaatattatctttcaaatgattatatttctgtttttttcatatttactttaaaattgaacaaacatactgctcaacaatcttgtaggttaatcaatatcccttggtttcctttcaaacaaaataaggaccttaggtggttttctctcttattcttctttttctctcacacattgtttctagtattttaattccatctttttatggaacctccattagtgcttttgttactattgtttcatacagtcaatgcttgtttagatttgactatgtatttttcaactttttaattctccactgcttttctaaaaacatttttgaggtataatatagatataattcctccatttaaagtatacaattcaatggtttttagtatattgacagttgtacaactattagcacaatcaaccttagtacatttttatgaacctcaaaagaaacctcatacccattagcagtcactctccaatttccctccaacccaaccagccctaggcaaccactaatctgctttctgtctctatagatttgcctattctagatatttcggagcaatggaatcatacactatatggtcttttgtgactggcttctttcacacagcatattttcttttttttattatactttaagttctagggtacatgtgcacaacgtgcaggtttgttacatatgtatacatgtgccatgttggtttgctgcacccgttaactcatcatttacattaggtatatctcctaatgctatcccttccccctccctcaaccccacgacaggccctggtgtgtgatgttccccctctgtgtccaagtgttctcattgttcaattcccacctatgagtgagaacatcacatagcatattttcaaagttcatccatgttgtagtatgtatcaatacttcattatttttatggctaaataatattccactgtatggatataccacattttatttatccattcatcaattaatggacatttgtattgtttctacttttgggctactgtgaataatgctgctatgaacattcatgtgcaagtttttgtgtggacatatgtatttcatttctcttggatatatatctaggagtggaattagagggtcaaagggtaactttcaatttagctttttgaaaaactgccaaactgttttccaaaggggctgtgacattttatattcccaccagcaatgtatgagggttctactttctctatatccttgccaaaacgctatctgcctttttcattatagcctctcaagtgtgtgtaagtggtatctcactgaggttttggtttccatttctctaatgactaatgatgtttagcatcttttcatgtgtttattggccattggcatattttatttggagattcatatcctttgcctcccttgctttttgttgagacagggtctcactttgtcacccaggctggagtgcagtggcacaatcatggcttactgcagcctcaaactcctgtgctcaaacgatcctcctgcctcagcccaacaaatagctgggactacaggcatgtgccaccatgcccacctttgtccatttttaaattgtgttatttgcctttttattattgagttgtaataattattttttattgagttgtaagaattacaactcaataataatagtaagtaaatacaagtattttatctgatatatgtttgcaaatatttttttccatactgtgagttgtcttttcattttcttcatgatgttctttgaaccacaaaatttttcaattttgatgaagttcaatttacatatatttttattttgttgcttatgcttttggtgtcatacctaagaaggctttacctaaccaaggccatgaagatttaggcccatgtttcttctaagaagtatatagttgtaggagccgggtgcagtggctcacacctgtaatcccagcactttgggaggccgaggtgggcagatcatgaggtcaggagttcaagaccagcctggccaatatggtgaaactgcatctccactaatatacaaaacttagccaggcgtggtgcacctgtagtcccagctactctggaggctgcggcaggaaaatcacttgaacttgggaggcggaggttgcagtgagccaagatcacaccattgcactccagcctgggcaacagagcgagattccgtctcaaaaaaaaaaaaaaaaaaaaaaagaagtgtgtagttgtaggtcttacatttaggtctgtgatccatttttagttaattttataaatgaagtgaagagggggtgcaacttcattttttgcatatgcctatccagttatctcaatatcatttgttgaaaaagagtcatctttcctcatttaatgtcttgtacccttgttatattgagagtaaatgtggggcaaataaaagaaaatatacgtaataaaaatgaacttattttattaaaataataaaattaaaattaaattttatttaaattttttgtatatacgtatatacccatatatatatacacatacatttacatatatgtatatatatatttttccttttgagacaaggtctcgctctgtcacttaggctgaaggctgaagtgcagtggttcaatcatagctctttgcagccttgacctcccaggcccaagcaatcctcctacctcagcctctcaagtagctaggatcacagaaatgcaccaccacacccagctaatttttaaaaagatttttgtagagaaagggtctccctacattgcccaggctggttttgaactcctggcttcaaatgatccttgcatctcagtctcctaaaatgctgggattgcatgaatgagtccccacacccaacctgtatttttatatttcttaaataaaaatattatttcaaaataaaatattttggactaagtctattttattcatccatgtctattcttaagcaagtaccacagtgtgttcactactgtaactttgtaatacattttgaaatcagtgggaaatgtgagtcctccaacatggttcttcttttaaaaaattgttttgactattttgggtcacttgcatttacatattaattttagtatcattttctgcaaaggaaagccaagtaggattttgatagagtttaactctgtagatgaatatgggagtatggccattttaacaatattaaatctttgaatccatgaacatgggatgtctttccatttattttggaattctttaatttcttttaacaatgtcatagttcacagagtacaagttttatacttcttttgttaaatttattcctaagtagtttgttctttttaattctcttataaatggaattgctttcttaatttctttttcagattgctcatggataatttattgcttcttgatccttttctcatgggttcatatttcctactccctgaagtatatcctcaaataattcataaaataaatctgcaaatacaattctcttactttccatctgaaagtgtctttatttcaccctcactcttgaatgataatttaattaggtatagaattctaggtcagtagtttagaagatatttttctattttattttggccttacttcttgttactgagatgtcaactctcagtctaattgtttctctgcagacaaagtgcctttttttcctggttgtttttaacttgtcttagtttatttttgatgttcgacagttttattatatatatatcaaaatggagcttattttatttattctattcaatgtttgttgtacctcttcaacctaaggatttgtgttttaattctagaacattctcagtgattaattttttgaatattgcattctctctagtatctctttctagaactttcagggatatactttctcattttattctcccagtgtctatttttgtcattaaaaatatctcattctggttggatgtggtggctcacacctgtaatcccaatactttgagatgctgaggtgggcagatcactggagcccaggagttcaagaacagcctgtgtaacatgctgaaaccgtgtgtctaccaaaaaatacaaaaattagccaggcatggtggtgtgtgcctatagtccagctacttgggaggctgaggtgggagggtcacctgagcccaggaggtcgaggttgcaatgaaaaaaaaatatatatatataatatatataaatatatatatataaaatatatatgggatatatatattattctgaactgtatttttagtacttctcaattctatattctagttctttttaatacaaagtaagggagttaactcttctcaaaaaaaaccagactttaaaaggaggaggacaggagtttcatccaggggagaaaacaattttcataaaagacattatacctcttccaatcatactccctaaaaatagcgaatggccctaaggtggctatatttttttaacataagtatttgtgagatgattagattcatgctaaggaaatatgtctgaaattgtggtgggaaaggaccatcatgattatgatttactgtccaggttttacctgttgaatctgacagtgtggcaggatgcaaaacagcatgtgctttgaggtcaaccagacttgggttcaggtgccagctttgctaatagccagttatgggattgggcagcttattttaacctcactgagtttttctgaatcttaacttcatcatctgtaaaataaacccatcaatgttgttatgaagaactaatgatatggcagatataaagtgccttgtgcaaagcctggccaacagcaggtgtttcatgcaagattatcattatttctggtagaagactcttaattagaattggtgccatcatgtgggttatcctcatttagtatttgagaccttctcattagtcatgtcccattgtaacctgtttgctgtgatctgaccttcctaggatacacagattaataattaatccaagtaagagatggaatcgttgcttgtggaaatgtctgtgttgatatttcccacacttttcttctgcagcagtccccttagacagctctcgaaggccccaagtaaaacattctggggttctttcttgcagcagatgatgtaatgcaaagtccatctgggaggcacaccctataagaaagacctctaggactcttaaaagataaatgcttagaaaattgatccaatcaaaatggaactgttataaatacgctttccctgtaatttttcaaactaatatatttaattctgtctggcagcatcctctaaattgaatccacgtgagacagatgagaccattggaagaatataatatactgatgcaggaattattctgcctttggtgggggcagtcagtgtttcctgactgcctcatgcttggggtgaagctgcctcatgcttgggttatgatggcaaatattgcctccagtaggctgctcatgaattatttctgttgtgagatttatgacaggaaacgggatttttctgtaagcacagtttaatgactaacattcctacatgtgcagtacattcaggtcttttccttgggtgggcttcttgattgtatagccacctgaatgtccacttttattagacaacatcaattaaccttaccctgcaatgtaatattgcacgtgccatcattacccagagcacagagaacatgtgaaccactaggagaatggtgatgacattgttaacgtcactaggctatttaaggtggggaaaaccttcaataatttagtgatattaataattgcaatagttaatagttatcatatagtctctgtgtgcctgatactatgctaagtgcacccctctatttatctatgtttatatttatatgtgtttaagttagtcttcgcaatagccttgtgagaggggtactgtgattagccgcatgttctagatgaggaaaatgaagcatgaggcatggagttaccttgctcaggatggtacagtgaaggagttggggagctcgatccatacccgggtgggctggcaccaagaggaaagtggccttaccttcaccacatgaacatgaggcctggaagtttcagagggccgccctctctatgctcagagatacctggactcagctgatgtgtgaaagccatgcttcgactccccagtcgagtgtaacccctctagatagactgtccaaaaggctacatacaattcagaacatttagcttatctttactttaaattgtatacttaccttaccaactccactggcattagggattcttcttgctcaccattccttcctttctctgtcttcacatttgctgggtgctttggggacaaaaggaggaaggggagaaagaggaggaagcagaggagaaacaattctctttgcttgggaagtctgcattccagccctggcaatgggctctgtaactgtgaaagaactggagagtgacatgacagggtttggtagcaagtcgttccctccttagatagctcaggcgggaccaggtgaacatctccagactcttccccacacatttggcctctgcctcacctctccctgatggggttaattcactatgtccctactctgtggccttcccagcccattaccctacctctgtcacagtcctccttactttgccacctcatagggccttcctgatagagcaggaggccaaagtcctctgaccaagtttgcagagtaaatttgaggtgaaatgaaattccacctcctaagttgacagaaggcacagtcagaacattaaattggctttagcacatagaataattcttatatattttgagaggtctggaaacgtttgcttataagcaagtgtttcagaaagacctccttatattttgatatagtgattataaaataaaaatatttctagtccatcttctgtccagggagaggtgcttttagcttttagaagcaagaggagccacctggttcttctcttggtcacctttcctctcgcccaccacctatatcaggtgagtcaatgccataaaggatatttacctttaagatcagaataattgatctttccaaagtgaccacctcctactgctaatttatagaccaaagaaggtatctgagataagtatttattctataaaacttctgaagaatctagcttaaacagatatttttccttaaaattattttttgtaatacatgcacaaagtcagagcataaaagaacataacatttatttgtcaaaaactcattgaataatatatatcaacaaagttgatttaaatgtgaaaaaaaaacccagtcataacattaaaacctagtttttctcacttccctgtcccctagccaccctacccctccccagagattactggattactgccgtgatattttttgaagagggtggcatattgacttctagagatgttccctgcgtgtatgcatttataatctttgttgttgttgttgtttgttgtttgtttgtttttgtttgagacgaagtctcgctcttgtcccccaggctggagtgtgatggcgcaatctcagctcactgcaacctccgcctcccaggttcaagcaattctcctgcctcagcttcccaagtagctgggattacagatgcctgccaccacgcccggctaatttttgtacttttagtagagatggggtttcaccatgttggccaggatggtctagaactcctcacctcaggtgatccacctgccttagcctcccaaagtgctgggattacaggcatgagccaccgtgcccggccgcatttgtaatcttttttaacaacctgcacatggcagcattttgtacactcagttcttgcttttgtctcctactactgtataatggagacggttccatatcagcacagtcagtgctgcttcattcttttgatgggcaacacagttccccccggcaaggctatagcctaatatccataccagttcttttcgataacttttaagctatttaaaatcctttgttattacgaacaatgcttatgtataagcatatctatagaataaactcctgtgagtagaactactaggtcaaatggtatatagactttataaaatagtttaaatacacaaaaaagtataaaaaataatgtaactaacaacgtacccagcattattacatctcaacaaggaaaatcacatttcatttaggaagcactgaagtgcgaggtcactgaagtcatgagttattgctaatttatttggaataagggagttatctaattttgctttgaaatctggaagcctgtactcaaatgctgctaggattgtaaatgtattccatctagtgggctcagctgtgtccagagtggactggtttttctaaccaatcacctgcgtgttcctaaatttagttctttggtgtgttttgccctaatcaatgagatatgcaggcctggcctggcaaaaggcccgaattagctcaaaggtgactgctaagatcatgtagcctatcccaagtatcctgtcatacaagtgactttacagggatttgttttactccttattagatggaatgagctttcagtttcattcttatcatttaagtggattgtggtttaatgtatttgtaaaggcataccgtgtatctatgcacatgtattgtttccattatgctttatctcaggcctcataccttctgcaaggattttcataatgtttttctgagtgggaagccaggagttctctctgtgcctcaacccctgctcccactgcattcattctctttgggggttgcacatagggttaaggatttctggttttcctttgaacaatgattgctgtattaaacacagcttggtaactttcagcctattatttgtgtaaatggctctctagtgcttttagatttacttaattaaaattctagaatgatgtgattccagtgggttacattagtctcacccttaacttcttcagtcatttttgtcttctagcctttttctttgcaagagttcttattgaagacaacagcttagcagacttctcaactcataattcattacttaaaagttaaaataattaaaagcgtttgttgtggagcatagtggagttaaactcagcttgatattcatgcaacattgcactgccgcaagaatgtagctaacatatccttaaaatgaaaagggaaaggttgcagttcccagagattttctacccatcttttgagctgaaatcatttcataagttaaccactgagtttgaatgtatcatctagttatagtttaataggagggaacaaaggatgcacattatcttttccctttatacccaggacatagtaagattcacacaacacaactcattgcccaggcatgcaagtattcccatgcatgaacagacctcctgtgcctctacgtttttccctcccttagtgacagaaaattcactggactccagcaagcgctgagctctggcagccattggccccagagctctactaggtagaggctagctacggaggtggccagtccggtggtttgtgtccaggagaacatggcacagttagctatttaaatccaaccaggatgatgtaagcgagcgggctgaaagagttaggcgaaaggtgaaaggaaaggagaaatcttgtcaggctgcattatttacagtgagctgggctgagactaacatgccggccacctgtacactgagccaaactcctggcacctccatgctgcctcctcgcagccctcgagaaaggaggaatcactgcagaaaattatctgatgctaaattatgtggggagagggaatggtgtaatttttaatatgatttttttaactggaagagcaggtctctctacttagataaaaacacacagacctgctctggtttgcaaattactggagtgtcacagcaaagctgggctctctgtctctcttgctgataagagaatagtgtttactcttgcctctgtggtcctaataatcctgagtgaaactttgtaaaatgagttcttgttttgcaggacgagcaaatgttcaggctcaggaaatgatgctaaagacactttgaaaaatgtaagatgggcttgacacagcattggcacaggatacgtgacaggaagcagcgtggggagcggtgataacagtccctgcggcaggcagagagctggtttcacactccagcctgggttcccgcagcaggagcgggctcagtgcactgaggcgagagccttgttgcactgcagaatgagggaggaaatctggctgtgctcctaggggcctgggttgggggaggcctgaagaagcaggagagggccccgagagcaccttcttaccagtgagggcttgacattcacctgcacacacaccgcacttttaaaaatcgtgttggctttggttggttttggccctgctcacactacttttccaaagcacctcctgttgacgaagctggctttgggacaagagaggatgcatttgtccttagggtctctcagggacaggccacgcaacaccacatacacaggtgctcagtaagaattagatggagcggacaatgctgattactgttaatgacggggtaagttaataaaggcaagatgcctgtttccgggcaaatccgccccagtgcgatggaacctgcagctgatctgcttaggagggtggcttttcttccagatggccgtggcctttgtgtcagggaagggcttttttttccatgcatggtgcactctggttgtgatgcagattagaaattcattttcatttgccactcttaaaaaaaataaacattctgggcgcatgaaagggagcttttgaaccccaagagtgtgctgtgtgtttgattgcgtgcggcgggaccctctcctagatcattagcaagtgcgcctggctctgcggctttattcgggcttcagccctggcgtcattccgacagctctgttcttaaagatgaactcccatgcacccagtaacttgctgtagagaccagaggggaaaacttgatgatatggatttacaacaattattttactaggtttgtgtttctcctgcactatattcttctttcaaagagtcagaagggagagattgatgcctatttgccattgtttctttaaagttgtcattgctggtgtaactttgatgaatactggaaagcagaactattcaaactgtgtgagttctgaaggggtcaccaaatttaaatgatacaaaaggaccagcacaggcaatgaagtgacagggatagcatggaggataattccacagtattgcaaaaccaacagatagcatctcatctctgttgagcacagccaggcataggaagatagcaatctttatctaggtatagagatgattcttgcttccaggtgcttaaaatcaagtgagagaaacagacatgtatacaaagaactctaagacaaggcacacatgtgaccaaagtgaagtgtaaacccaacactgcacgcatgctgaaaaagtatgacttgttctggtgggtgaggcccctcagttgaacttggatgaatgaggaggacctcaacaggcagaatgggggataccgtatctgaaactctatatccttgaaaaaagaatatgcaaagtctatatgaacaaatatagcaagatgtctgagatagattacatgataaaggagtttacccagcaatatgtgtagaactcctacttttagggttaaaatatacacagtatatgaagagtagttaagcttttaagctctaaagacaggctggttaaaatcccagctcaggactttcagtggattgtgttactgctgaaaaatatttactgtctctccctgggggaaggttattcgttcctgttcattaatagcaggctggtcctagaacctcctttggctaatgaaatgagagcagaagtgatatatgccccttctaagtagatggtttaggagccactgtttgcttctgctgttttatgatgaacagctaagtcccagatagagggtgctccttcagcttcagcctgggtcctggaacaaagacagcatggagcagagccacagctgactcctggtcgacatgattcattagcataagcaagaaataaacctttgttattgtcagccactgagattttgaagattcttgttggctggtcacggtggctcatgcctgtaaacccagccctttgggagtctgaggcgggccgatcacgaggtcaggaatttgagaccagcttggccaacatggtgaaaccctgtctctccttaaaaaatacaaaaattagctgggtgtggtggcatatgcctgtaatcccagctactcgggaggctgaggcaggagaatcgctttaactggtgggggcagaggttgcagtgagctgagatcatgccactgcactgtctcaaaaaaaagaaaaaaagaaaatgcttgttaccagaacataactcagcctaagttgactgacagtcactttaccacctatgggatcttatttgacctcattaaacctcagtttccttgtacataaaatggggataacaaaatacctacctcggaggatcactgtgatgttaaaatgcacagcatagaggtttgtaatccatactaagaattcagtaagtcttagctacctttaaatacgcatagaaaaatgtctggagggatatatgctgtcttagtccatttgtgttgctataaagaaacacctgaggctgggtaatttacaaagaaaagagatttatttggctcatgtttctgcaggctgcacaagaagcatagcaccagcaactgcttctgctgaggctgtaggaagcttccactcatggtggaagggaaaggggaacaggcatcacatgctaggagaagaaagaaggaagaaagataggggaggggtgccatgctcttttaaataaccagcttccatgtggactaattgagcaagaactcactcctaaccagagagagggcaccacgccattcataagggatctgcctctaggacccaaacacctgctaggccccacttccaacactggggatcacatttcaacattgagatctggaggggacagatacccaaactgtatcgtataccaacctgttaacagcagtgccctcttgaatgtgagattacaggtgactttcattttctattttagttctgcaatcaaattgtttataagaggcatatattattttaatcatcataaaaattaggtagtttcgctttggaaaaatgaacaaaagcaccctgtacatttctctatcacaatgcctactgcaccaaactcagctccttgaaagagggagctgtgtgcattgccctgtgctgctagtggctgggtggcagagattatatactcagtagatgtttacacaagcgtaattgatcagcttctcatctggattactgggtgaatggcaggtaatgacctgctctgagaagagaaacacaaaaagagtactacatgaggtatgaactcagaatgtccacattctgagtttctcatagaaacaataatcaggcagctagaaataggaatttgaatatcagagatgtaaaggtggggtttatcaaatagaggcgattacaggttgagcatcccaaatccaaaatctaaaatgctccaagatctgaaattttctgagcactgacatgatgcacaaagaaaatgctcattggacctttttggggttcgggttttcagatttgggatgctcaatcagcaagtataatgcaaatattccaaaatccaaaacacttccagttgcaagcatttgggataagggatactcagcctgtagtcgaatctgtggatgtagagtgggagcatgagctctctgctctgctctagccccatcaccctaattgtcctctcaagacctagtccaaggaatttttaacaacaatattcagcctatcatttttattgagcacctaccacatgccaggcactgatgctacagaggtgaactataaaatcaaatgtctctgccctcaaccagtttctgttttacagtgggggcagaaaataaccaacaactaaatgagtaagatatagagtgtattctgtagtgatagagagaatgataaaacagggaagagggaaagggaatgctgggtggggagtgttgccattttcaacaggataagtcaaggtaggccttgctgaagacatgacattggagcataaagctttaaaaaagcacaagatatctgtgaatcctgagagaatgatccagatagagcagaaaggacagaggccttgaggtggaaacatgcccgtgctcagaggaatagcaaggaggtcggtgtggctggagcagaatgagtaaaggggtcagtggtaaaagagttcagagaaatagtgaggggtgggagtggggatggagccgtggatagatcacggaagaccttatctgcaggctactgaaggcactttgacttttattctaagcaatatggaggggaagctaatgaagtttcattagaggaataatctggcttatgttctaaactgaccaggctggtgaatatattgagaacacactgatggaggggaagggtagaagctgggagaacagtaaggaagttattgcagtcataggtgatgggtagcttgggctaaagtggaggtgatgagaagaggttggatcctggatacatgttgcaagcgcggccagtgtgatatgctcatggatttaatgtggcacatgaaaggaagagaggaatcaaggataagcgcacggtttttggcagtagcaattgggaagatggggttgctgaaatgggaagacttcaagaggtgcagtattgatgggaagttaggagttcagttttagacacgctcattttgagatgcccttcgacatccaagtggagaaataggtggatggacatgtgagccttcagcccaggggagggctctgtgctggctcaggacatttgaggttcttggtgtacaggcggtatttacgctgtgagaagggtgagatcccttagggagtaagcgcagggagaaaaggagtctggggaccaagctctgggtcccccaacatttagagcaggagagaagaagcaaccagccaggaagactgagtgagtagtcagtgagggcagaggagaatcagaggtgagtagtgtcccagagatacgtgaagaaagtgtttgagggaggtgggcatgctactgccaggccagctgagatggggactcagcattgtccattgggttaagccagatggaggtccctggtgacccagcaagagcaagggcatgggtggagcatgggtggaggggagtgagtggagaagcctggcagaagaagatttgaaagagaattcgaagagaggaatcagagagcagaaagtttaaacaactctttggaggaattttgctgcaaaggagagtaggaaaatggagtggtagcgagagggaaagatagatatgagcccaagaaagtattttctgtcttcttttttttttttttcttaagatgggagaaatcacagtggtcggtatactcatggaaagactccattagacagggacaaattgctgatgcagaagaaataaagaggacgttttgtgctatggacttggataggtgaaaggaggcaggatctatcgcacagatggagagactggacttaggcgaggttccagctcacagttcagagaaacagaaggtggaggtagggtggctggacacaggtacaggtaagttggcagatgcagtggtggcagtgtgggggtggcaagggtgcatgttctctattgattgctccttttttctctgggaaatggcaagcaaagtcagcagcttaacgacaagataagtaaaggggtgttggagatttgagaatggaggcaaaggtataatctggtgacctaggagggagacagtcctgggtggtctagggagtatcaggccagcccttaaggacccccaagttcagtggccccaaagtcaagtgaaatggtcatcaggggtatgcattagtttccactgtggatatgcagttacagcatgggtagacaggtggatttaactaactcagaagctgaggaaataacctgaaagagagagaaaggaatgggatcaagagcagatgcggatggcctagggagttggaaaggaactggggaagcatctattagtttgagaaaggaggaaaataggactgtgttagttatctactgctatgtaacaaaatctttacaaacttggcaacttgaaacacacattaattttctgatagtttctgtgagtcaggaacctgggaacagcttagctcagtcctgtttcggagtctctcagaaggctgcaatcaaggcgtcagcccgggctggggtctcatctgaggcttgactagggaaggattcccttccaagcttatgtggttgttggcatgttgcagtttcttgtggactctcaaagggccttaattccctgctgctgttagctgaaggctgctctcagttcttgccatgtgggcctctccatatggtgttacttcaacaaagctagcaagggggaaagtcgatggagtcagtctgctagccagatggaagctacgtcttatgtaatgtcatcacaggaccgacatcaccttgccctattctgttgctggagacagtcacaggtgccctcatactccaagaggaggagatccacaagcgtgcaaacaccaggaggcagggatcatcgggagccatcctggagtctgcctgccacagggagaaatgcacaacatggcagattttgcatagggagaagggaaactgagggagctgaaacacagcagacagcctgtctcctaatgaaaagggggacggacttaccccttgagaaagaaagggccgtgatgggggatgtatggcgggtgtagggaaaaaaaatgtttgcagtgaggagagggagcccagggggtaagtaggagatttctgagcaacaaggagggcccacaaaattcttatagaaagcatggatttgctgcagagccagcagacagttaagtgatttgctccaacaacagatggcactctgttttcagccagagaacaaatggatggagggattggcccaaggctgagtgtgtttaaaggtcagggtcaggtcaggtgtggtggcccacgcctgtcatcccagcactttgggaggctgaggcaagaagattgctgaaggccaggagttcaaagctgtagtgagctaggatcacaccactgcacagcactggaccacagagggaaaccctgtctgtgaaacaatgaaaaaaaaagattaaacagaaggccaaggtcaagagactctgcggtgctggtttaaaaaacaacaacaacaacaaaaaacaagtgactcagagtcatttttctacttcccacttcctcatttctacttcaccagtgattctaaactaagtgtgagccccaggctggcctggctctgtgaaggtagcaatccgtcatgatgcagacaggctctggcaggaattccagacgaccccactggggaccttgcagaacagaagctgtttccgtggagcaaggatccccgctggagacttcagtgtctctccctgtctccaggcacttcctggcatttccactggctctcaccaatcctctccctaggaccagatcttcctcatctgcacctccattaccctcctcctctgcctcagacacagtgtttatcaagctcatcctggtgtttagctcctttccagaaagagcttcgagtgagttattgatgcagtcaatacactgacctcgagttcacagctggtccaggaggttaaaatgctgaagtaagtagaacacactgtgatgagtttgttaagaaatttgattctcagtttccaggataaactgttttctttaccatgtcaccacttcagtcttgttattgtgctgttgaatagggcaggaccaacaaatgacaagaatccaatggcctttgaaggtcatcctgtgcagcctcctgccttcgagcaaggatggtacctgaaataataatccctgtgggaagagttcagaaggaagacataaggccttagctgcatggaattatgatgactgagaagtattttgtttaaagcttagagtcaatgcaaatgttttcttgttttagaaaattcttagagaaaggataattatttcccacacgaattgagctatgtcgtgtctcactcatctcagacccagcccattgtgagtccataatacttgttggataaacatttgttgaactgaaatgagtggatccaagggtgagacattagcaaatatgagtcatccctgaatgatatgaagtgaaaattagaagaaattcaggtgcttctaataggataccgaatatgaacacttggagactcactcctatgcggactcctttagtcttcctgcataatacactttttaaaaacacaaggtccagaactatttttaaaagaaagctttgggtcgaaatgttttcaatgcacagacatctagaggagaaaatagcaatcacccacattcccaccatgcagaattaagtactattaacattttggaatatttgcttccaacctttttagttagtactctatttttaaaacctttactagtgcaattatgtgctgaaaaatatgaatgtgtctgtgcatgtgcatatgtgtgtatactatgaactcacatgtctctgctcacacatctgtgacctcttgcttgctcttccccagggtttctgcactggtaggtgctatattgcacactgctatggcaatagtggaataatgaagccatgattttacatatcagtgtacagatgcataatccgaattatacatttttaaagtataaaagctataaggaatgcacacacacagtaaaaaaaaaaaaattctaacccgactccctggccttcagtctttcaatttttctctccaggggcaaccagcattgccagttccttgcaaatgtttccagaaatatcatttgcatatacaaacatgtattctctattttcctacacagatggtagcatacgatgtatactgttttgtaccttagcatagggttttggaaattttgcaaatgcttcttaacagtaagctttctgaatgtgcaaattagcaatcaaggccttccttttttccttagtctcagacaatgaactcggtggtcaaaaaaatgtcctccacttgccggacaggtgccttcaaatcacaaattcccacatcatggttagatggtgtattcttgcccactcctgttgaacttacttatttaaacatccacaagaaaatcctgtatatttttggtagctaaagcaaaatcctgcagaacacaacaaaaccaaacagagggaaatttggggctcagcttaaaatacagctgggcaagcctacacttagttgctggaataacaaccagctgggaggactaaatttagcttggagccttaaacacggtcagccctaatgcccacaacccccccacagaggacttgggccccgtctcccaagttgggagacaagaagaaacaacaatgttggcctaaaaggctgactttgcaaaaaccacctagtcaatctgctgtgatttaataggctgtgaaaggtttgatttacaggcagtcaataggcaagcagcatgatttgttgttaggggtatagagagcacaaggactaggatgatgccagacagtgaaagcggttaattaaaattgtaatattattttaaaacaatttttaaaaaagaatagaacaaattggaactagaagtgggtcccactctcagggctggcttgcagggaaatgaaaggcaagtaggaccggtctcccacatggagccttcatgggacccccttacccatgcaccacccccttctccaggggagggctgcaaaggacagagacccccaaacacaggctcatgtcttgatattacgacttggttagcctcagtttcctggtttggtcaagtaaggtggttggactagatgcgctctgagccccaaccctccaggtctgcagttttcattttcttatgtctcctacaactgcctggagccccttggttctttgaggctcctcctacaacctgggggtgctttacaccccacccgtagccccctccaaacccaagtggtggtcttggtgcctcagggtgagaccacgcgttgacaatatgttaataacttggtaagggaggaacacgagggagctgggagtgtctggcatctcccctgagcctgaaggtggcaccgtggaaagcctgacaacccacacagcatcacaggcatcatctgggctccgtcagagaggcctgggacgtagtttactgaaaataaacaggacgaggatgccccatttagcccaggtggtacccggggaatagcgggacttctgactgaccatgctcacatgtgtgaagaaaatgtctactggggttctcatgagtcccccacccactgggtagcaacagaaataaactagactgagtccaagcagttccagacttggatgccatgatttaaatactgtgcctgtagggtgactttggtttccaccgttgaattgttgtcttccagattcttgtcctgcccctgctcctttcttagaaggtatttgtgtggggtgtgatgagcaggctttcaggatgtcatggcaggcctgtgtgtgagaacactcttggtgacccccatgctgtgtgtgggctggtttggtgtgctactagtctcagctgtctgcaaactcttgctgtggtctttctcagcccactggccctccctgcggatacggcctccccttgcttcactctgtcatcacagacatttctgagtccctgtcacactgtccttctgggtcctggcccaggctgccacccacagtgtgggctgtagggttattttgctcccagccacattagggccctggcaaatctccaggcttatgggagaaaatgtgttcaagagtacacactagacccctctctgccctcctagcaatgcaaggctgcctatcttgaccttcacagcagtccccaccaagatcccagatgggaaatggggcacagccctgccactctcgatgtttccttcaacctaatctaaatgtctcctccttcaggcctagaccagagagtggtgagcaggccccagagctgactgacagagcacctttcactgcccagcgctatttagggcccgagggatgggactgaaaacaaaaattcccattcctgtctacctgcaatttccctcccttccttcctgtcttcctgccttcctgccttccttcttgccttccttccttccttttctgacatagggtctctctctgttgcccaggctggagtgcagtggcatgatcatggctcactgcagcctcaacctcccgggctcaagtgatcctcccacctcagcctcctgaatagttggtactatgggcatgcaccaccacacctggctgattttaaacatttttgtagagacaaggtctcactatgttgcccaggctggtctcaaactcctgagctcaagcaatcctcctaccctggcctcccaaagtgctggggttacagtcttgaactgtgcttggccatgcaatttctgtgctcggccatgcaatttccatcttgtaaaaatttccatgatctaatacttcaccacacagagcctttaatatgttacacaagaactaattttttagaaaaccttttttttttttaaattgaaggcccaactttcaaggttgctgttttgcttcaaatcttattttagataccagaagctgaatattaactttttttctgtttgcattatttctgaaataatcttaatcctctgctccagtaagaccagggagaagatcatgagctcataaaaagcaaacaaaaagtaatgcctggtaataattttcaaaatagtatcctgcattaaatttttgtatacttatttaatcaatgtctccctcattgaaaagcatattacctgaggtggggatggagggacaacactttaataaattggtctcataaattggggccctaaggaacataggacagcaaagtgttgacaagggaaaattccagggcagaggcgtgacggggagagggcgcaggtctagcagctgacaagacacttagatttatccatccaggagtccaaaactcgcatagggtctgagtctatcaatatgagggtttaagtagaacactagttaatttgccatgtatagtctcctgaaacagtgcttcccagctcctagctgcatcagaatcacctggaaggcttgctgaaaccgaccaggcctgactcccccagtctctgattcagtaagtctcgggtgagacctgaggatccgcatctgttacaaactcccaggtgcccatgatgattgatgttggcctttctaccactgtttgagtggcactgtccccaagaaaatggcacggggaccaagatagagactacaaatgaccgctaggaacagcggcaaactgtatgacttgctttaagattttgttctgacaattctaggcagtcgttcgattcaaacacattgtaaagaaaaataagaccagatctaggaggtgatttccacacctctagaaagaaggaaaatcatcatgctagagcgtctgagtaagctccaggtcaaggattttctttttattttattttaattaattaattaattaagttagagacagggtcttactctgttgcccaggctgaggtgcagtggcacgatctcagctcactgcaacctccacttcctaggttcaagtgatcctccttcctcagcctcccaagtcactgggaccacaggtgtgagctaccacgcccagctagagagaattttcttcttacagcctttattaatctgagctgcccttggatgggaggaaaggcagggcagaaagcccctttcttcatcctgactaatctccagtgaactaaggggcacttttggaaatatttgcagagtgcccgtgctgtggataggtctctgcctttgccctatgcatcgtggaagtggctgtgtggctgcctcccaggccctgggtgagcgggggagcccctggaggccgtgcacactgtgctcaggagtgcaggctccacacccaggccacccttcaaccccagctttggacttgccaatgctgtggcttcaagtgtgggccttaacggctgcccaatgagagaataatatgcccctcatgaggacaaatgcagcgagagtcaatgggacgttttctataaagcagtagctcctgttttgaggcagggaagctagtgcatagaggaaaatgttatttctggctagcaaagcagggtctgtgggattgcatcctagcaatcctcatcttgacctagaccctgcccctatgcagctccctgcactgaggtgtgccaaggttttgctttttctgagtctattaatgtttccatggttgaaataccactctctgattagctcaataagtcattttaaaaacagcaattttttttattatactttaagttttagggtacatgtgcacaacgtgcaggtttgttacatatgtatacatgtaccatgttggtgtgctgcacccattaactcgtcatttagcattaggaatatctcctaatactatccctcccccctccccccaccccacaacagtccctcgtgtgtgatgttccccttcctgtgtccaaatgttctcattgttcaatttccacctatgagtgagaacatgcggtgtttggttttttgtccttgcgatagtttgctgagaatgatggtttccagcttcatccatgtccctcatgaactcatcctttttaatggctgcatagtattccatggtgtatatgtgccacattttcttcatccagtctatcattgatggacatttgggttggttccaagtctttgctattgtgaatagtgccacaataaacatacgtgtacatgtgtctttatagcagtatgatttataatcctttgggtatatacccagtaatgggatggctgggtcaaatggtatttctagttctagatccttgaggaatcgccacactgtcttccacaatggttgaactagtttacagttccgccaacagtgtaaaagtgttcctatttctccacatcctctccagcacctgttgtttcctgactttttaatgatcgccattctgactggtgtgagatggtatctcattgtggttttgatttgcatttctctgatggccagtgatgatgagcatttgttcatgtgtctgttggctgcataaaatgtcttcttttgagaagtgtctgttcatatccttcgcccactttttgatggggttgtttgtttttttcttgtaaatttgtttgagttcattgtagattctggatataagccctttgtcagatgagtaggttgcaaaaattttctcccattctgtaggttgcctgttcactctgatggtggtttcttttgaaaaacagcaaatttttttatgatacctaaaatgttttttattatactttaagttctggggtatacatgcagaacatgcagttttgttacataggtatacacgtgccatggtggtttgttgcacccatcaacccgtcacctacattaggtatttatcctaatgatatccctcccctcgccccccattcccagacaggccctggtatgtgatgttccccaccctgtgtccatgtgttcttattgttcaactcccacttaagagtgagaacatgtggtgtttggtttttcttgtgttagcttgctgagaatgatggtttccatgtccctgcaaagaacatgaacttatcccttttcatggctgcgtagtattccatggtgtatatgtgccacattttccttatccagtctatcattgatggacatttgggttggttccaagtctttgctattgtaaatagtgccacagtaaacatacgtgtgcatgtgtctttatagcagaatgatttataatcctttgggtatatacccagtaatgggattgctgggtcaaatggtatttctagttctagatcattgaggaatcactacactgtcttccacaatggttgaactaatttacactcccaccaacagtgtaaaagcatccgatttctccacatcctctccagcatctgttgttttctgactttttaataattgccattctaattggcgtgagatgttatctcattgtggttttgatttgcatttctttgatgaccagtgatgatgagctatttttcatatgtttgttggctgcataaatgtcttcttttgaaaagtgtctgttcatatccttcactcactttttgatgggttttttttttcttgtaaatttatttaagctatttgtagattctggatattagccctttgtcagatggatagattgcaaaaattttctcccattctgtaggttgcctgttcactctgatgatagtttcttttgctgtgcagaagctctttagtttaattagatcccatttgtcaattttggcttctgttgccattgcttttcgtgttttagacatgaagtctttgcccatgcctatgtcctgaatggtattgcctgggttttcttctatgatttttatggttttaggtcctacatttaagtctttaatccatcttaagttaatttttgtataaggtataagcaaggggtccagtttcagttttcttcatatggctagccagtttgctcaacaccatttattaaatagggaatcctttccccattgcttgtttttgtcaggtttgtcaaagatcagatggttgtagatgtgtgatgttatttctgaggtctctgttctgttccattggtctatatatctgttttgataccagtaccatgctgtttttcttactgcaggcttgtagtatagtttgaagtcaggtagcatgatgcctccagctttgttctttttgcttaggattgtcttagctatgtgggctcctttttggttccatatgaagtttaaaatagttttctccaattctgtgaagaaagtcagtggtagcttgatggggatagcattgagtctataaattactttgggcagtgtggccattttcatggtattgattcttcctatctatgagcatggaatccttttccatttatttgtgtcctctcttatttccttgagcagtggtttgtagttctccttgaagaggtccttcacatcccttgtaagttgtatccctaggtattttattctctttgtagcaattgtgaatgggagttcactcatgatttggctctctgtctaatattggtgcataggaatgcttgtgattcttgtgcaccgattttgtatcctgagactttgctgaagtttttcatcagcttaaggagattttgggctgagacgatggggttttctaaatatacaatcttttcatctgcaaacagggacaatttgacttcttcttttcctaactgaataccctttatttctttctcttgcctgattgccctggccagaacttccaacactatgttgaataggagtggtgagagagggcatccttatcttgtgctggttttcaaagggaatgcttccaatttttgcccattcagtatgatattggctatagatttgtcataaatagctcttattattttgagatacgttccatcaatacctagtttattgtgagtttttagcatgaagcactgttgaattttgtcacaggccttttctgcatctattaagataatcatgtgttttttgtcattggttctgtttatgtgatggattacatttattaatttgtgtatgttgaaccagccttgcatcccagggatgaagctgacttgatcatggtggataagctttttgatgtgctgctggattaggtttgacagtattttattgaggattttcccatcaatgttcatcagggatattggcctgaaattttctttttttgttgtgtctctgccaggttttggtatcaggatgatgctggcctcataaaatgagttagggaggattccctctttttctgttgtttggagtagtttcagaaggaatggtaccagctcctctttgtacctctgtataatttggctgtgaatctatctggtcctgggcttttgttgttgttgttgttgttgttgttggtaggctattaattactgcctcaatttcagaacttgtcattggtctattcagggattcaacttcttcctggtttagtcttgggagggtgtatgtgtccaggaatttatccatttcttctagattttctagtttatttgcataggggtgtttatagttttctcttatggtagttttatttctgtgggatcagtggtgatattccctttatcatttttcattgcatctatttgattcctctgtcttttattctttattagtctggctagtggtctatctattttgttgatcttttcaacaaaccagcttctggattcattgatttttttgaagggtttttcatgtctctatctctttcacttctgctctgatcttagttatttcttgccttctgctagcttttgaatttgtttgctcttgcttgtctagtgcttttaattgtgatgttagggtgtcgattttagatctttcctgctttctcttgtgggcatttagtgctataaattttcctctacacactgctttaaatgtgtcccagagattctggtacgttgtgtctttgtcctcattggtttcaaagaacatctttgtttctgccttcatttcgttatgtacccagtagtcattcaggagcagattgttcagtttccatgtagttgtgcggttttgagtgagtttcttaatcctgagttctaatttgattgcactgtagtctgagagactgtttgttatgacttccattcttttgcatttgctgaggagtgttttacttccaattatgtggtcagttttagaacaattgtgatgaggtgctaagaagaatgtatattgtgttgatttggggtgaggagttctgtaggtgtctattaggtctgcttggtgcagagctgagttcaagtcctggatatccttgttcattttctatctcgttgatctgtctaatattgacagtggggtgttaaagtctcccactattattgtgtgggagtctaagtctctttgtaggtctctaaggacttgctttatgaatctgggtgctcctgtattgggtgcatatatatttaggacagttagctcttcttgttgcaatgatccctttaccattatgtaatagccttctttgtctcttttgatctttgttggtttaaagtctgttttatcagagagtaggattgcgactcctgctttttttttttgctttccatttccttggtaaatattcctccatccctttattttgagcctgtgtgtgtctttgcacatgagatgggtctcttgaatacagcacaccgatgggtcttgactctttatccaatttgccagccttttaactggggcatttagcctgtttacatttaaggttaatattgttatgtgtgaatttgatccgtcattatgatgctcgcttgttattttgcccattagttgatgcagaaaaacagcaaattttacctcaattaacaaatcttctggtgatgaggttcatttatacagtaattagtggacattaaaataaaggaagtggcttccttgctgggctcggaggtggtgtattaatctgttttcatgttactgataaagacatacccgagaccgggcaatttacaaaagaagaggtttaatcagactcacagttctacatggctggggaggcctcacaatcatggcagaaggcaagaaggagcaaataacatcttacatggatggcagcaggcaaagagagcttgtgtggagaaacgcctgttttaaaaaccatcagatctcatgagactcattcactattgcaacaacagcgcagtaaaggcctgcccccataattcaatcacctcccactgggttcctcccacgacatgtgggaattgtgggagttacaattcaagacgagatttgggtggggacacagccaaaccatatcaggtggctggcagagacatggctaaatgcaccaagaaggtaggagtcgtcagtaaatatgggacccaatatggtgcctttctcaggaaaatgaagaaaattggaatcagcctgcaagtaacattttgctccttctgtggcaaaaccaaaatgaaggggtgatgtggcactgtggctccagcatgaaaatggtagcagtggtgcctggacttacaaccccaaagtaaagtcagctatcagaagactgaaggaattggaagactagtagaggctccatttcaaacattactggcctgtaataaataggttaacttatgtgattgtttttaagggatcatgtgacccagcactgccttccttgggccaggatgccccagggcacagcttcttctgccttgggtccactgaaggtgaacacagcaactccccaaagctgtgcctcccaggtccttcttctgtcacagactctccactttccaaaccctccttcctctcttgaaggagggagcctccagtccccgccagccatgtagtctttggctctatgaaaggataaggtaaccaacttatttacacaaagtgctacctagccaatcttctggcttctatctttaactggaatgtgtcttttatcatcaattgcttaaaggagtttcaggcctcagtaggaaaagctggagatgttccattttcaggacaagggctctgggtcagtgagtgcacctggaattgtcccaggcctatctgctgatgttggggtttttagggaaccctggggtagggagccagaagcctaatggttccctgcttcttccaacgggggtaaccaagcaggattgggcctggtaccaaaagagcctgtgggaggaggaactcctgccttttttttgccagtcgttcatattcacttccctacctaaagacagatccatctgcttcctgtctccttaaatgagtccttgccttgcctgtccttgaccccaagactcttagctacatgtattatcataccacagtattttaaatcatgtttaatcatttcttggtaccaaacttcctggctgatatggtctggatatttgtcccatccaagtctcatgttgaaatgtgatccccagtgtgggaggtggggcctagtgaggggtgtttgggtcacgggggtggatccctcatgaatggcttggtgccctcccaatggtaacaagtttatgggagatctaattgttaaaacaatctcagcactttgggaggctgaggtgggcagatcacctgaggtcaggagttcaagaccagcctggtcaacatggtgaaaccccatctctactaaaaatacaaaaattagctgggcgtggtggtgcatgcctgtaatctcagctacttgagaggctgaggcaggagaatcatttgaaccctggaggcagaggtttcagtgagctgagatcgggccatcactgcactctatcctgggcgccacagcaactctgtctcaaaaaaaaaaaaaagagtctgggacctcacccttctctctattgcttcttttctcaccatgtgacgcatctgctcccccttcacccactgccatgagtaaaagctccctgaggtctcaccagaagctgagcagatgctggtggcatgcttgtaccgcctgcagaaccatgagccaaataaacctcttttctttataaattacccagcctcaggtattcctttatagcaatgcagaatggactaatacgctggccttatttcctatctcttacctcccctctaaccctatgttttctttgccctttccctttcccttttcatttcatttcttttctttccttttcttttcttttctttcctttccttttcttttctttcttttccaggtctcactgtgtcacctaggctggagtgagtgcagtggcacgatctcagctcattgcagcctctgcctcctggattcaagcaattctcctgtctcagcctcccaagtaggtgggatcacaggtgcctgccaccacgcccagctaatttttatatttttagtagagacagggtttcaccacgttggccaggctgggttcaaactcccgacctcaagtgatccgcctgtctcggcctcccaaagtgccgggattacaggtgtgaggcaccacgcccggcaccctctgttatttttacctctactaataaaatgtctgccaaggaaatgtgtcattgaaatcatcctttttgactttgtaggaaagccatcgcaggcattttgagacataaaatgcagcatcagtaacataaccagagcaaaaggtctgacttaagcataagaactcgaaagagaatcagaaacatattgtttccttaactttaaactctgaagaagtcaaggaagcaatttaatttgagggctatttctgtcagggaatttggtagtgtcagaaaagctgcaagtctgagggaaaattcagtaaaataaaaggaagcttgttgtgtaacaatactattaaattgtcagcacgcttcttgaaggtggacccaggcagtccagatgaaagcagggaggttaaaatgtcacattgctctgctaaagggaactgccctcccaaacgtgctacttgacttctggttacttctctccataattcaagttatttatggactttgtagaatcaaaacaaggccacgatggcccaataatagactggctcattttcagtttgcaggaatgtaagttgggacttagacttttcatttgatttcttgtttttattttaattctttcttttcttttctttttttcctttgtgtttttttgttttgttttgtttgttttgttttgtttcgttttctgaaacagggtcttgctcttttgcccaggctggagtgtggtggcgtgattgtagctcactgtagctgccactgcagcctcaacctctgggttcaagccatcctcccagctcagccttttgaatagctgggactataggcatgtgccaccacacccagctaatttaaaaaattttttgcagagatgaggtctccctgtgttgcttaggctggtcttgaacacctaggctcaagccatcctcccacttcggcctcccaaaatgttgagattacaggtatgagccaccatgtctggctttcatttcatttcttttttaaaaaagagtgtaatgattagttcaaatcctaatctggaaccacgtggtgtctaaataaaattaaataaaaatgccattgctgtcagattaaacacaccactctccagcagataatcctgcagtggcttccccttactgcaaaattgagaaccagtgcctttgtcctgaattcaaggatctctatgttgggtctcaacagcttcattgttctgtctcactgttctccttttgaaaataacaaccttgccaaacgctgcttctcccaagaagactgcaccaatctcagctcccaaaccagaccctctcctcttctgcattcacaagagttcgtctgccttccgggcatccctctcattttgtcttgcaatatatgcatttacttatctttcaatccaccttccaaccctcacagtctaggcccttggagcatgagaactgatgttactttacttttttttttttttttttgagacagagtctttctctgtcacctaggctggaatgcagtggcgccatctcggctcactgcaacctctgccttccaggttcaagcaattctcctgcctcagtctctctcgtaactgggattccaggcacctgccaccacacccagctaatttttgtatttttagtagagacggagttttgccatgttggccaggctggtctcgaactcctggcctcaagtgatctgcctgccttggcctcccaaagcactgggattacaggcatgagccaccacacctggcggggtttacttatctttgtaatcccctgagtgcttgagcagatataacactcagtaaatgtatgttgattgacggcaggtcacaaaaaatatttttataaggatattattaagagatttgtgctcaaaccattcgtggaagttgtctgtgcaaattgtttaagctgttagggataggaattctgtagcctaaccaagtgagcctactttttaatttaaccgtgtttcaggacaaaactttcattattttggcaaaccaaagttgatttttctgcaatattactccttttctctaattttagctttaataaagttagaagctagttgaacaattaaattagaatataaaaggctagtagaacaatttggtctggataggaaagaatccaaagaaaacaaaggagactcggttttggggcaggcaggacatccctgggtcaaccttgtttttctacttaaaagcaagctcgtaggccgggtgcagtggctcacgcctgtaatcccagcactttgggaggccaaggcgggcggatcacctgaggccaggagttggagaccagcctggccgacatggtgaaaccccgtctcttctaaaaatataaaaattagccaggtgtggtggcaggtgcctgtaatcccagcttgggaggctgaggtaggagaattgcttgaacctgggaggtggaggttgcagtgagccaagatcgtgccattgcactccagcctgggcaacagagcaagactccgtctctaaaataaaaaataaaaaaattaaagcaagctcatggtttactccacaactcatttgacaaagctaccaaacagcttcagttcttcttgtcagataaagatgcatactcaggctgttaaaagaccatttgaggaggtcttccttatttatttcccctaccttactcccaaaaggatttgagttggctttatacaaatgcacacaatatatcaaactaaaacagacaaagagggcaaggggaagataaaagtggaatagtaagataaagacaacagtgaagttagttcatggaaatgaagaagttcatggagcttctaaatttggctctgagcctcctgggcaccaagtcaaagaagggaacacattggctacacatttcacagagtgtttaaaatcaaaacctagttccctagcacctgtgtgccagagactgcaccccacctctcagcggcggttctctttatttagggtcggttatctggtgcctgccgaggtgggccacatgtgtttgaaaccgtagagtagcaggggaaccctcagttaagcctgtggtccatctgcctttaagcacaatgcctattcttgacataagtcaacctagcaaggctggcttcaagaaagaactcattccccagggcagcatcacatgcaagatcttcagcagtggtcatggtagtgagagttgccaccaacaatgaccttagaaaagtcaaaagtggaaaaacagtctttaacctcttcttggcaattgacatcttccttgtttctgccccccaagaaaccatgatactctctggtactgaaagccccaccctgcttcccccagaatcctctgcctagtggccctggctccacattgcttttcttcttccccacatcttcccaaagaagatgacacatttctctctcagatagctattgggaggaaacccatgtaagtaaaatcattaatacaatcatgtgcatgaccgatatataagcctcccaggaatggattttattttttgagaatagctttttaacccacttaaaactctaattaactgactagaggattgattgagtaatagattgtgggtgtgggtagcacagagccagagactttttaacaatggcacttcctctggtgtctcttgaatgcctttaacgaccactttgtcatccatcaaaggccaaggatctagcaatttgacattgaacttctaaaaatttacaaccattgccctgatggtatgtgcaacagactggagtcacttaaaccagttatctctctaaacctcaaccttaattcattaaggggagtaacaatagaagttacttgaggaaatttggatatgaaagtcattggcatatactttctcttcccttttttctatcattcatcctccttcctttacactcttgttaaatgtaacaaccggtttcatgcttgaaatcgaacctccttggccaggcgcggtggctcacgcctataatcccagccctttgggaggccaaggcaggcggatcacaaggtcaggagatcgagaccatcctggctaacacggtgaaacctcgtctctactaaaaatacaaaaattagctgggcgtggtggtgggcgcctgtagtcccagctactcgggaggctgaggcaggagaatggcgtgaacccgggggatggagcttgcagtgagccaagattgtgccattgcactccagcctaggtgacagagtgagactccatctcaaaaaaaaaaaaaaagagaaattgaacctccttaaaagcacttttcgtcccaccctgcctgcagttgctctgtttctggacagtatagagcattgtctcatatattactctactgtccaccttccatacaaatctttcccattggtgttgtctcataattaaggctatcagcctgctggtaggctggttttgccaagaagttagatgtggggtactcactgcttattgctcaagagttattaggttggtgccattaaaagtaatggcaaaaccacaattacttttgcaccaacttaatacatggcacgtgccacctgctccatactgctttgtcctacatcaccttgccaatgggaatagaattgtcagcagcattcatcaaggggaaacaccttgtgattatttaaatcggttctatatactttgtgtattaaggcccaaattatgctttactttctcttatgtacagttgggtttcagagttgagcatttgggtaattttgagcttctcaataaataatttccaaattttgaatatattttaaaataatatacaatagtgacagagtgctttggttggacaaaccctcccaaacaataattatgatatctgggaaacattttttataaaaatgattatgagaaagttgtgaaaaataaccaaaagctttgagaaattagataggaatctgctgtggtaagactcactcatttgcagcagctttttgctttcgctcacttcccaatctgtgcacagtttaaggacagcagaaattcacaccgtcactgggttgactagtcagatgcaaacaacacattttatgcaggagaagaacaatacatataacaccttctaataatagcaaaggccatgctgggcatggtggctaatgcctgtaatcccagcattttgggaggccaagacaggtggattacctgaggtcaggagtttaagaccagcctggccaaaatggcgaaaccctgtctctactaaaaatacaaaaattatctgggtgtggtggtgtgtgcctgtaatcccagctacttgggaggctgaggcatgagaatcacttgaacctgggaggcagaggttgcagtgaaccaagatggtgccactggactccagcctgggtgacagagtgagactccatatcaaaataataataatagtacaggccagaataaaatggaataacatatttaaagaacagaaaggaaaaaaataattcattcactggagaattctatccaacatttaacaaagtaataataccagctttagacaaaatcctttagaaaatagagaaaggagaaatatttcacatctattagcaggccagtaaaaccctgataccaaaatcagacaaaagcattaaatgaaaagaaaattaaagatcactatatgtcatgaacatgacacaataattctgaacaaaatgatacatcatgataaagcaggtttgctccaagaatgcaaggttggtttaatatttaaaaatcaaacaaatgcattcctcccaaataacagaataacaacacagattatcacagtagacgcagaaaaagcatttgacagaacttgacactcattcatagttaaaaaaaaataacctctgaaaacttggaacagaagagaacttcctcaatccgataaagggcacttataaaaaatttacaactaatacctatatctattgttgtaaagataaataccttaagattagggaatatctgctctcaccatttttagtcaatatatactggaggtgttagccattgttataattgttgtaaggcaagaaaaacaaaataaaaattagaaaaattagaaacgaagtaaaactctccctatttgcagatgtcatgattgtttacttagaaaaacccagggaatcaacaataataacagcaaaaatctaaaactagcaaatgaattcagcaagacctcaagatacaaaatctataaagatatataagcataaaaatgtatatttctgtatactagcaggaaataattagaaaataacataatagccccaaataattttatttataacagcaacaaattataaactacttaggactaaatttaatgaaagatctctacatgaatgtaaaacctctacactgaaaactataaaataggccaggcacagtggctcaagcctgtaatcccagcactttgggaggccgacgcaggcagatcacgaggtcaggagatcaagaccatcctggctaacacagtgaaaccccatctctactaaaaatacaaaaaaattagccgggcatggtggcaggcacctgtagtctcagctactcgggaggctgaggcaggaggatgtcgtcaacccaggaggcagagcttgcagtgagctgagatcacgccactgcactccagcctgggcgacagagcaagactccgtctcaggaaaaaaaaaaaaaagaaaagaaaaaagaaaactataaaatattgctgaaggaaattaaggaactcctaaatgaatggtgagttatactatgtttatatacagggtgacttaatacttttaagatgttaattctcccacattctcaaatgcacataaaaatgcaaaagacctaaaatagccaaaacattactgaataagaacaaagggcttacctactgtggcaggctgaataatggctccctaaagatgttcatgtcctaatacccagaacctgtgaatatgttacattaataggcaaaagacattttgcagatgcattaagaagcttaagatacaagaataccctgggaacatgctagattacttgggtaggacaaattcaagggtctttataagagagaagcactaagattagagtcagagatggaaataagatgacagaagcagagcttggaatgatgtagtcacaagccaaggagtgcaggcaaactttagaaactgaaagaggcaagtaaaggattccttctggagcctcaagaaggaactagtcctgccaacaccttggtttttgcccctaacactcatctcagacttctgacctccagaaccttaagtgaatatattggtattgttttaagtcacaaagtttgtagtaatttgtactagcaagttagaatattgatatggctttgatttgtgtccccacccaaatcctatgttgaattgtaatccccagtgctggaggaggggcctgctgactggaccatggtggtggatttccagtggttgggcatcatgccccagtgctgtctcatgatagagttctcacgagatctggttgtttaaaagtgtgtggcaccttccccccatctcttctcttcctcttgctccagccatgtaagatgtgcttgttgccccttctgccatgattgtaagtttcctgaggcctccccagtcatgcttcctgtacagcccacagaattgtgagccaattaaacctcttctctttataaatgacccagtctcaggtatttctttatagcagtgtgagaacagactaatacagaaactaacttatctaccatataagacatatactctaatagtaatatagacagtgtggtattggcatagagatagtcatatcaatcaatgaaaaataatagaatccagaaatagagcctcacaagtacggtctattgacgtttcacaaaggtgccaaagaaattaatggggaaaaaagtattttcaaaatgatggtgggacaactggatatccacatttaagaaataaaccctgacctcagataatacacaaaaattattttgagatgaattatagatataaacataaaggcaaaaactacgaagtatgtacaagaaaacacaggaaaatatctttacatctttggagttggcaaaaaattactcagacaggataaagaaagtgaaaaccacaaaaaaattaacaaattagtcttcaccaaaattaagatattctgcctgtcaaaagacacgattaagaaaacaaatagacaaaccacagactaaaaaatattcataaaacatgtatctgacaaagatcttgtatcagaatatataaaagaactcctaaaacgcaataataaaaaaagaacagcccaatcttttaaaagggaaaaatgtttgaacggacacttcacaaatgaaaatatacacacataactaatagcatatgacaaggcaatcagcctcattactcaccagggatatgcaaatgaaaagagcaatgagatgctactatatatccaccagggtggctaaaatctaaaaggcagataaagcatgttagcaaggatgtggagtaactgggattttcatatgttgatgtataatgtggaaggtatatgttggactataaaatggttcaaccactttggaaaatggtctgacagtgccttatgcagagcacagagttacactttgacttagaaattccattcctaagtatttattgaaaagaaatgaaaacgtgtcctcaaaaaggcttgtacagaaatgttcatagcagcttttcttcacaacaaccaaaagctggaagcaactcaatatccatcaaccagaggatagataagcaaaatgcaatatttgcttatctagtccattgtattctataacggaatacaactcagcagtgataaaggaggaactactcaacagcaccgacaaacctcacaaatattatgctaagtgaaattagattcaaaaagtacacagagagttccattttggtgaagttctagaacaggcaaaaataatcaaggtgagaaaatgaaagcagtgacttcctctgaatgggggacgacacggagaagacatgaagagactttctggggaaacagaaatgtactctattgtaatggggtgtaggttacatgtcagtattcatttgtcagaattgtacagttaagatttgtgcaccctcttgggtagaaattttaccaaaaggactaagtaaaaattatttatttgagacggagtcttgctctgtcgcccaggctagagtgcagtggtgcgatctcagctcactgcaacctctgccccctaggttcaagtgattctcctgcctcagcctcccaagtagctgggattacaggcacccaccaccgcacctggctaatttttgtatttttagtagagacggggtttcaccatcttggccaggctggtctccaactcccgacctcatgatccacctgcctcaggctcccaaaatgctgggattacaggtgtgagccaccgcacccagcctatttagttttttgagatggagtctcactcagtcacccagactggagtacagtggcacaatctcagcttactgcaacctccgcctcctgggttcaagcaattctcctgtctcagcctcctgagtagctgggactacaggcgtgtgccaacataccggctaatttttgtattttaagtagagaccaggttttaccatgttggtcaggctggtcttgaactccttacctcaggtgatccacccgcctccacctcccaaagtgctgggattacaggcatgagccaccgtgccttgtctaagtaaaaattataataactggatgtaaatgtgggaggggaaaggggagagatatagatcaaacaagaatggcagaatattgataattgttgagactgagggttggctaataggagcttattctacccttgtccactttgtatgcactgaaaatttttcctaataaatttgttttaatagtgatgtaggccgggcgcagtggctcacgcctgtaatctcagcattttgggaggccaaggcgggcagatcacaaggtcaggagatcgagaccatcctggccaacatggtgaaaccctgtccctatgcatgcctgtagtcccagctactcaggaggctgaggcaggagaatcacttgaacccaggaggtggaggctgcagtgagccgagatcgtgccactgcactccagcctgggcgacacagcgagactctctctcaaaaaaaaaaaaaatttatgtataattccttttgactactataagacccactgaacattatctagtatttctaattagctggaggtttaaaatgagaaattaaatggcttacaccatgaatgtgtctctcttctttgatcattttcatttgtttcaatgttcaaaaacagaatagaagtcattactgcaatgtggtcttgagctttacaactaacatttcttcagagaatagacaaaagaattttggttttacttgaaaattcacaagcaaattgtgaattcactttagcaaattgtatgagaatatgtttagtaaactcaaaatattaaactgtctaacttaaaaaagttctactaaatataatacttaaaagtttaagacggatggctggttgcagtggctcatgcctgtaattccagcactctgggaggccaaggtgggcagattgcttgagtctaggaatttgagaccagtctgggcaacatagcgaaaccccatctctactaaaaatacaaaaaattagctggatgtgggggcgcatgcctgcagtcccagcaactcaggaggctgaggtgcgagaatcacctgagcccaggaggtcaaggctgcagtgagccaagattgtgccactgcactccagcctaggcaactggagtgagaccctgtcttggaaaaaaaaaaaaaaaaagtgtttaagatggaaattttatgtgtattttatcacagttttaaaaaattatgtaagtttaaaaaaatccaagtgaaggatgaaatgatttttttcttccacatccccaatatttatttttcttgctttttgaggtcacacagtattcactattacagttcctagaaataaaatacttggaaaaatatttcatataattgtcctcaagttcccaagaagcaaagatctgggatgccaatattcccttaaattttaaaacaaatgttccatgaacagttgattcatctgtaaacttcttcatgagtttaattttagcggcttgctttatatcagcctttttatttcataacttaaacaccccaattttgataggggaacaagaagaataaataggatgggttacacgtataaagaacactacagtataaattcactaaaacagtctttagagaaagaggtagaattgtaaaactggactttcataaggttctgatttggattttcttcaagtgtatacgcttttgtgctgcaatgtctctagctgagctattggggaggttttgtaatctgttttccgagaacatggtggttttagaaacagaacagatattcctccagggcagctttgggcaagcaggcagctggaacaacttggcagtcttggccagataccagggctagagcgggagtttctgggatgaatgaacagcccccactgttttctatccttgaatcacttggttggagacgaaaagtcttgagagaaagggtctgattgactgagcttaggtgtgagcctgcttttggctgctcggggtgacaggaagtatctgccagaaagaaccttcaggaaccccttcagccttcttggtggcaggtcagattgtttccatttactgaacataatggaggaaaggaaattccacaaaatgaaatcggctgctattgtagaggaagaatgaatgctgagtccacttctgagagggacagttgtccagaagggactttctgaatatggccacgctttacatccattttattttcatggatacacatccacaggctgctcaggtccaaggagatggccacgccttatgttcctatctatcacaatcatttttacagggctggacacggaagtagatcacgatgctttgggcggcaagtaacaggaaaacttcaacttaactggcctaatcatcacagaaatgtaatctatgttctggtgaaggtggaggagtaattctgagatggaattctgagatggaacaaacacagggtggttgattcagtggccaagtaatgttatcaaggatccagattgattccgtctttctgctctgccattctaagcgtgtcagtcactggatggctgcagcagctctgggcttcaaatcctcacacaccactctccagaggcagaacaagggaagtactgtgtctttgtgtcccttttttttattttttgagacagagtctcactctgtcgcccaggctggagtgcagtggcgcaatctcggctcactgcaagctccaccttctgggttcacaccattctcctgcctcagcctcccgagtagctgggactacaggcgcccgccaccacgcccagctaattttttgtatttttagtagagacggggtttcaccatgttagccaggatggtcttgatctgacctcatgatc

SEQ ID NO: 61422 - DNA, 474 bp, Homo Sapiens
gcacgagggtgcctgccagtagaaaatatttccaagtgtttaggtcagtgtgactccccttatgatcctgaaaattggagaaaatgcagttaacaccaatggggtaaatgccttctgatgtggtcatgagaactggtggtgggcatgagacctacagagaggttatctaacattgtgcttttcccccagtaggtgctttatagcttttagtggcagtgttttgcaaaatgagttatgacaattccataggatttttgtattgttttgtttttttgcttgtaataaggctagatcaatttttaaagacttatgttttcagcccctatagaaatgtgaatggttaaaatcttttaggacatatataccatttgtttttcatatactcagttttaagtttattttaaattttaaaaagcataaggaaccagcattctaattcacacacacacacaaaaagcatacctatttaattga

SEQ ID NO: 61423 - DNA, 282 bp, Homo Sapiens
ggggagagtgtcaccttctcctgcactgggagcagctcctacatcggggcaggttatgatgtacactggtaccggcaacttcccggcacagcccccaaactcctcatctatggtaacaccgatcggccctcaggggtccctgaccgattctctggctccaagtctggcatctcagcctccctggccatcactgggctccaggctgaggatgaggctgattattactgcaagtcctatgacagcagcctgagtggtgtcctattcggaggagcgaccaactga

SEQ ID NO: 61424 - DNA, 518 bp, Homo Sapiens
tgctgtaatatttccttatatttgtagagctgtttagaattcacccagtttgcaggattaaaacattttcaaatcttgaggaagaatgattgggttataaatttgcaggtgattaggataaaaaaaattcagcaaagcaaaccatttaagggagacaacctatgtatgtttttcctcactcctcatgactagaatagtgcagcaaacgctattattctataatagctagcaatggaatagtaagtgaaaattcacctggagtttcatgttaacttgagctgggctaaaagacacacttaaaagaatactgagttgtttaaatgggaatcctcggactaaagattatattcaatttaaaggattagctgaaaaaagtctaagtgtggctaggcaaagaggtttccagaatccttaaccacatctcagtatttatcctgccactgaggacactgctaacagaaactccatgctctgcgttaccctccaaaacatgttttctgtggtgtgcttctacactg

SEQ ID NO: 61425 - DNA, 502 bp, Homo Sapiens
ttttttagctcatcagctatcattaatgttagtttattttatgtgtggcccaagacaattcttcttcttccaatgtgccccagggaagccaaaagactggaaacccctgtttagtccctgcccttgggaaaaatggtttgagtgatcaaagatcagtgtattggcttttacttcttctttctagatttataactcctctcataaagcccatccatttgacaggtaaactgatctctacaagcctaactctatctattactcctcaaatgagtttgcagagacaaacttaaacctgtaagtggtggtacacatgttggattttcaaaggattccagtctctacaaaaaaaaagacattatcagaaactcgtcatcttagcccttttgtaccacagtaaaagacatgaggtagaattgggaaattacaaagaggctttaggagttattacattttggggatttataagatctttttgaaagcctctccatgagtgagagggaac

SEQ ID NO: 61426 - DNA, 126579 bp, Homo Sapiens
aagattatgcaaacaatctttgaaagattatggactgttctatgtccagaaggtactttgtataagagggattgcatttggggcctttctaatctaggatcagatgttttcaaaatgttgactctgaagaggattgaagtgccttgaggaagagcacaagaaatgtacaatgcatctttctggggtgagatcttttgatcatattttcttcagctgctactgctgaattagagtctaaagatactgttcttcttccatagagagccaaattcagtagggggaagcttgctaacaccggagtttcaaattattcaattagtctggaaacctgacatgtgtgagatttgtagcattcagtctatcttcccatggtcacaggtgaccttcccccaccatgtggatgcctgtttcctttgcaggctcctcctttccctgagctcttaccattgggccgtctcagggctcagggctgtgatcttctctcctgtctccactccctgccctggtcatcccatcccatcttatgacctatttcacctgtgcattggtgacatacattttcatttccatcccacatctccttcttgaatgccagacttgtttttctatcaccacttggatgtctaagaagcatttcaaacagaaaatgtccgaaaccaaactcttgtttttcttctccaaacctcccctgactacttcctcatcttagttcgtggccaatctattcttccagttcactcaggttaaaaaatgaagtcatccttctctttctatcctgctccacattcagtttagcagcagatcctttgcttttatcatcaagatatatctagaatccaacaacagcttctcaccaccatcctggttcagaccaccactatttctcaccagacctattgcaaaggctcctaatctgtctcttgtgcttgctcttggtcatcttcagtatatccacagcccattaaaacatttgtcaaggccaggcgccatggctcacgcctgtaatcccaacactttgggaggctgaggcgggcagatcacctgaggtcaggagttccagaccagcctggctaacatggtgaaaccccatttctactaaaaatacaaaaaattagccaggcgtggtgatgcacacctgtaatgccagctactcgggaggccgaggcaggagaatcgcttgaacctgggaggtggaagttgaagcgagctgagattgcaccattccactccagcttgggcaacaagagcaaaactccgtctcaaaaaaaaaaaaatatgccaagttgtgtcacttctctgttcaaatcccatcagtggtttcctattccttgggagtagaatcagagtccttgctgtgacttacaaggtgccacctaatgtgctctctccttacctctcactctgcctctctgcccttgctgctgggtctccgctctggccactccagccactcctgcctcagggcctttgcctgtgccattctctctgcctgaaagctcccctaccctggctgtgaatccccaggtctcacttcttccctccttcaaatctgcaaaaatgccaccttctctctcctttgattgccccttctgagattcaaccctttcaacagcctcccatcccctcttcccgctcccacattcatgtatcattgtccccagagttcacatcactttctactatactacaggactccattagttttattcgttgcctgtcttctcactctagaatgtaagctctgtgactgtggaaaaaagagctttgattattttagtcactgctgtcttctgtcatctagaaaaggcacataaaatgaatgaatagatgtatttgctattccaaagaacatcgaactgcatttaatgtaaaacatcatgcatttctcacccagtgcttaccaggcccatgccaggagttggggaatatcagtaagacattatccctgcatctctaagttcatagcctagtggaggcactgatgtacaaacaagcacaatacaaaatgatccgtgtacttgtagctcaaaatcagatgccctgggagcccagggggacactcacaacctagctgagttcggggatgtggcatttgtacttgtgcagaatgggagtcccaagcaaagaaaaagaatgcacctttaacaaagactgtgccatgtgaaaaggggcacaggtaaggccaagcgcagtggctcacgcctgtaatcacagcactttgagatgctgaggtgggcaattgctcgagcccaggagttccagaccagcctgggcaacacggcaagaccctggctctacagaaaataaaaagccggccatggtggcacacgcctgtcatcccagctactcagtaagctgaagtgagaggatcacctgagcccaggaggttgaggctgcagtgagccgtgattgcaccactgcctggatgatagagtaaggccttgtctcaaatgaaaaccaaacaaagaaagaaaaaggacccacgtaggaagtgtctctgggattgctggacagcaggagggacgtgggtgtagtggagggagtggctgggagaggcctggaaaaagggcagggataaggccagcttttcaggctgtttgctgtgctggtgagtttgtattcatcctgcaggcaactcggggcctattgagtgttttgagcaaagaaatgacatgattagattggtggcaggtaaatcctgtagcaaaggtgtgggggaagatgacaggtgacacattggaggtttgtcaggggcctggagatcctggagatggactgagccagatcgagggactcacccagctatcagatggtggctggactgtttttcatggttgaagccatgactggagacttaaattattttacaaccatcgagttaaaaacaaagaaggctggcgatagcaagtactggaaagagtgtaaaaataggtgaactgcacagatggtgggagaatcaactcttcccttccctttggtgagcacgaaggccccacctagcaaagtggaggatgggctgacttactgcaccaagagacgtgggcttgtgcataccctggggaaaccactcatatgtataaccagttgtaggtaagaaagcgatttgcttgaaatagcaaaataaaaaaactggaaacaacctaaatgctcatctgtaggagaacagataaataaattttggaatatacatcaaggaaatattatagaaagattaaaccagaaaacccgagatgcctatattaatgtaggtaagtatcccaaataagaattttattcctataatgtgaggaacttttaaaattatgattatgaaactattcatgctaccaaaaaattattaaaaaccatgaataatgatagaaaatgctgctgattttctatgagatcaatatagaatctacataggatgccatgattattaactgaatagatctttttttttttgggacagggtctcactgtgtcaccgaggctggaatgcagtagtatgatcgcagctgtctgcagcttcgactgatcatcctgcctcagcctcctgagtagctgggaccacaggcacatgccaccaactcagctaactttttttttatttttagtagagacgaggtcacagtatgttgcccaggctggtctcgatctcctggactcaagcaatcctcccgctttggcctcccaaagtactgggattataggtgtcaccatgcctggccagttgaatagacctttgatttggatttgcatcttattatttttagatgcctacatgaaaattcaaaatgccactaaataccatatgtgcttttgtaaaccaaataataatatcatgctttatatgaatttaggttcggaacatcggggttaaaatggaaaaaattttgataaaagttcaaatgttacaaactctagccttgactctgtccttcttatttccgtaattttgctcatatcctttaaacaacctgagacttctattattggttggtttgtcttaaaatgaagtcaggaatatctaccctgcctccccagtggggtgatgatgttgaggatcacgagatggtatcaggaaaggggctctgccacatgtaagtgccctccagcgcttgttactaataattcactgtctaaatgctttacttttttcatctcgtggaagtaagagatttcaaaataacattgtcactcaactgacaggtcgaaaacgacagtaaagcagcctggcttttctattcacagaccaaaccattagggtctgtgtcgttccagatccttgacgaagcgggtgccagggtgggactggacatgcaggagatgggtgaggaaagagcctgtgaggggaaaaggcctgaccctcctgaaagagagtgcaagggaggagggtggagcagaagcccccaggcagcaacatcatttctaaaatgctgccctccgaagagcctggcgtctcccgcacatgggcgccctctgcatccctgctgtgttcagtcattggtcagggcagcctgcagaggatggcctgcgtgtgggggctccagaacacaggatgggggccatctccagccgtccaaaatctacgcactacattttcacggctgtcacaacgtcatgaaaactgcctgtcatatttggatgaccatggttgccattatttttagcaaaatgacatattaaaagaatatattcatctagacaatataatctggaagtcaatgcctctctcattaatgtctcattattaacattaattatttcattatttaatgcccagtgtcctgctttatgttaaatgcattcctgtcactgacagaaacaatatgaaattgaccactgtttttagtgattatttaacattgatcttgaaattcaggctactgaaataatatgtgaagcaaaagctccagggatggctattttaaggagaacaaatggtcatttttttttaggggtgtgagtttatacctgtaaagtgtaaggaaaatatctagttatttgaattaatataagtttacaaagctaacagtattcaaatataaaatttaagtcatttaaaaagcgtctgggtttcaatgataatgaaaatataaactatccatactttaatcactaagtgcagaaagtatgtaataaaagtacaaaactttactaagaaacataaaagatttaatttaatctaccaatatgccatgttctttcatgagaaaactgaatattgtaaagttacattttatgttaattcatatatagtttatgatgttattaataaaatatcctctatttttctgttaattgacattttttcttacttgaaattattaacattattttaaaatattctgaaataatgaatagtccagaagaggtacatttcaagagggcaaagaagaggaatgaaataagattaatacgactgtattttaaagctaccataatgaacaaaatgtgatcctgactacagaaaaagcaatacatccatgaaactgcacaactcagagtaaattctggcacacagaaaaatctgatacatgataagggggaagcaggttaccagtaaggaagaagtatgttattcacatgcacccaaataaattacaaatggatctaagagctgatgttttcaaaatagtgctatcacatgctagatgggtgtagaaataatgtttacctctatctggctgggaagggtgagtaagcagggctttccaaaattaaagtgttaggaggaaccagaaagaatagttttaacacataaaattggaaatcttccattaacagccagatacacaaaattaaaaagcaaataacgcccagggaaaatatttgcaacaagtatgttagacaaaatcttgtaggccaggcacagtggctcacgcctgtaatcccagcactttgggaggccaaggcaggggaatcacttgagtctaggagttcaagaccagcctgggcaacatacagagacctcatctctacaaaatcaaaaaaaaaaaagcagcttgatattttagaattcacagagctcatatacttaagtaaaaaataatagcaagcttgagtagataaggctttaaagaacaagatcagacagctcacaacagggcaatataaattggctaagagaaggttgaaaatgtaccgtcaggaggtgcaaagaactatgggaacactcaatgttgttgagtttgggggagaagaacacttgcatggatcaccagctgggtataaattaggcccttttgtaagttcacttggctatgtattcatagcctttcactcagctatgctcattcaggccataatatttcttacacaaatgaagcaaaatgcagtacacattttgtgtgtgtgcaaagatgcttctccacgattatttaatagcaaaaatataaacaatctacgtgtccaaaatggtatcaaaaaactaaatggtagtatgcttataaaaggcatccattaaaatttatgaaactatgttagaattttcaatgaattccagttattaaaattggaatataaaattgcgtatacaatatgtcttaagacaaaagaaaaggaaaaacaaatgacaacgaggaatctaccaaattggttaacagtggtagattctgcatcatgagtgtctttttttcttctgttttctgctttttatagctttcagattttccacagtacgaatgaattatttttgtaataaaaaggaagaacaattaatgctctgtttaaaccagatgtgagatagctgctgtaccttaaggtcaagagacatttaatttgtattcgctttctggtaaattagatacgtttccggtgttgagctctctcctccttccctatgttgaagtctttgcaatcagctgacaccaaataggagttcatttttttggagggatgctttacaccataatggctttgatgagtctcctaagatccattgccatggaaaatatttcttaaacgatagaattcaaaactctgtttaaaaagagacctctgccattatcattagcaaactaacacaggaacagaaaaaaaccaaagacagcatgttctcacttataagtgggagctaaatgatgagaactcatgaacacataagaagggaacaacagacactgggatctacttgagggtggagagtgggagggggaggggagcagaaaagataactgttgggtactaggtttagtacctgggtgatgaaataatctgtaccacaatcccctgtgacacaagtttgcctgtacaacaaatctgcacaggcacacctgaacctaaaataaaagttaaaaaaaaaattaatgggctataaataaataaagcggcctctgattcaagcaaaaactagttaatggatggtaaaggaaatgggtgaaattttgagaagtaacagtatatttatgtaatttccgagtgtctctccacaagatactcattatttacaaaggataaaatagtgactttacagtggagaaatctgacagacagcaccttaaccaagagttgccatcatcagtgcagcttgtattgggttggtgcaaaagtaattgtgggtcttttttgccatacttttgatggcaaaaaccacggtaacttttgcaccagcctaatacctcctgttacagggcattgagggttcatcgtggcttctgtggctcctgctgaagtcagagcctgactcttatcacaaggaaacatcaggcaaatttaaagtgggcagtattgtacaaagtaactagcctatacccttaaaaaccatcagtgggctgggcacagtggctcacgcctgtaatcccagcacttggggagaccgaggcgggaggattgcttgaggtcaggagtttgagaccagcctggccaacatggtgaaactccatctctactaaaaatacaaaaaattagctgggcatggtggcgggtacctatagtcctagctactcaggaggctgaggccagagaatcacttgaaccctggaggcagaggttgcaatgagccaagatcgcaccactgtactccagcctgggtgacagagagagactctgtctcaaaaataaataaataaaaacaaccagtgtcatggaatacaaagaaaacaactgaactcaatataacacaagatcttgcatcttggatttttctttttcacaaaggacattattgagaacattgatgagatctgaataaggtctgtagattagataataggaccatgttgagattaatatcctgatttttataattgtactgtaggtatataaaagaatgtcctgtttttaggaaatatgcatcatagtatttaggagtatgggagcatcctgtcaacagattactcttgaatggttcagaaaaacatgacacatatgtatgtataaatatgtatacgtatataaattatatgtctctcacatacagagagacagaaaaaggaaaaacaaacagcaaaatgtgaacatttggagaatctgagtgaaatatattagggaattcattgtcatattcatacaacttctctgtaagtctgaaagtatgccaagatttaaaaaaaataaattaaagcagaaagggactgttggttgcagctcttccaagcattagcacatcatcagggccctccagctcctgagtttgacatgcctttttcaacactgaatcctctgtctgttctgtagggaatagatgctatgtgtctggtgctattctttagtcctctgcatttattttccctccaaaatctgttgacagcactatgaagtagatagaattctaattctcattgacaagtaagaaactaacatttagagaggctaactaacttccataagatcccacagccagaaagtagcagaatgagacttgaactggggcttctctacctccctctgcacttctgtcctttccacagctgggaatcatatgtccctcccatcacagccccttgaatgtaagtctttttttctgggcatttacaaatctgaaagcatccctgttggtgttttcacatgacgtggattcactgaattgatttccaccaaggcatgttatctgctttgctcagtgtgctaccattaaaatcatgttccaccttagaattcctcaaactattggatgccagttagggaacttagtgccttcacggagactcactgcttgccagctaaagagattgaaaaggacccaagatagtagattcaaggtgactatgtagaccttggatggtgccagagacatacttcccctggttttcaatgcttggggtgaagatataggaattcagctgtgggcttataccagtaacatagatcctcagctgtcgtcagcaggaaccaagtcccggtggcagcattgaggagggcacacaaaatgtattctgacataagaacctcttggggccaggcgcggtggctcacgcctgtaatcccagcactttgggaggccaaggtgggcggatcacgaggtcaggagattgagaccatcctggctaacacagtgaaaccctgtctctactaaaaaatacaaaaaaaaaaattagccaggcgtggtggcgggcgcctgtagtcccagctacttgggaggctaaggcaggagaatggcgtgaacccgggaggcggagcttgcagtgagctgagatcccaccactgcactccagcctgggcgacagagcgagactccatctcaaaaaaaaaaaaaaaaaaaaaggaacctcttggaggaatttgatcccagagttgacagtaattggagaaaactgattgtaaggaaagagcttggaatttcaatgaaagaaagaaaccagcaaatacaaaaagaaaaagtagaggacctggttgattgggatagtttgaatgggccacaggaaagaagaaagacatccttaaatgcaaccttacaagtctctatttgtgccagaacccgtcctccactggtgaactataagaaccctccttcaaagtaggtcaatttagggaaaagccaagtgctggtggcataaaagaatcaggacatgccatcttgccccgagcagtggaatttaattcagaagaagagtagaaatggaggctggctgtgcaactgcattagcttgcttttgctggttatgctgtgaaataaatacccatacaatctcagtggcttccacaacaaaagcttatttctcactcacatcacatttggctgtgggtcagctgcagctttccttcctcttgtggtttgggctcagatgtgcttctgaagtgtaggctgaaggcatagcccaatctagaactgaacatgatgttcttgcgggaaaaggggcagtagcaagagggatggtgaaactcatgatacctcttaaaacttcttgcttacagtgaacatcacatttaattggccaaagccagacctccgctctggaatgtaaaataatcctctctggggagaggaggcaaaggactctaggctttcaccatctccagaagagagaagactttatatttctccagaagtctctatctttaggatagccaataatcgtcctttaacccatgtgcctttgctcagaaatcattaacaccaaaaacacaaaaatattcatggaacattgtttcatgacactcatgctttttaatattctgattactgtgtttagttgtagagacccagttttcagagttgtggagatgagtgcccctctggctcatagttctcagcaggcacatattctcctttgactgacatatagagactggatccaaaatctaacttctctccttctccctagctggttgttactatctcccagaacctctatttctatgttcaatatcacatctggaaactcttaatgttttcatatatattcaatgtagaaacaacagttactaaaaaaaatcacaatttggatattataatttttcttgcctcattagccctccatatcctatcaccaactaacataatttatttagtctccaggactttttagattctattatggtaaagacaagagttgaccacagacagtcgcatatatccaagtcagtgcatgcctatgggctttaatatatttatgttgaaagatgctgctgtttgcttttcaatgtcttagacactcatgtgtctgtagaatcttaaaatattatccagtggaaaaatatgtaattggaaaaggtggtggtgcagtccatttagcaggccgatgatagattttcctggatgcctctccttcccccaaataataacttccataaaaatagttttatgaaagcttccaaaatggtgcaaaataatacttttgtggaagctagaaatagggatcggtatatctgactccacaactgatttccaggataaaggtgcaactggactctgaagatcagcccagacctctgcctacctgcacatttcacctgtcctcagtagctccaggcctgcaccagtcagtctcaaagcctccacttgctcctctcttcctgtgtttattggagctctccagttcccaaaaatgcagcaaagctggaagtaggtatagcaacacaatgggcataatagaagctgtgatagcctcaatagaaaaaggcagattcagagagagagaggcatggaaatagattgcagcttctggtacgggaaagataagatacttcatatcatccagaaataagcttcatcgcaggtagcgagatgagcaggtgaggagcagccagcttctctccacagtctgcaagagcagcgtgcaatatacgggttgctaaacaagcaaaaggttatccacagactttacaaattacatgcaataccgccctgccagtgacagctctcttctgtctacaattctgccaaattctcaccacccacacctctcccaccctgttcacaccaccgtgtctggcctagattcttgcaaggtctcccaacttcctccctcctcatccttccagtgtgttcctaaagcagcagccagagagcccctgctcgctgccagccagatcatgtcgcttccccactcagggctcaccagtgacttcccaccttgcaatgtgtgaacaccagagtccttccagtgaactagaagcctaacacaacccggccccttgtgacatccccagctttatttccttctgtcctcccctttgttccccatgttctggccacactggcctctgcagatgctctcccacctcaggcctttttttttgcctggaatattcttcccttgggcaggaatggacacttccttttcttccttcaggtctttattcaaaacctccttatctttgaagcttttcctggagacccagggaaaccttcatctcctacccacgtcttaacatttcatttctcatttgttatttcttgaagttgcatgatctctaacatgtgcagtttacttatttattgtgtttttggttgctctctttccctcaacacgagctccacagccagggcctgtaggctgtgttgctcactcacgtattgcctgatccacagtgcctggtatgaagttggcccaccacaaacatttgctgagtgaatgcatgaatgaaaagccccctccacatgaggccctgaaaggaaatatgtgcacagcaaatgaaataaatgctgaataaggtcgcctttcatgactatctgggtccctgtgcaggcctctcctccctatctcattgcctcacaatagtgaatcaccagcaaatccggccaatcccctgccagacccgtggtccagacccaagtcttgatggcactagtcccttggaagccagccagagcacacctggggctggccaggtcaggagagcctcccctggaactggcagagccatatccaagggagcccggagctctgtccctggggaccctgcaggaagaagtggagttccccggcccccacacccatcaccttacttggggtgaaatccacagagagtaccccctgctctgaggagtggccacagcaggaggaggtttggccctccttgatgggggacctctgtcctcccagcctgcacttcagaccaggaaaagtgtttaaagataatacttgggaacaaatactagactgataaaagacaacagaagggaataagggactattattctttaaaactgcggaataagagaggcatccttggcccaagcctatgataatttcagaaaacattttgaactcaagaaaaagaaaacatggactaccaagcagccaggactttgtgtgagctacatgaggaaatctatgaagattcattttaaaaatgaaaacaggaatttaatccatacagagacatggtgctcctggatgggataacttaatgtgcaaaactttcccatagtcatttgttagtttaatttaatcccactaacaagatacgtgaatctttatgttctggaggatggccagtgggtctcagtattgggctctactggcatcttggtggggagtcctgagtgtgggcatgggtgtgggtggcattctcctacacacccagcacactcccctgggcccacagtaaccagctctctggattctagatggataaaaatgcaagcacagctaagagaacttatttcaaaaattaatgaagtgccgggcacggtggttcacaccagtaatcccagcactttgggatgccaagaggggaggatcacttgagcccaggagtttgagaacagcctgggcgacatagtgagactccgtttcttttatagaaatgagaaattaaaattaatgaaggaggtacctgtgctacccaatgtgatatatataataaatatacagtaaatatgtttatatgcactagtccgtgtatatacacacatgcaaacactaaaacttcatgtgtgggcatatgaatggaaagagcaataggagtaaagtcctgaaatagacacaagttaataagaaatttcagatattatgatatattaagtgattacttaatctatatcattatttaagtaattactaaaattattaagtgatttgggaaaccattcatgggggggaaaagctcaaatgaaatagtgtgaattcaaagtgtctgacacaggtgtcagtcaatttagaaagtttcttttggcaaggttaaggctgcactcctgacggtgtcaggtcctgaggcccaaggtggttggggtacagctttcttttgtacattttagggagacatgagacgtcaatcaatatgtataagatgtacattggtttggtcccaaaaggtgggaaaacttgaagcaggaacttccaggtcataggtagataagagacagaagattgcattcttttgagtccttgatcagcctttcgctgaatactcaatgtagtctggctcggtgaatctgcatttttacataaacagtagggcagaggaagcaatcaaatatgcatttgtctcaggtgagctgtgaagattagctatcagtttacattgccagggtgaaattcaacagaactgttttagggtaaagatcatgaggcccacaacaaatttccttgtgggcacattatgagggagttgtgtagctttttaaaaatctttgtagctgccttatttaggaataaaatgggaagcaggtttgcctgccatagttgccaccttgagttttcccttggcttagtgatttgggggtcccgagatttattttcctttcacaatagtaaatgaaaccaaaaaaaaactaactatacccaatgattaatttcagaaagaagagactataaaggtaaagtgaaaactagggaggagaaggagggagggagggaggaagcagggatgggagggagggaagaaagaaaaaaagaaggaaggaaggaaggaagtaggtaggtaggtaggtaggtaggtaggtaggtaggtaggtaggtaggtaaagtgtgactgtttgcctaatggaagctggggcttcagaggttctggggaaaagggacattgctgccagtgtcttaaaggtatttctgaccaaaataaaatgtaaatcactggagaagacctgcctggagccctcctcggctcttaaatggaatgctgtaacatcttgttgtgtgttcagctcatctgttcggtgtgtctcccctcctgaagggcagggaccacactaatctttgcagagtggaccactgagcattggcactctggagccaggtgcctggctctgaatctgcttttctgctccttactacttgcatgacattgggcatattacagtgactctccatgcctcagtttcctcctctgtaaagtgtagacagttataggaactgcctcgctagattattgtgaggatcaaatgggttaatatgtgtaaagcaagatgagcatttaccattgtatctgcagctcccaaaacaatgccagctatgtgggagacagtcaatgcatgttgggtgactctgagcctgctttgctagataatacctctccaactccctaagaacacaagcaaaccacccctcaaggataactggtgacagattttgaaaatagaggcagaaatgcaattcaccagtctttcccccccgccgcccccacttggagcctgcaaaagcgctgagtaggacttagtctgcttgcatatccatgacaggaaagttaaatgagatactgaagccgatgggagagggcccttggttgctcagggcagagtgaagcctgtatcctttgcataattctgccccatcatattgctttttgtaaaaggaaaatgttttgatagtctgtcactgaaatctgtttttaatgaaaacaccctaggattagctattattcttagaagacagctctgttgtggagttattcaaggatggagttctattacgtgtgtttgcccaccacagatgtgcctcagatgaaacatgaaggttagggaagaaagcaaacagctctgggctgagcagcaataaagcgctgcattgggagggatggcactggtggggaggggtcccagctcatggccatgatgctggcaccagagtgggtgctgtccagaagctgtccccatccctgttcttaccaccttggctccaggacccagcttgacttctcatgtgacttttccctctggtgctcagaaattggagtctgaggagtaaggcctggggaggaggtggccacacccacaggtggtcatatttatgttgcctggtatggagttagaactgttcctctagggacaaactggatctttggaccagtctatctacaaacaaggatggctccctcagcttgggaagaaagtgtcaaatgggaagttagggaacgtggaagtttaaagtgaagccatctttatgttctccctgtgtgtcattgtttcgccgtatggatatgctagagaagtgaaaaaatgtatgaatgaatgaaaatgaaaaatatatgagtaaaataaatatctttaaaaaggaatagcccactggctataccactaagttcatgctcttcaagtaaagcctggactatttgtcaaagccttttttttccctctaatgtaagagggtttttctgtcatagaggaggggcctgggaatttggaaggcattgtaagtcattgctgacaggaaatgatgctattaggtattggatcataaagagacctcctcccaggaaaatgaattcagtgacaataacaccataatgttatataacagtaaattttatatctcctgaaaattgatgttggatcaaaacaagggactgaaagacaatagattgggacaaaacaaaatcagtcagaccccaactcatgctgatggaatcaaggtcacaaagtttaaaacagaacttccaacgtgagaccagacggccacgtttttggcctgctatccagtctggctgatggctgatgaatatttgctgtgacatcagccaaaagggagacgatctagtgaaactcttcatcccacctcttgggctcttgcaacaaagaatagttttgttaaattagcaaatgtaattttctggtctctaagaagaagcaagttttaaaaatccccttcaaaatatgtgcaactgagcttactttgtctttgcaagggtgtctagtgtgacatttcaggaattaaccacatatatgggaatgcacacacaggctttcccttccttcatgtaccgggttggttggtctgtcggcaaatagttattagatggcgcacactgtgctagggtctttgccctagagggcaaagatagaagaggcgggccgtaaatttccttgaggggtttggggtcactgaaataggaattgtatgtctttaaatatctctacagcttggcacctcctgctggaactcaacaaatcctaaatgccaattgtccatacttaggacaacttaaaataattgacagtcacaatgatagtcttttgtgaggggcacttgccccagctgaccagatttctggggatgtcagatacacccacttaaaataagtgtaaattatttttaaatatcacaagccccctttgaggaccagccactccagggcttcttagctgtgatgcgctcttacagccccagacctgtagggacatgtccctcccagaaggcggcacactggctgggcctctctcaaaccaccccataaaaaagagaaccttacccgaaccaggacttctggctttcttctagggtggggttctgagtgacctttcatcatattgtttgtcgtccgtatggcttggcttttcaaaagcaaatgtactttgtttctataattaggaaaaaaagttttttttaaatgtcatcttttgccaggcacggtggctcacgcctgtaatcccagcactttgggaggccgaggcgggagaatcacgaggtcaggagatcgagaccatcctggctgacacggtgaaaccccatctctactaaaaatacaaaaagccaggcatggtggtgggcgcttgtagtcctagctactcgggaggctgaggcaggagaatggcgtgaacccgggaggcggagcttgcagtgagccgagatctggccactacactccagcctaggcgacagagcaagactccgtctcaaataaagtaataataaataaataaatgtcatcttttatattgctagcttttatgtattccacccatgaatgatcttgacctcttcctcaaaaaatcctccacttatcagacgacagaccgaatgaaagaggagggaagcaaaacaatgaaacaatttgttttagcctatgataaatcacagtatggtctgaagggtaacgtgctttctaatatttggtttttaatcttagttcatttgggtagggacagataaatatttgcccaggagaaacatcctgcttggttcatttgatttttaataatcctaactctactcaggtgacctagcagctgtggcagagcatcaggcctcagaggtggtgtcactgccagtcagcgttgatgagtagtgacaggccgtgtcagatggttgattcacagggctttagagaggtgccaggggtttgcagggcataagcagggtgcggcagccaggacctatgaagaagtggcctcaggcagggctgggcctccaacaccgccctgctctcctattgctgtgccacaagggtctgcagagggaccctccccacgtgacttcctgctgccctgtgccgagcactcctagaggattttcctgagggtcatggccacttgagtccaacagaggaactggctgtgtatagctgtgtgtaaaccagttgtgcctttgaaggaagaatcatctaatctaaggttattttaaagtagtactttgtcgattcctaatactgtcccttgccatttcctggggatttcctctacttgaaatctgtgcactcattcgctgctgtcaggctggatcccatatggcagaagcaaggggccgtgcagatctgtgtagctgaaggtgggctgcgagcagggagtagaagcactcatcagatggcttttgtgtggacaggtcacttggtccccatctgattccttcatttccttgggctccagtttattcctgatgaaagagggttccatccaggttctctttggtggggtggggtaagcttccaggagctggagctggatcctttttgatccccattcactttctttatgaagtctccacttctgctctcattctttttttatttccagagtcaagctttgcagttaaacaattagtaaactgtaaagaaataatttacagtaaactgtaaagtgaaatacaccggtatccccagtactaagtgctaaatagataatgtctaaacagcccatttgagtggtcttttttcctcttctttttactctcctaatgtatgtgtgtgtgtgtgtgtgtgtgtgtgtgtgtgtgtgtgtgtgtgtttaattaattggatcaatatttggcttaggacagtgagcacaccctataccaggctctgtgctaagtgctgaggatggcagccccagctcccagagaattctgagtcaattttgcaagatagacattaaacaaatatatacataaacagttcattagaattatttttaaaactgtcaaaaaataataactacagggtactattcccaggcctctgtcatgggggaaggggaagcacaggggaggccaaggagtggggggtgtggaggaagaagggctgacggcagctcaggtcaggcagcagggacagcacactgacatctccaaggaaggggtaaataagtgcctctggagactgtaggattcccaagtggccagagtgtcacaggtcaggaggagggaggcagcagtgaggtcagggaggagggaggaccagatccactttgcatgtttgtataaagtaagtctcaaactggtatttagagctttagcctaaaggaagtgtgaagccactaaaacaaggaagggcgacatcaggtttcctttttcaataaagtgttctgtccattatggagactgtattaagagcaaaggtgcagacgaggaggccggttaggctccatgggagttgagtgggagagggaggtttggaccacgctggaggaggcagaaatggtgagaggcagatgaattctagaaccgttaggaggtaggagcagacgaactcagtgcttggttggacaaaaaggatgaagaaagaggactggagaaagaaagctgtccaagttcctgacagggagctctaagcggcagaggaaccatgactaaggctagacttttaagggaagcttgggcataggaataaagatcctgagtttttcttgcatggtgcttgggtggctgcgcaaagctccagtggatggggactgggtctggacatcagatgagtgctctgacctatcacagaaattggagagttggcgatgttcacatggtaactaaggccagaggcagggacatggccctagtgtgttccttcttgcgtcttttcctagttggaccttctccaaggaggaaggcagtgcaggggagcctgcagatggggcagagctggggcagcctgagaaccatccaggaagccagtggctgtggcagggagcgggaaggagcaagggtgctgcacggtgtgcgtcaccactgagaagtccagtagcgtccaccagggcgttggacacagagcaggatctcagtacgtagatgttgaattctctccgtcttctattcagatctgcttggaccagggttgagaacataatctctgcacccagaatgcaagcttgctacttgtttcttacacgacttcatttgtcagcaaagcttcaggtttcatcggggtttgggaatgctgacatcatagactgcttttttctggaatcaggccacattgattattttcatggtgactgtaactcccaaggaagatgaggttataaaatcagaataaagacgtatgaaccaaaacaatacctggattaagagggccctgacagatgatgccgtcagcaactgtcccatgcctggcatctctgctcaagtcctgtatgctaattttggacatggtagctctaaagtgccaatggtgagaccagtgatgccaagtttattgtggtgacagtcactccgcaggacaacaagtggaaggggatggcacttcttgagtctttcccatctgagtaaatgcctgagggagtaagggcactgaaacaggcagtgaattttcagcagtttaactgtagattccccttcctttgtggttgagggagcttcaggagtggatcatatgtgaggatgcttttcgctggccttctcagacggctgggagagcagaacttctctttccccacaaacacccacaccagatccttgtttcttgaaaaagaaaaaaaaaaattctaggctcatgagtctcattccttaaattaaaatttaaaatcaaatcaaattacttatggcacagaataatgttgcttgcaactttttatccactttatcaaaatgagtgtggtccttgtgtgatttttccttttgcacgtcggttgcccaggccaggtatcttggcgggggtgggggaaacaatgttgtttgtgtgggtaatgttgctgattttgtttgcttgggatacacgctaagttaacctcgttggacttttccccaggaattgatgcgcgtacacgtggtgggtcattatgctgctgcacctgtgtagtgtgaaggtcagtgtgcttttctgattataagaaaccatccatgtcattccattataaacccactccactcataatggaatgtgcctcagcctagggccattgcggttgcccagcccaggaattatctcaagtgtggctggacatttgagatccatcaccctccctccccaccacctgcatccaccccagaattcgactgtgctccattttgagatgatgtttttgcatgtggagtcctccttgtgtgatgtgaacgtacagttgttacaagtgaatttgtacctggaaacattctatgatgctacttccagaattacagctgagagctccgctgtctatgggtaattgctgtacagttgatatggacagacagaaataggccttgagacaagagcaacagcttctcctcctgactcagagccaggccatcctctgggaggctgatggctcattaggatgggctcttgcagcagggttgctttccctggaagtactttccaccagctccccaagacttcctgccaatggtcctccttcctctgtgtcatggttttacttttggtgacagcccaggtttacagtcatcacagctcacatttactgggcaccatgaatcatggtttgtgccgaatgagctccccatgagctcctctcctgagaggtaggtatgatcattgtccccatttgatgtacgagggaactgggtcatggagggttgagtggctgctctgaagtctcccagtgggtaactgaggagcattgattcccactgaggtctgcctgtctgagctggagtccatccactgggccctgtgctgctcgggtaatactcagccaatcctgatgtgaggcttttctctaaaaaggaaataaaagcccacatttgcatagcactttgcaaatttattaagcacatccacatgcatattcagctaatccttgaaataaccctgcaagaaggagagggacgccctgagatgttcagtgtgtgccttggtacgcgtcagcgggcgggaagatgaggccacgctcacatgcagaggcagcttctcctctgccacagggccctgctgcctactcatgcagagggcagctctcttaattcacaagttctgcctaatgcacttaaagaatgagcatagcatgtgttggattaaggaagcattaaattaatacttaatcctgtgctgccaaacatccaggaacagtgtcagcacagtcacttaaattcccctttatctccttgagtatcccagcttggtgtgcgctcaggagccacttcctctgtaccattttcacaactcagagctcagcaaagccttgatttccccagttcactcagcttactccaccctccagccatcccttggggaaggcgttaattttgctaagagaaagtttccatagcactcagtctgtttgcattccccttggacttcggtgttttctctttggctttaaagatagaatgagaagtagtttttaaataccaagcagttccttctgagtgcatttcacattcaggaagaatgccgcctctttcttctttccaggactagtgtccttgggaagttagggcttctcagtcctagacaatctcagctcatggcatcttcagatacaagctttgccttgaaataaaactcctggaaccaaacagcaaagccaaatacgcacacagatcatcataggggattttattcagtgatccaggaaacagaaggccaagtattctcccctgacatttatgtgagtgagttctcactgggtaacatgagagagaagactgggatcccagctgatgctgtcaaggacttagcttgtgaaacaaaacatgagcatcagtacagcctcctgcaatgacacagggaacctgaaaggacaggatgcagcaaccttatttccaggtttcctggaagttaaatgcaaagctccttaccccgcaccttactcagtaaagggaatctatggccccataacttctgtgctttcatgtaaatcttcaaaattaaaaataatctcaaagttccctacaccttcccctaatattttataagaagattcatcatgctctgaaatgagtctgcagcactactaggtggacttatgaaaatatctggaaataagctctggaggctaaggcaggaggatcacttgacgccacgagtatgagaccagcccgagccatagggagatcccatttctatgaaaaataaaaaaaaaaaaattagctgggcatgatggtgtgtgcctgtagtcccagctactgaggaggctgaacagggagaatcgcttgagcccaggagttccaggctacagtgagctaatatggcaccactgcattccagcctgcgtgacgtagcaagaccttgtctctaaaaaagaaaggaaataaactagggatcatttaattgaccacttaatgtattttcagcttctggaatgatccttagcaggatgaatgcttatctctgggagaggctcatacaaggaagaattttatgctataaacaccggttctcaaccaggggtacatcgcaaaccaccaagtctagctctgcacgtgaagcctgtgtagttgcacactgaaaaggtctctaggtaattctggtatgcactcctggttgagaaacactagctagacctgacgggaactaagcctttccacatctgtgaataagagaatgagaaagaaatctgtgctgaagatctttatgctacaaagacaagtatcttgtcacccaaagatggctttctaagcctatcaaaggccctctgtggagaaaaaacaaaacatgcattgcaaatgactggcatctctgtgtctgttaggtcccctgagagggcaagagagaactaacgtttgtgacagggaaagggaggaagtggaattgtgtgggggctgcagcctggcagagcctctgccagcccagtggactctcaggagcaaaaactgcctgttcagagacccagtgttgggtgggaatggctagacccctgcatccccaactagcttaatgttaggccaaggcaccctaaagagagcctgagcacccctccatacataggtggagtggaaggagttggtggctggaagctgtcagctgacagcatcctgacaactaggcaatgaatctgttcttaaaagagaagcacagctccatgtctgctatactctccaaagactagaaaatcagttcctctgggctgttcagagtttagctctgttttgactacaatgccaaggtgtgatcctttggtggaatttactgccttaaggtagaggaatgaagggaggacaatggaagaaatatgcaggaaaacttggttcatttgatttccttctgtttagggcatgtgctagatggcaggacatggaagaatagggcactaaaatttgagggatcataacaacttctcatgtcgaaagtgaagcccagaccaggcacagtggctcatgcctgtaatccagcactttgggagggggatagcgggaggatagcttgagaccagtctatataagcctgggcaacatggtgagaccccatctctaataaaaataaaattttagccaggcatggcagtgcacctgcagtcacagttactctggtggttgaggcagaattgcttgagcccaggagttagaggctgcagtgggctataatcgtgccattgcactccagcctaggcaacagagcaagatgctatggaaggaaagaaagagagagagagaggaaggaaggggagagggagggagggagggaggaaggaaggggagagggagggagggaagaaggaaggaagaaaggaaggaaggagggagggaggaagggaaagagaggaaaaaagagagagaaaaaaagaaaagaaggagggaaggaaagaaaagaaagagagagaaaggtaagaaggaaggaagaaggaaggaaggaaagaaagaagaaagcaagcaagaaagggagggagagaggaaggaaggaaggagggaggaagggaaagaggaaaaaagagagagaaaaaaggagggaaggaaagaaaaagagaaaggaaagaaggaaggaagaaggaaggaaggaaagaaagagagaaagaagaaagcaagcaagaagggagggagggagagaggaaggaaggaagggagggagggagggaaaacaatggagagagggagggaagagaaagacaaaggagaggaggagaggtgaggagaggagagaaagaagaagaaagagagaggagcccagagaggttgtgtgtcatcagagatcacccagagatcgcagggctgaggtggagccccagggctcctgacagcaacacccctctcctgacacagaatgggcattgttacatcagtctccttcaccccatactctacacaataaagaaaatctgtggctccagaacttttatgttcttgcttaaatcttccaaactgaaaacgatcctgaggttccctacaccataccccgccccaccacatccttcatctagacacatcctgggtctagaacgtatcaggagacagaggtgtagaaccacagccagcttccctaaacttccactaatctccggcttgcttttggttataatgttgtgcagatataaattgacaaagtcatgagaagcctctcttctaactctgcagtttgtcatcctgacaccaacagaaaatcaggacatcattaattctctacacttattgatttggaacctccattgtaaggccggctgctttactctccctcctcctcctcctcctcctccttttcctcctcctcctcctcctcctcctcctccttttcctcctccttctcctgtccctcttcccccatctccccgttctcctcctgtttcccctccccctcctcatagttttcagggtcggagtcctaggccactctattgcaacagctaccaaagagaaaggggctgaatctgtgtgcatgtgaggccacaacctctagaccccagtgacttaggggcctccctgcctcccctctagctcttcgccagtcattgcctgaactcggctttcctggaccttaggggataaatagtgtggtccagcactgccctgggtgagctgagtcatgcccttggcagggtcgaggagctcccgtgaggagaccaatcgcctagcgtgagtcttcttccgggattgctcgccctctgccccctaggtgccgggcgccgcccgtccccacctccatcagaactcgggtcatctgcggagccttggctgcggcccggtacctgggtgtgactccgccactaacattttcccagcaggaagcagcaagctcagcacagaaataaaactgtcctggtgagtcgctcacagcctgtcccagtaactgttccggagcgtcagcctgacgcagcacccctgaaggaccacgccgtgcgggctgcgagcctcgcccttaaccatgcccagcaggaccagagctgccagcacaaatgaaggtcctggccattgaacaacttctgagcctgcactttaagaaggcgctcttgttttgaatacgtagtctgtcctgttctttcaaagtaagtgcttttatcaagggcctggactgtcttttaaacatatttttttctcacttgtacattaaagggaaatgtatttctgtctagaaaaggagaccgggagaggaatgagactgtgcggtattcaggcttggtttaaactagggcatgcacactgcatagctattttcttcaggcagcatgtggccaaaaaacatgcgtgtgtagctgactgttttgagctttgtttattttaagtactgtatactgagggattttgttcaagcaaaggagtaccagctttatatgcagccacagatgcctctcttgcttggtagtgctagatttagagctcaaaattttccttttcagcaagaactagaagttccctagtagtattttttcccctcatgcctgtttgcactgtgcagaattcttagagaacacggctttgcaaatgttctgcggcagtctcaggatagcacggtatgtcagcagatatgggtcccgggcctgtttgcttagctatgctttcttaatgcaggttcttgctttacacgatttcagacaataactcagtattttcatgatcacagctgaatatacgccacggatggatgtgtatttttcttcctctcttgcagattttttttaaccaaaacacacacacacacacgcgcacacacacatacacacacacacagaaatacaaaataaaactggatttggtagcattgtatttgtcttaaaattctggatagggattatgctgggtcactctggtccacagcagcctcatgaactactctgaattcgatgacagaccctgaaatgaggggtctgtgacaccaactcagcctggcttggatgttgtagatgggagcatggaccagtcattccttttcaactgggccactatttattgagcgcctactgtgtaccagatatagtcaaaaaatgagagatacagctgttagcaaacaggtctctggcctcctggaggttttattctagctgtgagaaggagtgtcagaaaatgaagaacccacacaagtgtagaacacaatgtaaagccctaggaagtgctaagaagagaggacaggggaaggaaggtggagaagagagcgccaggaacgtcctgtgtgtacctgccctgccttgtacttccgcctctgggtacaatctaaaaacccatgctgtctctctgaacttgcgtaaaaaaatagcccagaggtcaccaactcatgctcccttgcaagtttattttatttggctgccggtgctttttgattttttaggtttgattttattaatgattttttaaataaaaacaggcaattttatgtaaaaattcagaatcttagcttctcttgaaaaaaatcaaaagctcctacagtcctgggcccaccctctgcttagccacagagctgagtgaggagggccctgttaggccggagggcatatgaccttcagatcctcacaactcctacttagctcacctcctctgaaggcagctgtgttttagcctattttgttgctggccctacaatcattcgttacttctcccagggcagcaatgcttctggtgtcagggaccccaccccccttactggatgggccctgtggatgcttcctcctctggctttctctcccagtcattttattgaggtttgcctctccttgagggctgcaaggggtggtgaaggtgccaagctatcagagtcccaggccaagtcacagaagctgtctgtcgaagaatgagccctgtccttctgcaatcccagattccttttgcctagcctagtgggacaggggactgaatgtggatgcacaaaatctagtttctttctttttttcttttatttttttgagatggagtctcactctatcacccagactggagtgcgatagcgcggccttggctcactgcaacttccgcctcccaggttcaagcaattctccagcctcagcctcagcctcctgagtagctgggattaccagtgcctgccaacacacccagctaatttttgtatttttaatagagatggggtttcaccatgttggccaggctggtctcgaactcctgacctcaggtgatccgcccaccttggcctcccaaagtgctgagattacaggcgtgagccaccatgcctggccacaaaatctagtttctttctacttattatattcacaggtctaaatagctaagatgcttttggagttacgggttcattacactcctgcctaattaaaacccagccgatgctctggttatttcctcttttctcccttatacaattccacccacaaagtccttctcagactctttcttccccaaatggaattagctgaagcgcatgttattttgctccagttactgtttatttatttccatgtggctgttcagagtagaatgctattacctgacaggtaggtgtagaaattcagcaatcgcaagaggcagtgtcattcatccaagctggacccagtgctctgggggggtacattccacggggtccttggcttgacttgtaagaatctcagcatccagcagtatcctcctcctgtttctgctgattcaaccaatgttggtctagaattcactcccttaacacacagaatatttccaaatgtgcatcactatcagaaccatacacctgcgagccctctactcagcatataagtgtttcacttacactcatcacccttccttactccatgatagataataggtttttctctgggcaatgccttcccctgctacgtgggtctttcagtagctcacctctgagcatccttcccaggtttctgcccccagtcagtatccgtgtcagtgaggagttgtctgatgctcactcccagggcttgtggttcttctgctgagagtggatctcttcatagctgtcttagggccatgtgtacttacacccaagaactggcagctttagcatcacctgggagctccaaaaagtaaactccagagcccactccagaaatgctgaatcaatatctgcactttaataagatttccaggtaattcatgcagacatttaagttgggaacaccctggcttataccatggcccaagccatgcagaggctttcacagctacctctgggcccattgatcccagcctctcattaaaaactcccttcaccaatgtacagatgtcatttgatcattggttatgagttcccatagtcatacccacgcattttgtaaccttcatcatggatagttacactctccatctataggtaaatataactagcagttggccagactataaaagatccttgggggctaagtcatttattataaaacacctaaatggttactgggggaaagtagtcttgcagtgtagtttaacagtagatgtagaatgtggaaaaactaattaaagtcaataaaagacagttgttgttaaatacactgttaaccaccaatcgaacaagacaaaagtggttaagagctgacacgggagtccagtggccaaccttggttagagttcaactttgcttccagctgcgtaaccttggagaagttatttagcccagtcatttgcaagtctgtctgctcagtaaaatcatctgtggagcttggacatggattttcagctgcttgggatttacctggttcagtagctggtcaaggctcaaacatccgcactttaaaaaaaaaaaaaaatcctggtcattttgatgcacagcccgtttcgggaaccactggcaacctcttggagcctctcattcctcctttcttgaatgaggacagtaacagagaagcctcctgagtttttgagagaactgaacggtagcatgaagggaaggaagagtcctgccacatgcctacacatagttgttgctcacttgttggtagtgatgatgacggtgatgaccatggtggtggtgatggcgaggatgcaggctccatttacacactcactgaataaactcaaatctagcctcctttatttctcaaatacaagccttactttatgtacacatctgtttagaagcccacaaacatagattgtcagaataaaccctattattttattatggctgctgatagctctgttctaagcttgattccaccttttaataactctgacttagttttgttccgtgccttcagttttccaagagctttaaatatatcatcaactttgacattccctccaatgttaagagatgtgcattgggaggccgaggagcagggtggatcacctgaggtcaggagttcaagaccagcctggccaatatggtgaaaccccatctctactaaaaatacaaaaaaattagccaggcattgtggcaggtgcctgtaatcccagctactggggaagctgaggcagaagagtcgcctgaacctggaaggcagaggttgcagtgagccaagatcatgccattgcactccagcctggacaacaagagtgaaattccgtctcagaaaaaaaaaaagacagatatgcagagatatcacatgaatacattcattttataactgaggaaacaggcttagagaagtgaggggcttgcttaaagctgcccactgtgcaaccttgagtgaggtttagatctctggactctgagtctgtgctgactgctagtctttctatctaaagctcatattaagggaaattttccaggcaaatcttgattgactggtaatgaatatccccagattagatgaacaattgcctgggaagcgtctttgtttcctgagtcaggctccaatttagtcttatcgtcaggtcttttcaaatcccaggagaccaaacacagaagatcttttttttccagtggagaatcaatgaccactgagagtaaaataatgaagccccacttaagtgaaaataacacaggtaattgttagagagaagaaatatggcatggcccagtaactctatattgtagcacttgtatttgcaatttttcatgaattcgttcaggtaattaattttatgaaataatgccaggtggcatggttccactttcccagccctcctggaaatatctgacttactagacaagcacttttactggaaagttatgtcaaggagttcaggagaatgtactggaaaacacacaaatcaaacattaagtcaatatacaatctgctgacaccatactagcaggaacctcaacaaaagcccccttgcctcccccaccattgtcagcagagagttcagccttccagctttcttagatatgatatacgaaagtgtatgaggagccaggaatttcctcagctgcacctcagtttaattaccatctctcttcgcttccagcactggtcgtaatgcccagagagatggctactctctacttttgaaaaccacagaaccaactgtaactgtatctatctaaacttgtctttgctagagtcatttatacaccctaaccttcttttatgtcactagaagaagggatgttgaatcacccccactaggggctgccatcttggtttgctcccctcatcaccttttctattgttgactaaggatagctttgtcattccttgctgggctgtgcaatagctactttacactcagtccagtgatccataattacaagtttagaagaggaaacacaatgccctagtcaattaagacaattagatgttagaacacaaactctatgttatttaagaattagggcatcaaaaacttgacaagtgtgcccaatgtgatccaaggagctaacccaactatgctaatacctcatctggaattctacttccaagcaaaagagtttgaaataaaaatagctggagagagtcaagtactgttccaggtactacattaccttattttgataacttcagtcaccgttgcataaaataagatttattcaggccgggcctggtggctcatgcctgtaatcccagcacttttggaggctgaggtgggtggatcacctaaggtcaggagttcaagaccagcctggccaacatggtgaaaccccctctctaccaaaaatacaaaaattagctggatatggttgcacacctgtaatcccagctactcaggaggctgaggcagaagaatcacttgaacccaggaggcagaggttgcagtgagccaagatcgcaccactgcactccagcctgggtgacaagagtgaaactctgtctaaaaaaaaaaaaaaaaacaagatttattcaataaatatgtatttttcaacagatttattcataaatatttgtgacgtggctcttctgggccatgcactgtgccaggtgcaggagatgacatgatgagccaagccagccccagcttattaacaggactccagtttagtgaaggagaaaagccattccactcacaggaaatgtggatattctgaagggaaagaagacagctctatgagcatgcatgagggaggagggaggactttatttggactgaagttaaggaactaaaatgtgagttgtagttaattaggtgagaaggaaggatttcttttccttattataaaaagttatgtcatctgcttccaagaaaatctgacctaattatttaatatgaagaggtatgaaaaataaaacaagctaaagtttgtcatggctaaaactgtccttttaatctttaaagtgtgctgctcaccatctcacacaccatcttctattattggataggtaactcacgctctaggtccatagtaggccctcgtaaatgttttgagattctttaaggcaaagaataatgattggctgtttgctttatcatacaatccaaaatagtaaatgtgaaaagtgagtatgtgggttttgaaactgtgtttgtcattgaagatctcatggagcactgtgaaaagggagcattatagttcaagccaagtaaaaacatagtaaagatgaacatcggctgggtacggtggttcacacctgtaatcccagcactttgggaggccaaggcagatggatcacctgaggtcaggagttcaagaccagcctggccaacatggtgaaaccctgtcgctactaaaaatacaaaattagccagccgtggtggcaggcgcctgtaatcccagctactcgggaggctgaagcaggagaatcgcttgaacctgggaggcagaggttgcagtgagccaagattgcgccactgcactctagcctgggcaaaaagagggaaacttcatctcaaaaaaaaaaaaaaaaagaaaagaaaagatgaacatcaaagtaatttctgattaataatatcatggtgaaatactggaataattaataagtagtacattagcttaatgtgtgccaagggagtgataagataagtaaaagctacttcactaaaagcaatatttcctagaacagaacctgctattcttcatcccccttctctgcatctggcttcccctcccccaacaacctccctcacaaaaaagaaagaaagtaaggtatataaaccatgtattgacaatcacttattcaactctatttatgccaagtaagacttaattttaacttgagagctaagcattttagaatattgatacagaaatcaggaaacaaaaaagaaaaatgcccactctctctccgttcccaaattaacagttagtgtcacaatgattgttattagatactcactcatccttttcatcattcattcattcattctgtgagccttaactgattattgtactaagggctgtggggccacccgaatgcacaagacacaaagagatgttcacacaaatacagtgtatatgttaattaatattccaaagtgagctattagtagttggtcatgaaagagttctgtggtcaagtaaatttgggaaacaccaagttaaacagaattgatctgatgtatttgctgcaggacctctctgagtctaatatgtggcaagaaggggattttgaaacacagcatttatatcacatttttctaacctatcacctagtaactcatgattagttgggtacactctgggaatcactaacgtaggcagtaaaacagggttctgccttcaaggtaagaaggctgatattagtaaggcagattagggcccgaagcaagaggcatggggtttgggtgggtcagattcccactctgatggaggggtagcagcaaacctccagtggagaggaggtgaaaaaccaaaaccaagcaccatcctctagaccaagcagacttgatgggggatttattttatttgtgtggttaatgttaacactattaattattactagtaaaagcagtgtgttgaggtgaccctcaacagagtaccaggaattttagcacaagggctaaagagtatagactctcagctcagagtttttaggtttgtatccatgttttaccactgctgacttagatgacttgaggcaagttattttgcctctctatgtcttaatttattcatatgcaattagaaataagaagaagaatagtggtattcagtgggataacatgggtgaagcactcttcacattcctggcacttggcaggttttcattaagtgctcattaattattaaatgctcattagtcttcccaatcctatgaatctgatattgtcttctctattttatagataataaaattgaaaatcagaaagtttaatgcgatgttagaattacacagtaaaggccaggcgtggtggctcacgcctgtaatctcagcactgtgggaggccaaggcaggtggatcacctgaggtcatgagtttgagaccagcctggccaacatggtgaaaccctgtctctactaaaaatacaaaaaaattagccgggtgtggtggcacatggcctgtagtcccagctactcgggaggctaaggcatgagaatcgcttgaacctgggaggcggaggttgcagtgagccgagattgtaccactgcacttcagcctgggcaaaagagtgagactccatctcaaaaaaataaaaaataaaaaaaataaaaaaataaaaaaaaagaattacccattaaaaagtagtggagctagcattcaaacccacattagtttaaccccaagccccatgtttttctagtgtagcgtgccaataaagcgactgagaggcgtatggataccagattatggaactaattatatatttcatttacaggtagatcctggtcaagaatgtctccaaaactggattaagccagtgtacttgaatgggaatatagacaaccaggacagacttggaatgttttttaatgtattggcccagcaaagctagaaatcctccactttacctaacagaagataattagaattaaaaatggcactaactgaaaacgtacttgttaaattgcctgtgcttatagagttgttgttggccctgtcgtttttggttggcaaaaagagacatatttttatttgttggagctaacagaggcaaatgtcttgagttgggcaacagttacattgctgatggtagggaatggcttctgtagggtgaaagcttggatagaaaatccctacatctagcagtgggaagtgcaccccagtttgttttttttgttttgttttgttttgtttttgtttttaccaattcaactcttagtgaaatatgaatgatctcttttaccttagcccccagatatgggaaaaagtcagcactctcaaggaaaacaaaacaaacaatagtatgcttcagtctgcactattcttctacaaaaaatgtccactttggccaggagcagcagctcaacctgtaattccagcaccttgggaggcagaggaggggggatcacctaaggttaggacttcgagaccagcctggccgacatggcgaaaccctgtctctactaaaaatacaaacattagccaggtgtggtggtgcatgcctgtagtcccagctactcaggaggctgaggcaggagaatcacttgaactcaggaggtggaggttgcagtgagctgagatcgcagtgctgcgctccagcctgggcaacagagtgagactccatgtccaaaaaaaaaaaccgttcaatatataatttttagagttataaaacatggaaagaagcaagataatatgataaataaatagaaaaaatactatcaacagaagcaggcccacagatggatcagatactggaactagcagagaaagactttaaaacatctactgtaaatatattcaaggatgttcagaaaaagatggccagaatgaataaatagttgggggattacaacagagaaatgggagccataaaaaagaaacaaatgaaattctagagtaaaaataaacatctgatgtaaataatggattgaataggcttaacagcagaacagaaactgaaagaaaagattagtgaacttaaagaatggttaatagaaattattcaaactaaagcacagggaaaaaaaatatttaaaaacactttacccatcatcaatcagtgacctattaaatggcctaaaatgtgagtagttgcaatcctagaataatgagagagagaatgggccagaaaacatatttaaagaaataacagctgaaatatatgggatacaatgagaaaatatcaatctatagattcaagaatctcagtgaattctaagtagtagagacacaaataaaaccacacccaggcacatcatagtcaaacttctgaaaaccaaagataaagaaaatataaaagcaaccacaggaaaaaatgatatgttgcatatagaggaataatgacaaaaaattatggctgacttcttatcagaacaatgaatgcctaaaggcaatggaaaggcatccccagttgagaaagaatttgtggaggatgtatacaccatgctctgaggacagataatagagggtacaatctggttaagggatcaagacaggctttctgaagaaagaactatctgaactaagatcagaagcgtgagatgttaagtaggcactgagaagggaagatgttcctggtatatgcaaagcccccattgcaaaagaaaacacttcacgtggaaagaccgaaaagtggcaagataggtgcaacacagggagcaaggaaaagagatgagccacactagccattataggacacaatatggattattgttttcattctaagaaaaataagattttcaagtgttttaagctgtgcagatcacttctgctgtcatgaagcagcaaatttgtgtttgaaaaattctggataaagtagagaggcaccagagtagctgaggagataccaggaggccataggagtggctcaggtgagaaatgatggtggcttggactagttgatggtatctgtgaagatggagagaggtggacagatgtaaggttgatttagtgatttagtagatagaagtcataggacttagtcattgcttggatgtgggagatgagggacacaggggtatcaagactgacttgtaggtttcatctagttgggtggatgaaggtgccatttactgatgaaggaaactgtgaaaaggagcaagaattatttatttttattcaacaagcattcacatagtgcctattgtgtgccaagcactattctaagaaagtttgcaaacattaacctcttttacaagagtgagaggttggtacaatttttgccccagttttacagatgaggaaattaagaaattaattaacttgcccaaagcattaattggtaaatgctgaagtaggattggaacccagacagtgtggctccagggaacaagttcttgggctctgcactaggttgcttacaaggaagtataatgaggatgagtcgcaggagactgaggcattcaagtggccatagggacctggaactgataagagaagttatggctagtgatgaatatttgaaaattattggcataggaaaagtagtttgtcttgatgtaaagaaattgcctttttttccccttaaacaggagccttatgtctagagctccagttctgttgctgtgctgtgagtagcatcccaagcatgttctttgaagagggcagaacctttttcctgaggagtatgacttccatgtcttcctcgtcggatttgttctcttctatttgctctttctcacatgtttgctgccccctagtggcccttggaagctctgccccaagtgcaaggcagtttaaacccttgggggttaaatgcagctggtgcagagtgacctggctgcccctggtacaggaccgggcagctctgaactccaggaacatgtggcacggactccaccccaattacatggtaccttcagttaaacacacgggataagcacaccagcaggggacaaactggaaagcgttttgttctgtgacagtgatgttatttaccaagtggctactgacaaagcgaaaattcagatttcagtggttgctgaattttggccatatcaatcatatctttattgtgacagtaaggggcccatcaatgagtgcttctgtctcataacaaaagagtaactggcaggtttttgctttgttttgttttttattttttattttttattttttttaatttttcagtgttacttatttcttgcttaaccaaattagtcagtaaaaaattacaaacctggtccagtgcagtggtttatgcctgtaatcccagctctgtgtgaagccaaggcaggagaatcacttgagaccaggagttcaagaccagcctggacagtatggtgaaaccccgtctctactaaaaacacaaaaattagccaagcatggtggaacacacctgtaatcccagctacttgggaggctgaggcatgagaattgcttgaacccaggagatggaggttgcagtgagctgagattgcgccactacactccaccctgggtgacagaatgagacactgtctcaaaaaatatatatatatgtatgtgtgcgtgtgtgtgtgtgtgtgtataacctaaagaaatcaataaatattgaggctacaagaaaaaagaaaacaatggctataattcattgaatgatatctgtatatcagccactttatagatttcatctaatttaacattcacagcagcttacaaggtattgatgatattatttcacatatgatgaaactgaggctgcagggataagtcctgggctttcccaggaccctatagctatggaggcagagatgagattcagacccagtcttcatgattttaaaactatgttctttccctggtgttatgatgccttcaaatgaatctataattacttacttagcagttacctcacaaaaactaagctatgaaaagtagttttctcctccaaagagtcttcaatgcagtaatgaggttaacatgcattcctagggggaaacaaactattaaaaataataactttaccatttaaaatgccatttcctcctttgcttcctctgaatagctactataaatagaccggagatgttctataagtaaagtatacagccctgggccactatccttgtccatttgcacttccaccttctccctacttcccagtccccaggccctcctgccattcaatcacatcctcagactcttacatgacacatatatggcttgatctgagtacaaggaggtcgcttccacccatttatgaacagtcacatcacatgtctgttgaaaacagaaggctacacatttgtatgtaatagttatatttaaaagaattgatatcaaaatgacaagagtggttatgatggctagcaggattttgcataatttcttcttatctgcattttccgcaattacttacctgtgcgatgaaaagaatacagttcaatttccacattctaaagagagaaaaattgttatttttctcagagaggaaacaggaattttattgaagcatctaaaagcttcaaaacttcaaagatttttgcctcttaaggacatagagatgggggttttcattaacttattaaacacaaaagaattaaagaaaattacaaatattcctgtcagcatagcactgcagaacaagccatggaattgctaaaataatctgagctctgtttgttgttgttgttgttgtttgagatggagtctcactctgtcactcaggctggagtgcaatggtgccatcttggctcactacaacctccgcctcccagtttcaagcaattctcatgcctcagcctcccgagtagctgggactacaggcgtgtgccactatggccggctaatttttatattttcagtagagacagggtttcaccatattggccaggctggtcttgaactcctgaccttgtgatccgcccgcctcagcctcccaaagtgctgggattacaggcataagccactgctcctggccctgagctctgttaataggaaggaaaacataaggagaaatactaggaaacagagaagaagggagggaggaaggtgggaaggagacaaaaggaagggagggagggagagagaggggaccaaagaaagagaaagaagaagaggctgcaggatttgttgtattctttctagcattattattgtttttatttaagttcatgtttctccactccttacctcttaattttattatttaccattcacaaatcacaaagtaatgataaaaatgcacaaatctctaatttttaaaaattttacttgacaaataataactgtgggattatcccaacaaatatatatttgcgggatgaaatgttatgtttttatatacgtttatattgtggaatgattcagacaagctaattaatatatccatccttacatagttattttttgtggtgagaacatttaaaatctactgtttttgcagttttgaaatatgcaacaccttattattaactacagtcaccatacttcgcaatagatctctaaaacttattctaactgacggaaacattataccttttgaccaacatctccccatccctcccccttcccccagcctctggtaactaccattctactctctgcttctgtgaatttgacttttttagattccacatataagtgagatcatgcagcatatgtctttctgtgcctggctatgttgcttaacatataacctgaacatcctccacgttcatccaggttattgcaaataacggaattttactccttttaaagattgaatagtattccattttctatgtataccacactgactttagccataaatctctacattttgcttttatgtttgtttttcttcaatagagcatctgtcttttgtaaaaaataattactattgtcagccaggcgcggtggctcacgcctgtaatctcagcactttgggaggccaaggcgggcagatcacaaggtcaggagaccaagaccatcctggctaacacagtgaaccccgtctctactaaaaatacaaaaaattagccaggtgtggtggcgggcacctgtagtctcagttactccggtggctgaggcaggagaatggcgtgaacccaggaggcggagcttgcagtgagccgagatcgcaccactgcactccagcccgggcgacagagtgagactcggtttaaaaaaaaaaaaaaaaaaaaattgctattgtcgagaaatagttcttgcagtctgcttccccttctaaaatatctgaggataattagtctagatgacttggaatactgaatttgctcctccattttttcttatttaccgtgaaaacttgataatatggatgcaaaagtatattttcatatagtcaagaaattaggaaaacaaaatggacagaaagtaggtcaggatgcactagcttctatcatggaaacaaacaaccctcatattttagtggcttaaacaggtgaccatgttttgctcattgtcctagtctatgggtcgggagggtagctctgctcattctagccgctcttggtcctggtgacagccaccatctctgaggttgccagtttccatctcagaggtaaggagaattctggggttctgcacagccatttaaacacctcagcatgaaagctacacctactctgcttacaactcattggccagaattggtcccatggccctcctaaccacagcgggccaggaagtgtcatcctgccttgtgctgggtagctgagagcagacagcctaaagaagagcacagattttattacagaagcataaaaagagaagctataatatcagataacataagtttatgttgaaatgtataaaattgttcatactttgctatcttgacctacaaaaatggcaatttcataaggttcatgctaataagtttaaaacaccttttgttgtcttttttctgacaccactcctgacaccaaacatctggtcttccacactaattctccagttccctgagaccaactgggtatccaacaattcaaatcaattctggcactcactcctggagttagcccaaatcctacaggttaaaggcacattctcacaaggctgctcccacttcaggcatcagccgaaaacagggttcccaggattcccatgcttttgcccaagcaactacaaatttgaaggttcccaaaactcccccctcaggttcaatgatctgctagaatgacttataaaacacagggaagaactatacttactatgacagcttctcatcaagggtacaaatgaacagccagatgaagaggaaacttgagggggggtgtggattctggagggtggggtgcaccaccctcccagcacccaggtgtattcaccagctcgggagcacccctgggccacatcatttagggttttttatggaggctgcattatgtaggcatgattgattaaatcactggccattgattgttggatcagtctctaccccttcccattctcccaaggtcaaggggcgggctaaaaatttccaccctcttgtcacatggttgtttcctctgttgacagccccccatcctgaagctgtctagggacctaccaagagctacctcattaccataaactctggtaggggtgaaggggctgattatgagtaacaaaagacacttctctcactcaggaagtgtttttttgtttgttttgttttgttttcattttttgagacagagtctcactctgtcactcaggctggagtgcagtggtgcgatcttggctcactgcgtcctccgcctcccgggttcaagcaattctctgcctcagcctcctgagtagctgggcttacaggcatctgccaccacgcccagctaattttttgtatttttaatagagacggagtttcaccatcttggccaggctggtcttgaactcccgacctcatgatccacccgcctcggcctcccaaagtgctgggattacaggcgtgagccaccgtgcccggcctcaggaaatgttttaagaacttctatgccaggaactaggaacaaataaagaccaaataaaatatatatttttattataccgcacacctccttcaagaataaatgtaaataaatatcacctaacaacagaaaaattctcaaactggaccaaactacaaaattcatctatattctatttaaaagagacacgcaaaaggaatgattaaaagtaaagacataaaagtaaaataaataaatgtcagcttaatatgaaatctagtgagatttgaggaggagaagtgtttaatgggacaaagttgattattctgtattgatgaagttataatctacagtgacaaaggaccatgatcctctacactcctaatagtatagaatcaaaataggtaaagcaaaaactgctagaagttagcagaaatgtatgtaattgtgttgggagttttaattcattattttgcacataaaaaagataaataatattacataaaatcaaataatatttacaattaaaacttgtactgaccattttgccatgaaatagactatgtcatcattgcaaggatctataaagcatctatacaattagcaatatactactggggcatgagaacatcctcaataaatttcaaaaaggagaaattattgaaggcacattttccgatcacaatacaattagacattaatgatttttaaaatttcaaacattttcagattgaaaagtactattggccaaaggggaaattgaagccataatttgactatttaggaaataatgtcaatataataattatacattaaaacttagcagatgtgactaaaattatttacagggaaaaattcacagttctgtatgtttttattatttaagatgaaagaaaagaaaataactgtgttcaagtaaaaaaaaattagaaaaccctcagccaaagaaacctagggaaagaaaaattaaataactaaaatataagaagaaattaataaactataaacaaaatatagtgaaacagtggcattgataaataaatctaaaaatatttacttgggggaccaaacactctggcatagctaattaagagaaaacaaatattcatgattagaatcagaaaaggaatataaaattatgtatagttcaaagagaaatattaatagaaatttttatgttcagaattttaataatatatttgaaagacttgatgagttaatttccttagaaaattaccatacttaagaagtagaaaatttcaaaacactgaagttatgaacataactataaaacttgccagataatttttaatgaagttttcagaaccacaccatttcacaaatgaatactgataaactttcaagcagtacaaaattcacctgatagttatcacagacaaatatagaacacttgccacttcatattggtgctagaatccctttaaattattagtaaatcaaaaccaacaacttataatttacgcatttattttaaaatattcattgagtctctctaaagtgcaagagactctactaggcatcctgtgtgtgcagagtctctgccctcagggtggttactttctcctcggggaaacagacatttccaactcagctacagaattagttacataagccaatgagataaatcctagaaggagactcgcagtgttctgtaacagtgtgtggcagggatccttacacatggctcagtggagaagggctgtagtttagagataggccaccaagatttgaatcaaagatctgcagcctagcagccttattccctgtgaaacctttaacccagaggctctcacctgggggtgattttgtcccccgcggacatttggcaatgtctggagacatgtttcattgtcatgacttggacatgctactggacctagtgggcagaggccggggatgcagctgcacatcccactgtgccctggacagcctcacagcaaagctgtatctgccccaaaatgttaccagtgccaacactgagaaacactcctctgtaggatgatgaatccctgggggctcctgagagtcagatccacatttctaactgtccactgggcttttccacttcatgtgcctcaggcatgacaaactccaaatgtgtcatcttctcctgacctgtgttttgttgttgttgttgttgtttgtttgtttgtttttttaacaagatcttgctctgtcacccaggctggagtgcagtagtgtgatcatggctcactgcagcttcaacctcctgggctcaagtgatcctcccacctcagcctcctgagtagctactgggactaccagtgtgcgccaccaacccttgctgatttttctattttctattttttgtagagatggggtcttggtatgttgcctaggcttatgttcatttttttaagtaaacagtgccaccctctacccactctctcatgtcagagctcagagtgccattcttaattcatcctctccctcaccactgaaatatttaataaagttctgaccatctacctcttgacatctctggaaaccatctactgctttcctttgtcaggcttctacttacttcttcagtttgcctgccattcatacaccttgccatctcctacaacaagcatgctggaaatattctctgttttagttgtactgaatacagcacagctggcatgtgccatgctcctattggccacagaaccctcacatattctgctctttttgtctgcagcagtttgaagttgcccccgatccctttccctgacacacacttcactggatgagttgattcctccaggaggttttctatgagacaaggcctgggtgcccctcaaatgcacgcccatggcatttcactaacatagaataacactctattgtcggaaccagaaagacacatgtgaaattcacacttgaagcatatttgggttaggaagacagtttcaatataggagtgaaggaagctggagaggatgattggagtgctggaggaaataaacgaattgaaaggcaagaccatccatctgggaataccccaccacagagcctacagaataaccaggaagtagaaaactggggcattcctagagcctttttaactgttgtcaaaagtctaggctgtctgataacacacaagtagtctaatgcatgcaagaatacaaagctgggggcgggaagtgagggtagggttacctctgaggagacaattggcaatgtctggaggcattttttggtttttgcaattgggtgactgctactgaaatctgatgtgtagaagctagaaaccctgcaatgcatgggacaaccgccataacaaagaattatctggctcaaaatgtaaaacaaggttgagaagccgtgctttaacttaatatttctcagcctctatatcttcatctctgaaataggaatgtccacattagcattgttgtaagccctgttactagaatatagtaagtgctcaataattgttggatttttttcacttacattcttttgaaattctgtgtgttatctgttgcttaataataaaccataacaaatcagccctaaaatttagtgactcaaaacagcaatcatttaatagtctctcgtggtttctgccggtcagtcattcagcagcagcttggctggcaggtttagacttcggatctcttagaaggttgtaagtcagatgtcagctggggctgctgtcatctgatgggttgactagggcaggaggacccacttccaatgtgtctcactagtgtggctggcaaactagggaaactgtcagatggaggtatcagctagcaactcgggctctccacaggactgcatgtgcatcctcaaagcatggcagctgcctctccacaaacaagggagccaggagactgaggtagaagctgcagtgcctttatgacttagcctgagaagtcacacattgttactcctgctgaattctactggtcacactgacaagctctggttcagtgtggaagggcacttcataatgctgtgaacatcaggtggtaaggataattgagaccatctcaggggctggcaaaaactctaccaaaacaaaccaaggtattagaaaaaatcaatatagcatttgcagatgtttaattattgaactaaaaaattgcactgattcaacttaaatattattagaattaaaaagagttaaataatgtggcaatatacaaaataagtatggtagatatcaatagatttcacttacaccagtgatatcaaattggaaaatatgaaagtaagaaaatcttagttataaagtacctagagataactttgaaaagaagtatgtggaaactctctgaagaaaaccataaaatttcactaaaggacctgaaagatgggaagaaattgagaggtacatcatgtggctggatggaaacactgagctttagataacttcacttctctacaaattaatatacaggtttaatgcaaatctaaaaatgtcaaggagatagatttatataatttgatgtacatgtgttgtatgtatatatatttcattctaaaattccacaaattatctagaagactgagtggaaaacttaaccaagaaactttggggaaagaagtgtggatgtatgtacatccacattgaacattaatgtatgtttaaaaagtaattgacaacatcatatggaatgagcaaaaactggaaatattccctttgagaactggaacaagaaaaggatacaactctcacctattcaacatagtactggaagtgctagccaaagcagttaggcaagagaaagaaatgaaaggggcatccaaacaggaaaagaagaagtcgaactctttcttcccgaattatatgattctgtacttagaaaaccctaaggactctgtcaaaaggctattagaactgataaacgattttagcaaggttgtagggtacaaaatcaatggacaaaaatcagtagcatttctatacatgttcaaactgagagccaaattaagaatgcaatccaatttacaatagattaaaaaattgagatatctaggaatacatctaaccaaagaagtgaaagatttgtacaaggagaactacaaaacactgataaaataaatcatggatgacggaatcaaatagaaaaacatcccatgctcgtggattgaaagaatcagtattattaaaatggccgtatttcacaaagcaatccacagatacaacactattcttatcaaactatcagtgtcattttttacagaattggaaaaaactatgttaaaattcatatggaaccaaaaagagcttgaatagccaaagaaatcctaagcaaaaagaacaacactggaggcatcacattacctgacttcaaactgtgttataaggctacagtaaccaaaacagcacagtacttctacaaaaacagacccagaccaatgcaacagagtagggcacccagaaataaggccacccccctacagtcatgtaatctccaacaaaattgacaaaaataaacaatagggaaaggagaccctaataaatgatactggaaaaactggctagtcacaagcagaagaatgaaactgaatccctatctctcaccatatgcaaaaattaactcaagatggattaaagatttaaattctcaaactataagaatcctagaagaaaacctaggaaacaccattctggacatcagccttaggaaagaatttataagtcctcaaaagcaattgcaacaaaaacaaaagttgacaagtggaacctattaaactaaagagcttctgcatggcaaaagaaactatcaacagagtgaatagacaacctacagaatgggagaaaatatttgcaaattatgcatccaacaaaagtctaatatctaaaatctataaaaacttaattgaacaagcaaaaaacaaccccattaaaaaatgggcaaaagacatgaacagacacttctcaaaagaagacatataagcagccagcaaacatatgaagaaatgctccgtgtcactaatcatcagagaaatgcaaatcaaaaccagaatgagataccatctcacatcagtcaggatggctattattagggtcaaaaaacagatgatggcatggctgtggagaaaagggaacatttatacactgctggtgggaatgtaaattagttcagccactgtgaagagcagtttggagatttccaaaagaacttaaaacagagctatcgtttgtcccagcaatcccattactctgtgtatttccaaaagaaaacaaaccgttacaccaaaaagacacaggcaaatgcatgatcatcgctgcactattcacaatagcaaagacatgtattcaacctaggtgtccatcagttgtggactgaataaagaaaatgtggtacatatacaccatggaatactaggcagccataaaaaagaatgaatcatgtcctttgcagcaacatgcatgcagcgggaggccattaatactaagcaaattagtgcaggaacagaaaaccaaatactacatgttcttacctacaagtgggagctaaacattgggtactcacagacataaagatggcaacagtagaaactgggttctactagaagggggatggagggagtggggcaagggttgaaaaactaattgctgggtacaatgctcagtacctggttgacaggaacacgtgtaccccaaacctcagaatcacacaatatacccaagcaacaaacctccacgtgtacccctgaatctaaaagttgaaaaaaataaagataaataaataaatagattgaaatggtatgagtgcagcaacataatgacagattagtggaactatataaattgaacagaaattgaccctaatataaatttcgtaaataatagtgatagaataaaaaatatttgagtaaagaatatattaaacaataagtattactaatacaattagttaactactttgaaaaaaactttaagatatatttcctcttttacccatacctcaatccctgatagatttgagtgaaacataaagtatgaaatcataaaaactcaaaagaaaatatggataaataagttagagacagaaatcttttaagcctaaaataacagaatgataacaatggaaaagaaatcaggatatttgacaatataaaatgttgaagttttgtaagttaaaaaaataagcaaaataaaaagataagcaaatattgggaaattgtgtcatatttacaacaacggtggataatttcccattttcccttaatatatgacagaagttgtaaaatatgattcttttttttttttttgagatggagtctctctgtcacccaagctggagtgcggtggcacaatctcggctcactgcaatctccacctcccgggttcaagcgattctcctacctcagcctcctgaatagctgggattgcaggtcgcaccaccacacgcagttaatttttgtatttttagtggagacggggttttgccatgttgaccaggctggtctcgaactcctgacctcagttgatccacccgcctcggcctcccaaagtgctggagaaaagcgcgggtggcggcaggcacggaaaggacgccatgaaggcctcgggtgcactaaaagagtacaaggtggtggtctctctttgcccacccccaaatgccacacactgcccctctactgcatgcgaatctttgcgcctaaatcatgtcgtcgccaagtcccgcttctggtactttgtatctcagttaaagaagatgaagatgacttcaggctggattgtctactgtggacaggtgtttgagaaggtccccctgcgggtaaagaacttcagcgtctggctgctctatgactcccggagctgcacccacaacacatacagggaatactgggacctgaccaccatgggccggcaccgcacccaggcccactgcatccagatcatgaaggtggaggagatcgcagccaacaagtgccgccgggccacgcttcaccaccaagaggcccaacatcttcttttaggtgcaggttcctcgccccgggtgtgccccaaataaactcaggaacgccccgggggagggagggagagagagagagagagagcgagagagagcgcgcagtaaaatcctattacaaaaatagacacgaactatctctccatttattgtttttatttgatacacacttattgagcacctatggtgtaccagccaatgtgatagatgtgagtcacacgtgaggacatgtaaaaactttaaaaagactgtgaaatcaatgagaagatatttactcatgctagaaaacaaaccacaaactaatgaaaagtactgtcattttgcctatcatattaaaaaaattaaaaactatacaactcaatgctgttgaagatgtcctgagacgggcactcagtgcagagggaagtgtccaggggtctctacgtgtgctttgcaagcagtttggtgctcagcatccatggtgtcactgagttatcagggtcctcagagaataacagagcaaagtactcagaaattggtgcaaggaataagctatacagatgttcatttgcagcattatatatatatttaaaatagtgtaaaattaagaatatctttaaaaatccaacaaaaagtttacttgaaatcctatttagtaataccataatatggaataatgtgtagcctttatgaaagaattctcctaagactatttaataaaataaaaatctctcataacataatgttacataagtaaatcacaatgttaatggtatatgcagcatagtatttgttggctgaaaaatacacatgcatgcattgaaaatagaatggaaggaaatctctaatataataatagtgcttatcttggggtgatgacgcttgaggtggtttttggttttctctgaatgcttcttaaaaaatttgttataaactacttgtaattagtaagcattgtttttatcataaaaactgtgaatatggaagaaatggtattaagttttagaaaagtaggggtgagggagagtaatgtagatgcaaatgcactaatcacctccccaaattacggagctgccttgaagcctggtcattaattcatccacactatcttcctccactatttactcaccaagtagtctgttcttatgcgcacgcacacacacacacacacacacactaccctcccaccctcccccactcactccctgcaacaatttcagtcattgttaatttgctggataggtggctgtgggtttattcaatcaaatgctttacagagttttgccaatatcctgctaattgatccacaggccacctctggtgatttatggtgttttatagtgtcagctcttattgaattttcttactagatttttgtggttaaaattgtttcatacattgagatctattatagtgtatggcattcaatacttgtactggaagacagaggcagaggtttaaggaataaggaggtttaaagaatcaattgtgcagaaggccccttatcagatggctctgctctggttcctgttgatgggggcccagtgggaagatgtgaccttttcattttttttcttgtctgtgtaagggatatcagaaatggtaagaaatgatcttacataacaactatgccagggacagtttattttggatcaatctagcagactgactcctagcatagcctgttctttagagttactaaaaggccagggacattgatttccatgtcaagactcataagctctttgtgtgtgggggtcccctgagaattccccttatgtcccagcaagtaaatagagacctccagtgatgctggtcccagtatggcattgattttaaaaggataagtttctcacacagtcgtttgtagaatttaaaaagagactacattttaaaaaatatataggtaataagatactggtcaaaataaaatgcaggtagaaattcacattacaattacttttaaaaatcataagtagcctgttcttttcctgtgtcatgtggaattccatcatctttatgtcattataaattatgcctaatcctgataaaatgtgccttatttatttgatgatactatttatttttgcaagtttaaatgctttaggccaatgcagtcttccctgtccactggcacactccaggtttgaaactagatctgaaactgaagctgactgacgatttatagtacgtacaaaattagctcagctttcctgtctcctgaggagcaagttctttatttggcacatgctccagcttctctgttttcttagttttacttttcctaaagtgaagtcaaccacctgaaccatacagaatgctctgcaaccctccttcactcacggagcttagaaagtgcgttcagcagaaatacaggcgtctctaatcccacttcgccagattatatttgtactcagaaatgtgttggatcttctcagtgttggccagaagcctcatttgggttttctcttggattttcaggatgctcagggctctttggtctcctcctttctctagtcctcctcttctttctctatctaatgtaagaacagattttataatatatgtgaaagagaaatcagttcattcattaggtaaaatgtgaagatgaacaaacctcccttatctcctctccatcctcctactcaggcaatggatgaccctacttcacactttgttgagacaattgcagggatcagaaaagagcttccactgactcccactgccacctgccgccatgacgctgcctccctgcctttatatgacaggtgaacggcccgcatgtccaagcttgtgaaacccaccttatcttgttgttgttgttccgtttggttttgttttaggtgtttagcagcctgaagccatggtttttcgtttctgtctgtactgataagcagataagagggatgaggaaggggctttactggcccaaccaaaaatagaaactaagaacccatgactgtattctccgccatgactgggacccacctgcacaccaggccttgccctttgccacctgctaggatgtctttccagcagcttctctctccctcagttagaccatttccgtaggcatccaccagcaatttctcccagatcttgtcatctcccacttccttctccatttaccacacattgtcttctcccctcttccagcagaacttcttccaagaagcatctggactgcctgaagttccttcctactccctcagtaaagttgttcttgttagaaccaccaaggatctccactttggaaattcccctggcccattttcagccctcatcttctgtgctggacacggttgactgtacctcccaggaaatgcagcttgatgtgcttccaggaagtcatcattccctgttttctttttccaaattcgtgctccttcttgggctctttccctgactcccccagacctttaactgtgggctgcccctgggctcagacctggccctctcctgctatccatacccttcctggtggtcgcatctactcttgtgacttgaaataacatatattggcaggtgacccccaaatgtatatgcccatttcagaccctgcccctgaatgttcccctgaatattcagctcctgcttgaggtcttcaactgggatgtcttataagcatctcaaacttaaaatattccagccaacatccttatctgatcatcagccatttcaatcttcctcatgtcagtgaacagcgattccctccttcctgtttctccggccaaaacctgtggtgtcatccttgactcatcctttctctgcaccccacatccaaacctctagcctcaaaaatagatctggaatctgatcgtctctcggcacatccgcagctcccaccctggttctagcaagcggcagctcccccatcactgcagcggcttcccacctgctcctcctgttcccacccatgcggcccgttctcatcacagaccccagcatgggccttctcaaagcatggaacatgtcacttccctgttcagagcctcagatggctcccagagccccaaccatggcctccgaggctctatgtgatctgatcccccttttgccttctttccccttcccctcctctctctccactccagtcacatggcctccctgccactccccaggtgcacctgcttaagggtgtcaggcttggtctcccctctgcttccagtgctttttcccttgaggtctaagttgtcacttctcctcctcctcctaagtcacccctaggaggtctttcctgaccaccgcatttacaattgcaaccacccacgctccctaactcccttccctgcctcacactccacaccctcatccctttctaatatagattataatttacctaactgtcttgtttgtagtctcctccccattaggattcaagctctgtgaggacagaaatttctgtctgtgtttgctgctgtatctggagtgcctagcatagtccctggcttacaggaagtcagttgcataaatgaatacatccagcagttttcagtgattgagagcaaggacagtgttatttctttgagctgggttagattatatttcctacccatttatttcagattcaacatttggtgtgggcttgaggttgggtattcaatttgtgctatgtgtaagggcattccccttccagctgtggggactctgtgataatgaactgactgaataagttttatttttatgaactaattttgaacaagtagcagacaaagcaaaatgcttctctgtgtccttttttttagggtgtgggagggattaccttacagtttcaattgagtgagaagaagcattttaaataaaatatttgttcataagccagaggccctgcactttcatcagatcctgttgccctctaaagtgtcccatggcatttaggccaaattgcaaatcctctcggtgagctgcaaggttctgcctcatctagagcctaacccgaccatccacgctcttcttttttactatgctggggcctcactagtcttcacttagttccttgaacctgttgggaattcccatcttcatacctttgcacaggctatgcgtctgcctagaatgtgcgccctccttgtccccatttcatttgttctgaagctgatgtgttttctctgcagatagctcctctgccaccttctccaaaatatctcccaccttgattctcttatggcacctgatttttttccttcatggggtatagtaatttgtaagtatatttttattggtgtatttgtttccttgactgtctccctgaaactctatgttgcttgagaacagggaccattgcttgttttgtctaaaccacagcagtgcagcgactattacagtagatgctcagtgggcctttccccttggtcaagaatcaccaagagctcccttcactggggaactcttctgagttagaccatcttctgagacagagcatctgctgaagacagatggtcttcacagctcactggggaggctgaagaggagaaggtcagaatgggattggggtggtctcagcatggaaagggagtggtgagtgaagggaccctggatcctctgataaatctctgtcccagatgctgggtcaggactaggaattcttatcaccttttcccaaaggagtcagatgctccaaggagagagtgcctcctctaggtaacaccagtggtgacagagcccatctgcacttttggtttaatccaagatcctcatggaaatagcatcgtgcaggagtgcagggtcacaagatggagtggcgattccaccactgaacacctgtgaccttacccgtccagtgtcagggaggggcaggaccttgtggatttggtccaaatttactctaggaaatagcaatccactccaaaaaagggcgattaaaatgccgagtcacacagctagttaactgcagaatgacaactagaacctaagttacctcaatcccaggccactgagacgtaagacaagttttgccagcttgtcttttatttgatgaattgtagttcctggtgagcagaaatacaaggagaaaaagttttacaaatttaagcaagagcacaatagcacacttagaagacttttgagaggaggatgagtactcgtgataatcccagtacaatgagaaagccagcaccccgtttctgtgatctgaaatggatctcggctcattccctttacaactttgttggaaagagaacgaacacacaaaggacctcaagacactgccagaaaagaacactttgagacacttgaagaaaagaaccccagccaactatatcctcaggtggacaataacactcttgctcactaggagcaaatgggtttgaggaacagggagaaggcagttaagagaggggaagtctccagttagaggaagactggaaatgtaacccaaatgctgaggttttcatgcattcccgacacagtattctcttttcccgttttgtttggggctgtttctccccccatgaaaattggcatttaagatttttgatggcttaagattctaggatcctgcactcattgactgggggagtggaggtgaggcgatttctgacccgctgcttctcatcacagcagttctgcacccctcacctccgcccacccaagcaagtggcaaagagcactgctgagagtcccttcagcagcctttggccctgtcactgcaggaagccccagcccgaatcatttgcgtcatggccatcactgtctcaggctcagctccaaaacggcatctcctatctcctgtttcctgcagactgagcccctctctgcgacttgttgcaccaggctctccacagctggtgtccaacaatagctgacattgggtggacacctgctgtgtgccaagctctatacatgaattagccctgattttcaaacaactttatcgtggaaatacaattattcctcatttacagatagaaaacctgttattcagaagttgtgcaatatcacaatagcaaggggagagctggagtttaaacccagacctgacttcaaacacaagctctttcaagtctgtagcctcctctccagcctcagctcttctttctctcagtccactctccctcaaatgcactgcagctaacaaccagactgcttgctaagcctcttctagctctgccttcagaattagatcctcctctttctttttctgttctctttctttgctttcttttttttttttttttttttttttttagagagacaaggtctaactatgttgcccaggctagtctcttgtattcctggcctcaagtaatcctcctgccttagcctcccaagtagctgggatttaatattatgggtgtgagccaccatgcttagctcagaattggattcttatggcatcctgcatgtgcaagaactcaaagtcctgccctgcatcctttaagtcccaacatgtctgacactctctccatgagcctttttcgagtccctcatccagcttaactgtgtttcctttccagctgtcatagagcaatgtgactttattgcactctgcctcagatattagttgtgcagctatttagttacaggtctaatttctactgctagattgaaggacatgtatttacagcaggagcaatgtcttgctcagcttagatcactgaatgtgcctcttacggctgtgtgcatgggtcacttatgtccctccagccaggatgcttaatgggcaaacccagttcagtggctggtgcatcactttaatgaacagagcaggaggaaaggcaggtggcaggacaaggcaagggctgctgtggcaagggccccgcatcacactctttttcgctgacttcactcatctgctgagaacttccttccctgtgatgccatccggatgacaggagctggcgacaagggtcagatctgccttctgtaaagtcgtttccagcccctatgggcatgtttcttgcctagtgttcagtgttcacaggctgtctcaaatcccactacatgccaggcccagagcagagcaagaataagaagagagaccgaacatatgattaagtatttggaagttataaagtgagacacaaactgttcaagaaaatataataaatagatatcattaaatatatcttttaaaattgttaaataaaataccaaatttaaatgcaagtcactaataaagctgattttaaacactttcaataattatattttattaaatattattataagaccatttgcctctctagcatccaacagtcatctaactgacaatgtatagaatcaatattatgcttcacagcatgatattcacagcatatcttgaacagaaattcccagtgttggctgggtgcggtggctcacgactgtaataccagcactttgggaggccaaggcaggcagatcacctgaggtcaagagttcgagaccagcctggccaacatgggaaaaccccatccctactaaaaatacataagttagctgagcgcagtggcaagcagctgtaatcccagctactcgggaggctgaggcaggagaattgcttgaacctgggaggcagaggttgcagtgagccgagatcatgtcacttgtcactgcactccaacctgggtgatagagtaagactatctccaaaaaaaaaaagaaagaaagaaagaaattctcggtgtacagtttggggacccctggaaggcccccagagccttcagtaaggtctgtaaggtcaaaactaatcaaaactaatttcattgcaatattaagattttatttgaccttttcactctcattatctcacgagtgaacaccggagtttttcagaagctccatgaagtgtgataatcacaacccattgaagtcagaagtatgtgtgagaatccagctgtcttctgttaaaccagctcttaaagacattttcagaaatgttaaatgatgccataattctcactttttttaattttggaaaatgtatttattttgcataaaatatgttatccattttatgggtttcttattgttctcaaatgaaccaatataaatagtttgcatgttttgccttaatttctaacataataaatactgatagatataagccacataaataaaagttctttagcatcctcaataatattcaagattgttggtcagtcctgaaaccaaaacgtttaccaagcactgatttagacctacagatatatcgatgtaagagtaacatatattgttcaatattgcaaaacgtccctcaaagtgggaccccaaagtaggaccttgacttggaagaggaaaaacataagactggacacagctgggaaaggatgcttttttaatgcagcaatctatttcctccatgttttctgagagaaacagttgacaagttaattaaattgtcatttctcctacctgagcgtgtcatttctgaaatcttcccccagctgcggctgccttgagtgtcaggagtggaacagccacacctcttcccagcaccaggatgcgtctgccctttgattcaaggacaagggaagtagagatgtggggattgagtcaggggcctgggctaataatggggtctccagcagcagggctctcctgtgtttgagatacgtgactctaaagcaggaccgtggggcggggacccttctcacctggttctctgcaggctgcctagtgacaggtaatcttataggaaatgggaggactgtttttcccagatctgaaataattttcttttttaaacattttttaattgacaaatgaaaatcatatttctttatcatgtacatgttgttttgaaatatgtgtgcattgtagaatggctaagtcaagctaagtaacatatgcattatctcacacacttcttatttttttgtggcgagagcacttaaaatctattctcttggggccaagtgcagtggcttatgcctataatcctagcaatttaggaggccaagaccagcagatggcttgagcccaggagtttgagaccagcctgggcaacaaagtgagacccatttctacaaaaaaaaaaaaaaaaaaaaaagacagaaacagaaggaaggaaggaagggaaagaaagaatctattcccttgtcaattttcaagatcaataccttgttattatctacagttaccctgttgtacaatagatcacttgaacttactcattctttctatctaatgtatcctgtcaaatgtatcctttgaccaacatctccccaatttcccttccctgaaataatttttattctattcttaataaaataataaccttatgaggtacatttacaagtattattccattttctttccacaacaaacatgggaaatcatataatttacatttgatgttattaatgaggaaattgtggaggaaaaaggttaagaaacacccaaggttgcagatctggcaagtggcagagccaggactgccccaggtcttataatgtgaaactttgaagggctctgattttattccttttgtgctttattcacatttatgtgctttctgtatggatttttttttttttgctttaaggttctcatatttgaatttattaagtgtagttatattaacttattataacttttgggtaaaaaatggaccagctctttttaaaaagagcaagtcttactgctaactgggtcttgctaggacaatatttatagacacagtaaaatgcagctcaagacaaaagggggaaatggaacaggttgttgtgagagcttcctgggattagatatgtagacaaactggatcagggtctcacctgtggagctctgaaaaaccgtgatactcagacctcaccactggccagttaagtcagaatccctggaggctaggacccagacatctgcattggttaatgctcttcaagctatttcaacatgcatcccaggttggcaaccactggactaggaaatcaaaactcagcctgcataggtccatgaggatctctgaagttcatgagtcatatgccacttggactgtaaccattcatcaggagtgcagtcgggaatgagcccacccaaagtcataaaaaataaagaacctacagtggtccacacctataatcccagcactttgggaggccaaggcaggtggattgcttgagcctaggagtttgagaccagcctgggcaacatggcaagaccccatctttattaaaaaatttttaaaaatagctgggtgtggtggctcatgcaggtggctgaggtgggaggatctattcagcccaggaagtcaaggctgcagtgagccgtaattgcactacttcactccagcctgagtgacagaccccatctcaacaaaaaataaaataaaataaaataaaataaagaaactgagtgggcaaaataaataaatgacagtgagctagatagcaagctaactctttttaatcccaggaaaatgcttagacatgaagtaatagattatactgaaagtactaggaatccaagttttggcaaaggccagtggtctaaacacaagaactagttagggacgtcttagtctatgtcagtaagtcatatggcttgcaaaaaatcagagaccacagagatagatcagagagaccttcgagccatgtccaagatggaaaggacaagccagagggtaagtacattattgcccttgctttcaagagaggagctcaggaccctgagagggtggatgacttggagggagggcaggtagagaaatgaattgaacagagagatgatgagaaatcagcacagtccaaacagacaagtttcccttgaagaaaagagacctctgagatccaactattgggaccacatgaagcacagagcatgcagcccagtgataatgccatcaagactgcccaagcctatgatgggggtgccctatgacagccttccttgattttgaggctagcttgggtcctcaaaccttcagagatgtagtgcaaccaggatcgctgacttctgcattttcctttctcctgattgtccagttgaccattgctcagtttttaccctgggaaagtaaatttaatgccagtttcattatagtaaatatttaaaggaatatttagtaaaagtgctggcaaatgataagctctcaaaaatggcagctattattttttctttactacttctattggcaaatgcagttttcgtttgtcactttttaaatgatttttgtgcccggtaaaagttcaaactgccacccacccccccaaaggtgtttgggaggagggatatcaccaaccaaggcctcacccagaatcacaccttataactactaaaaagtcatagtctcggcctacatagactttgaaaattgtggacagagttcaggaagctccatatgctacatgaatgcctgccttttgttgaagcaccctgaacttcatgggtcatcatttaagttgtccatactaatgaaatgtgaaagtcaatagatttgaagaatttgcatacaatgatagcaatgacattctctcattcatccactcaaaagttattgagtaatttgctgtgtcccgggcattgtttaatgatggttgggggtagcggggagttgtttaaggatggttgggggtggtggggaggtacgtagtagtgaacgtaacaaagtcctcatggaatgtaccttgttgtgagaggaaatgaacaataaactaacggagtgtatgtttgttttcagtggtgttaaattctgtaaagagaaataatacagggaatagggaaagagagtgagcatggcaaaggatgttacacaggggattagggaggagtagatgagcaggtactgtggagatgctggaatggaggcctgatgaagggagagccagaggcccagagatgtctgggggtgcacattcctggcagtgggagtagggagtgcagaggccccgaggcagggttgtgatgggcgggcaggaggaagagccaggagtccagggttgctggacccaagggaaaaggaggcaatggtgggagaaggaagtcatggaaggtttggcagaggggatgtgatctgatttagagttcttttcattttcttctttgtttggagacagggtctcactatattgcccaggctggtctccaactcctggcctagagtgatcctcctgcctcagcctcccaatgtgctgggattacaggcataagccaccatgtgcatccctgatttaggttttttaaaggtttctctggctgctctgtggagagcagaatgtaagatagaagtcaggagacctgatagaccaggtaagagatactggtggctgaggctgggaagatagcagtgggagactgagaagtggtcagaggacagggcagattttgaagccagcattgtctggatttagacagcttgcatttcagcattggctggattgtacctgaggagtgtgaagaatcattaaggatgcctctaggtgttcagtctggtacctgaaagaatagagttaccatctacggagatggggaagagcacatttaaggctgggataatcaagaacttgtttttggaggtgggcttgagatgcatattagatatccatgtagacagagatagttgaggaaagcaacccaccagcactcattgttagattttctgtgtgttacaaatgggaaacatattccccttgtcttgtttcatcaagagtgttatattaacatctcttctttctctagggctttttcaattaaacacacagcccaaaccaccaggactgaactttctcaatgagaagaggaggggaattagctggacatgctgcagtgaaggctgtaggtagtagagtcacaggagctcttgcaaattagacacatctaagtgacactgtcaaaatccgggagcagggagggaggaaggtggccatgtgtatttgaaaaaaatccccaggcaatactggtagtattcttctctcttgacatttttctgcaaacattgtaataaagctttccataattttaagttgaacaccctccttaaagagaaaatgtgcactgtgtttggtaaatacagtctttgctaggaaagggaaatatacagactagaagatgagatgtcacaaggcagagctttgaggccccgctctccactcactcatcctgtggccccaggctagttcctccctcagtgcccaggcttgtctctgagtggagcctttatttgactcccagagcccaggaggattgtgagatgtgatagctgataaagcctcttataaattggaaaatgctgtgcaaaggttttgttgtcattattcacccaccctctcttgtcagagacatttttctaaaagtccattttgccctgttattctccactcttctgacaaatgtgcagtggttcatctcacccactgttggtaattcagctcaaagacaaattcttctgctgacattcagggctccccagacctggccccagcctacctctcttgccttattcttatattttagttacggggatatccaggtgcgctatacgcagtcaaatacaagctccacacaggcagggccttttgtctctttaactcaccaatttatcccatggcctacaacagtgcctggctggtactaggcatttcccaattcccatccagtgaaagaatggagtgccatctccaacactttctcttttctttttttttttttttgagacagagtatcgatcactctgtcaccaggctggagtgcagtggcgtgatctcagctcactgcaacctccgactccctggttcaagtgattctcctgcctcagcctcccgagtagatgggattacaggcatgtgccaccacgcccagctaatttttgtatttttagtaaagacggggtttcaccatgttggccaggatggtctcaatctcctgacctcgtgatctgcctgctttggcctcccaaagtgctgggattacaggtatgagccaccacgcccagcctccagcactttctaatgctgtccctacatgcagtggcagctctacccttacaggggttgggttccagactctttatgagacctccctgatgttcttacttgtctgaatgatagcttggactttaggaggtcatgggctagtgtggaagaggaggaacgaggaccctggggacagtaatccagccaccattggtagatcaggcatatgcccattggcctggcccataggtggtcttattaacagaagaacagaactctgtaaaatatttaaagaggtttattctgagccaatataagtgaccactgcctggaaaacaatctcaagaggtcctgagaaagtgtggcccaggtggttacagtttggttttatacattttagggagacaggagttacaggaaaggacataaatcagtacatggaaggtgtacactggttaggcaggaaaaggcaggacatcttgaagtgggggcttgcaagtcatagatgggttttagggattctttagttgacaattggttgagagagttgagctttgtctaaagacttgaagtcagtagaaaggaaagcttgagttaggataaagcgggttgtggaggccaaggcctttgttatgtagatgaagccttatcggtagaaggcttcagaaagacagattgtaaatgtctcttttcagaacttaaggtgtcagactcttacttaatctctcctagatctaagaaaggtctggaaagtgaaggcctgtctgcattcatgtagattctctacagatgcagatttccccctcaaaagacagctttgcagggccatttcaaaagatgtcaaagacatatatttgggggtaaaatatttttattttctccagggtctgctatctgtcatgtgatgttataccacagtcagtttggaaagtaagccacatgacaccaagataaattttaaaagcctgtttaatgagattttatggtttgtagggtgtgacttgcattgcatggctttaggttttgtttataatttggtattggtatcttattgccacaaagagcctgttctgtctataaaatagaggtcttgtgatttttaacctcaatgctggttagctgtgcctaaactccagaagggagggggtataacgaggcatgtctggcctcccttcttgtcatggatgggaattccatttttcaggttcctctggggtcatcctggccaagagggggtccatcccgtcagttgggcaatgtctgaattttatttttggtttacagtccctaggagcttgacagggacgtcataacgtccagagccccagtgacaagtagtaggggatagtccatgcagtcagagggtctctgaagccaacagggagtcccccacatgagtgcccatggtggggcccagggaggcagtgcttgggatccaagccagctgttgtcatggtggagacctaagagccatggtggaacgaagttccaggagcagttttcagtccagggagaatagcaggacgaggcagggaccccatcccagaggagccaggatgaagtttccatcaagagaagactgcatatggagaatactcacagtggtaacatgaaccattgccaagagaaccccacctcagttccctttactgtttagatctgcaggggggaaaaatagttttctcctccacgctgttatatgtacaatgtttatttagaaacagaatgcttgttccgtggtgctgcaaagaaatagcactcgaacataaatttagttctctcagcaaggcaatttttactttctgcagaaagggtacacctgctagcagtcttgctacgagagtacactgaacaaaggaaaagcagacatatttatcctttacgcatttggatcatccttactgctgtgtcttgcatccattggctggagctagacttcacaatctaaactgaatttgattggctaacagtttaaaactttttttaaataggtaaaggcaagggagaacaaaggaaaagaggaagttgcttatgccaagtagggaagggacataggctgcaagctggaacgttcctgtgagcatgtcctgcacaaatatcttggttaaagtacaaggacatagaatgtacttattcctttatatttagcagctacataggatagggcttaacaaagagttattagcacaaagcaaggaaacttgaaggaagttagtctttaaaagaaactactatttctaacacttacgatttattcttcaacaacaaaggaaactttgaagaggaaactttttactttctacagttctttatgaattcttagctgggactccctctaacaaaagacagattaacattaacaagagaaaaacaaacagaagtttaataatgtatatctcatctgttcatgggggaaaactcagagaaatgggtaaatctcgagtagatttcaaagtattatcttagaagtcaggcttaaataacatcgttctccaatacaaagagagaagggcctagggaaaggcccagttaagattaggaggccaggaaaagcactttaaacaaaggtaaggctttttatgcagttttaagtccctgccttctccattaattcagtctctagtgattcagggtcacccttctcttcctggggctgagagagagaaactcttacaaatggagatttcctttatagatgtaaatttctcttacaaaagggtaacagtttcagagcttctctgcatctgcagtttctcaaaataaacagctcgaaataatccttatgccaaagaggcatattttggggtggcatattctggtctcctacaatcatatcttaggataatgtgtcctaagccccatcacaaccagccaggatggttattcacctgatgaaatggaggctcagagaggccaactagctttcataagaacacattgctagttaagttttacggccagcacttgtgcaaaggtctgtccagacccaaagcccatgctctctcctctgtatcacaaggcccctggaaaccagccttgataacaaggcatcagggcaaaggtgtagttataagaacaactgaagcccaactaatacccagggtcacaaagtcagagtagaatagaagccagttgtattttttgctgtgtcacctgaaattccccaccaaggactaagcacaagtgtggcccagagcctgagagggagctcaggggacagctgagcagtaagtggcaaggtgtgaggagaggaggactgggaacagagctaggaaggtgacctttggtgacatacctcttccattcagcacatgtcacccagcacccggggctcttctctgaagttatgcatgtgaggcaaactttcctagcagggtgtgagggctttgtcttcagctcagcccctatgatagtacaaggcaaaatctggatatgtcactagtagagggttgtgactgcaagttgtccaggttcttggcattttgaacaaagaattggacaaaatgcccagaaaagcaaagaaagaatgaagcaacaaaagaacgaaagctgggatttattgaaaatgaaagtacgtcacacctgtaatcccatcactttgggaggccaaggcgggtggatcatgaggtcaggagatcaagatcatcctagctaacacggtgaaaccccatctctactaaaaatagaattagccgggcgtggtggaaggcgcctgtggtcccatctactctggaggctggggcagaagaatcgcttgaacccgggaggcggaggttgcagtaagccgagattgtgccactgcgctccagcctgggcgacacagcgagactatgtctcaaaaaaaaaaaaaaaaagaaaagaaaagaaaaaaaagaaaatgaaagtacactccacagtgtgggagcagacccgagcagcggttcaagggcccgaatacagaatcttcttgggttcaaataccccctagaggtttcccattggccacttcatgctcacctcctgtaactgaagtggtagcccacaatcagtctgattggttacaaacagccaaattcccatctgcagtgcagacaaggtcaaagggagtagcctctggtccttttgttacttaagcatggaaagttagggttttcctttcaatttagtcctaggaagtcggcatgaaacaaccttaggttccctgtctccagaccctattctgctgcctcagatacgtgtatcaaataatgcgccatttcttgtagcttcagtcctcaaccttcagcatcacatgcctaaaggagtgctccagatctgaagaaagcctctagtgtggtggtaggattttgttttttaaattagaaactttaattttagtgcattatataacctttaaacccttagggcaggggtcctcaacccctggggcacagactggtaccagcccatggcctgttaaaaactgggccacacagcaggaggtgagcagcagcaagcaagcgttaccacctgagtgccacctcccatcagacaagcagcgacattagattttcgtaggagcatgaaccctattgtgaactgcacatctgagggatctaggttgcatgctccttatgagaacataagtaatgcctgataatctgaggtggaacagtttcattttgaaaacaccccccaccacacacactgtccttggagaaattgtcttccatgaaatcgatccctcgtgccaaaaagtttggggaccgctgctgcaggggcaaactctcatgtgcattgcagtggaaacctctcagtgaaatgcactgttttccaaacactttgagctgctcactcccaaaaggaaaaagggtgctgcatctcctaggaccacagaggctctggtgcctttggcatgtccactaactggctttaagagcaacgtgtacatccacacaggtgacctgaccacaacagggaagatctccaagacaatggcaatagtcctgcaactagctgttcccatggggggaggggggaggatgagagagggagggtgtttctaagatagcattttcttggcagagagaggtgaagtgactcagcctcccaggagccttccagaagtcctggggaatcagctgccactgttgctgtaaaactagctcctcccggtctcactggatgcagtcagaaaaaagcagattattcacctggctaatacttggctcctcggtccccatcccagtcccagcttccagttttgtggctgtagcaacatttcctgaaggggtcaggacttatttgattgaacctgctgacattgggagagcctagtctttggtcaggattgtgcagcaggtggaagagagtttaagcccaggtcagtctgacttcaaaagcttttgtccccataaaccagaaagtatctgagacgggtctcaatcaatttagaaagtttattttgccaaggttaaggatgcacctgtgacgcagcctcaggaggtcctcacaacatgagccaaggtggtcagggaacagcttggttttatacattttagggagacgtgagacttcaatctatatgtgtaagatgtacattgtataatatgtaagatgtacattgattcagtccggaaagcaggacaacgccaagcagggagggggcttccaggtcacaggcagataagaaaaaaacagttacattctttagagtttctgattagcttttcactgaatacacaatttacaggaatagtcacttatgccttagtctggcttagtgaaacaatagggcaaaaaaagaaaaaaatcaggtatgcattgtctcgtgtgagcagagggacgactttgagttctgcctgttatttgtccacaaggaatttccttttgtgagagagggagggaggtgtatatcatttttatagttgtgagggaggtatatagcttttttataattgtgaggggggtatatggcttttttatctttgtagctatcttatttaggaatagaataggaggcaggttggcccaagacaattcccagcatgaattttccctgtggcttagtgcttttaaagtcctgagatttattttcctttcactctcccaatctttatgttcagggatgttccactgtcatgccatccttgatgcagacaccaatactgaatacggagaaggtcccactccccaggggggcctggatcagcctgctgttggagggagactttccctagaatgaagacaagaccagagggcagggaggcaagaggcccaagggggaggggaggagtggtggaggaggggctggtggcggcagtggaacatctgcatgacctacgtattttccagctcctttaaagaccttagaagagacctttgtttatatcccactatctctcagtctcatagctctaagcaataattcctacatcactttggtaagggagctttttcattgtaagcccatttatactcataccagataaacagagaaagatgcaataaactgttttccaaaagtagtggcatctatgacattgacgtattgtttttaatcattttttaaaaactcaaatctatagacaaattgctgcttttgacttagatattttcattggcccatggtcatgcctgcttaattagcattacttataatggagaaaaattaaagaaacctaaagttacaaaaatagaattaccttgctaattatattataaatattcatgtgttaaaatgttatggttattgaaataattttgtgatatatttgtaatcacataagaggaattcttctactataatagttaaccatttaaaaaagcagaatacaaaaatgtgtggtcccaactatcttgtaaaacgcatgaaggaaaaatgcaggaaatatttctgcataattattctggtagtctctgtgttacataattatggggccttgctgttttttcttaattttctgtatttttcaaatttttagcatggactggttttcctcaaaagtcccgactctggacttctctcaggcctttggaatttgcagagtgtggctcagcttttcttgttgcccaggaaggtctatggtgtgtcctcctagtggtgacagtgaggcccctggttcatgacaagacacacactcatgaatgctcaactctgaacttggcggcgcagctgtggacgcagctgcggaagcctcaagttgaaacatgagccctcctctctcctctctcaaccctggtgctctgatgtccaaggaaaatttatccatgtcacttttgtttgtcttaattcaggtttatggctcctttgcatcattctggattgagaaatgaggccaaatgcgaactaatggaaaaaagtaaggctgatgagttcatttagaaatgaactgttccaacaacgttcttcttgacatctctcaagagggccagccgttcagggtgcactttgcggcctccacagctctgctccttgctggaaacatcccccttctgtgtcctccacttgcccaagtctgacctgtgccttcaaggcacttaacatgcagttgttgttgaaatatctcaaggtgactatacctcccctttgcagctttttgtgacaaccaccaattagagacagtgatggcctccttctgagtgcttgcctgctggtcagaaccaggctgagctgatgcttggtaaaatatagctgcctgggccccatccagcctattgaattagaatctccaggaagaaggctgttttatttttaattttgttttcatctcatgcattcagctttttctgcctcatttgttttgacctgagaacagagatcatatgctgaacaacagctagcccagagctttacaaacaatagatattcaatggatgtttgttcaattgaactgaattagatacagtcagagcaagggcacatttcagtccttaagttggaacccttgccaaaatgtcacaattacacttgtttgtttgtttatttatttctaacacttcctaatcagcaggtagaaatttattaattatgaaaattgctttttatcatctttcagattgtttttgcatgctgcaaaacaatgtcttctgtggacattgagactgtggatgtgtgtggccagtagtctctagggatagtactcagagtggtagccaaggagaagagtggttcaggcacactcagaaggtgccattctccaaggtggttggcagggatgtccaggcaccagtcacagcaaggatccatcatgcctccgctgctcctgtaatcgagatgaaaattactgcccagattttgatggacactctaagactgaaaaatacagctgcattgggtttggctctaaggattcttctccagtgtgtttataagatggcaatttaaacatatatacagtggagtcactagaaaacaacatagtgatttttctaaaaaaaaactaaattgggtcaggcatggtggctcacgcctatactcccagcactttgagaggccaaagcaggaggattactggaggccaggagttgaagaccaatctgggcagcatagagagacctgtctctagaaaaacatttttttaaattagccagacatgatagtacatgacggtggtcccaactactcaaaaagctgaggcagaaggatagcttgagccaggaattcgaggttgcagtgagctttagtggcaccactgaactccagccagggtgacagggtgagaccctgtttctggggaaaaataggaaaaaaaacaatttagattggataggacttagagtatgtgccctggtacctttatattctagttggaatagagtgcaccattcgccctgtctggaatattcaccccactctctccctgcagtggtgctttcttctaacaacctcattttggcaattaggtatggaaaactccatagaatatttggagttattaaattttcacgcgaataagtcctaaatctccagggcagaggccatgatttctatttcagttcattttccagggtttggcatgtgcatttgttgactgaataaataaatgaagccctgctgggaaatgcacccttagcagtttacagtccccctgacatgtgcttctaactgcctccaagtagtattaataaagcagtagtcatatgccagcctccgactggggatcataattgaggcactgacatgatgagtttatctctgataaccgatggcaatgagacctgtcctttgcaaagagcaaagccctagtcttgcagtgtgtgaggcattaagactcagtagcatgtacctgtggctctagcttcctcagcactgatgtttcctcttggaaaaacccaaattactttcattgtctcactttccttttaatacttagtctcttggagctttgtagaaagcctgagaagcagtgtgaatggcaagtcaggggcctcgctgcaatgagctggtctccgttgccaccacttaccacgaggtgcaggctctgtctgccgcccccacatctcgaggctcctttcacagctcttattctctggagcgagaccgcactttaatctctgctgttttccgcatacaaggtaaaaaatggaaaattagagatgttatctgaataattaattcaagcctcaaatgaaaaggaaattctaaaatatccagatcattgagacttctgagtttctattagtctggacatagatggcttgtcttgtaaccagtggaaatggcagtgagtgcccttgaatctattaccgtatcctcgaggccagagatgtctaagcatcagcttacaagtgaaaaatgtcttagtgagatgataatcatcggtttgccatctgataattgctacagagagtcaaggaggtagtaccaattcaactgtttatctcatggaatttaatgtgaacctatactacactgttgagcaaagattccacgaggccggaatcggtgggagaggccgtggggctggtaccttcccggtatctttggtgtatatttggtgcatctttggtgtatcagagacaagcttaggagatggtcacgggcatctaagcaatagagatggactgcacgaaaaccgtgccttttccctcatctgtaaaattgaaaatactgtccaaaatcccacagcagactatagcttttgtccgtgagttcaaaggttccaagtttagtcctgcataattgagaaaaagacttaaaaaaaaaagtttccaaactgcctcaattgttgtcccttccttttagctctgaaaaatcagaaagattagctgtgtggaaaatgtcagaagagactttctgttaaatatgttaaagaatttcagcagtaagtgtcgcctgagacgtttaagaaatcatagtagctaagtgtccccttccttttaatgttcttctagaacccagtgaaactttggactgaggtgattcctccacactcccagcccacatcacagagtcttagtgatcatttctcctttgctgtcagagctgagtatcaaatcccatttttttgttttcaaaatagaattgttcctttcttttaccattcccctgaataattgctaataaagcaatatgccactcatctaggtcacctgatttgctggttttgatcacagggatatcttgatgctgttggacttttccccatggagctcttactctgttagacaggtgtccattctgctgtggctcacttaaaaagcaaggctttgtctttgcctcgttgtgatttctttcttctatcaatgttgagagcttgacggaggtgctggtgggttaattctcctccttatcctttcaattcccccattctatcctaaatcactacagataggcctattctatacatatattgccagttcttccttatttccttcctcttccaataggaatctcttgaggtaaaccacctctgccagtcctcctatcacagcctgctgctgagatggtgcagcctggtgtggctaaggcgtgtggcagccagaattggaactgagtgacagttagagctagaaagagcacaagagtgggcagagtgatgacagggaaggaacctgggaaggaacgtgctacctgtggccccatctggaatatgaactggctttgtctcctttcaagggtggaagagggatagaagagggtggaagaagggtggaaggagcgagagattcctttatattgccaatataggtatgaaatgtaggagagagagatgactttatattgctaacggccatgcctgcttcactcttcatcatggctctaagttgctctcataaatgctctgagacatcaacactgaatttatatcagatatggccgtgttcatccggggcactttgatcacaaaaggaaagtgctgctgctgctggttcaaccccactgtgtactgatgatgggcattatggttcataatcccaatgactggcacacttatcagagctgcagtccaacatggggccttcttctggcttgatgggtgatctggaaaagcaggtacgatgacctcccacactgatgtgagagctgcacactgtccctgcacccgcccaggagccgcccctgctactttgtcagtaacttctgccacggtgccacttgtttagacttgagggaccacttgattggtaaagcttctccctgcatgtagaccttggcattcaggagagctatacttgggctccccaagacacagcagctctgtccaccttgctctccccctcattgctgcagtgtgaagtttctaaggtgaacaaaacctccgtggccccccactctccaatggagaaggtcttatttcttggtgtgccatgggagacccctttcacacacttccagctgcccccaacactgtctggcagacagctaagaggagctctgctgaatctggaagctcagcatgcttctagtaaagatacgcttttccacgagaagttccttctgcttagattggatttccctcagctcttgccccttccttccaggtccagcttccatgtcctcccatctgggaaggtggtcccagcatctctctcccttctaggggggaccatgcccaccaccccattattgccctcaccattgtgtcatagttgactgcttaaatgtctgcctcctgcaccaaactctccgaggctatgagcactgtttaagtcctctctgtatccatactcagcatttagcacaaggcctggtacacactaaagactccatccacatttcctgattgactgggctaaaggaaggaagaagaagccagatgcagtggctcacgcctgtaattccagctctttgggaggtcaaggtggatcacttgaggtcaggagttcaagaccagcctggccaacatggtgaaaccccttctctactaaaaatacaaaacaattagccaggtacggtggcacgcacctgtaatcccagctactcgggaggctgaagcaggagaatctcttgaacccgggaggcagaggttacagtgagctgggatcgcaccatttccttccagcctaggcaacaagagtggaaactctgtcaaaaaaaaaaaaaaaagaagcaggagaataaaaccaaagacaggatttacttaaaaataaacccaaagatgctgggtcaaaccacccaggggatataagaatttaaaagagagcatctttacagcaccttgatcctccatgacaaatgataacatgcttttgagtattaatttcaatgaggatacaaactcagcactgcatctgaaaccctcctaagtgtatttcttagaactgtaatccctgtctggccccatcacctaatagcaggcaaatgaggacacgaccatgaatggaggagggaaacacactggcttacaacagcctgaggctcctcaggcttctcaacaagcctgaggctccctcccaagccaggcagctcaggccatggatgaggcagctaactggccgcagggagtctcaaggtccacttggggccctgctgctcccctgctgcgtggtcagggcaggcagctgcccttctcaggcttcagcttcccggtgaataagaggaggggctggcccagaaccctcccatgactgtcactgtgggttcctgtgtgattcacagtattgtgggttggcttttggagactggactgtagccaagcaggtggtggtgccctggttacgggaagaggcacagtgaccccactcagcacagcacaagccctgctgggctcaggatggagtgaggctgaggtcatcatgggggctcctcacaaatgcccggtacggggccgccccgggaggatgatgtggctggctcacagcagctccacctccctttctctcctgtatggtccgcagggctcctggagctgggcgccttgggcccctggagccgcactgtggttctgggaggtgaacacatatccttttcctctgcaggtatcagtaggtaaagaggaaacttttccactttcaatcaggctagtgccttcctgaggaagaaacagtatttcctaacattgagaagggaaaaatgggtctctttctcacatctgtaagttcccattcattctgtctctgtgtcttacacacacaccacacacacccacacacgtgcacacacacatgcgcgcacacacacacacaggaataccagttctcacctttcctttctgtgtaaaccagaggaggtgctaaatattatgaacaggaatttgccccagctaacctgacgaggccctcctggctgccaccttcctccctctcccacacccacagccccctgcccattcctctgcccatacaaaccacccagatttcagcaacttcgctgctgaacgcctccaaacataaacctcccaaataacccagagctgcaccaagcagtcctagacttgagcaaagcagtgaatggtccaatcatgcccctcctggagcctggcctccagctggtttctcttacgtgtgagtgagaatggtgtgcgagcgacaaggagcaaagaccaccccaccccccgccccccaacacctgccatcaaagggctgcagagtcaaaagtgggaggggatgttcaaccttacacttattggtggatttttttttatgagcgataaggcattatgtgttcctaaaataatgtgtctgactggcattttaacaagttccttgtattttaaatcatgacttcctgtgtggatattatctggcttggcttgatttgcttattaaaattttctccccctaatgttccctttcagccagcaatgagtgggattttatttctttttcaaagaaaagaagcccacacaatttagtttatgtaattctgtgatattcttccacacaatggccagcacaaaagaaagcttttttagcacatggctttgaggctgaaagcacaaattgaggcacaggtttcaggaacaggtgtctgggagctgaagagttagacagagatggtggtttagcagccacctcccactctcctcccttacacctgagagcccctacacccgcccctgtcccacaacatccctcatacacagcagttcccaagcagaggtacaaatgggtaagcaggactcaaatctcaggatgtgagagggagaggaggacccaggggcagtatttaatctcatcccaacactttcttcttatttgacaggtgatgaaggcaattcccagagaggtggagcccttctttttagcctaacgaattgtttcccttaacagtcgtgactcagaggaaatgcgtgggctgcagtgatttttgtgatctcttgtgcctgccattgggttgggtaggaggtttctgcttttagactgttaggaccagcagggcccagcagcaagtagagctctggataaagctgccctggcctgtctccaaaccctccaacccaggccatccccacttctcctgtactgcctcagggattcccggtgcttctgctggtcctgcatccggacacctgacccatcccagtgcagtccaggaaccaggaactcaattcgagcaattctgggcaccaagcctagtgcttacaagaattcctgagctcaaggagcagagccccatgtccaggtgcaccccagcccacacgttacccacaagtgcattcattcattcaacacagttatttatttatttatttatttatttatttatttatttatttatttatcgatatggagtctcactctgtcacccaggctggagtgcagtggcgcaatcttagctcactgcagcctccacctccctggttcaagcgattctcctgattcagcctcctgggatagctgggattacagacacgtgtcaccacacatggctaatttttttgtatttttagtagagacggggtttcaccatgttagccaggctggtctcaaactcctggcctcaggtgatatgcccgccttggcctcccaaagtgttgggattacaggcgtgagccatagcacccagcctcaacaaagtatttactgagcatcatctatgttcttgccaggcactacttttgctggaaatgcagacctaaaggagctaggctgggctgctgtcttggtgcctgccttctaagtagaggggactgacaaaaaataagttgacaggtaaggcagttttagacagaacatctcattcaggctctgatcgaaatctccattgaggccagagaggaagctgcgggactgagaacagtcactgagttcagagtggaagctttggggtaaagcttcccctagaagtgactgagccaggtagactttggaatgtggtcggaaggcaacacagcacagtcgctcagtccctaatgaactctcttcctgcgatgaccttggcttttgtcaaagccttgtaccaggaatctgccactataatcgtgattaaaagtctcttaagatcttactcaccacatttcattgtgtttcctacagaaagtctaagatgaaacatttcgttaagaacttggaggaagaaaaaagtccctgtattctgatcataagaactaagctttccttttatcttcttggctgccgagaagctcagagaagtatctgaatctcaattactgcaattctgtccatctgttttataatttggagagaatgcttaagaatgataaaagtgccctcttataatcgcccataaacaggctcaaatccccatttcctgccacacgatggatgacctcagaatttttattaacattctgagctgggttttctagcaacctgagaatagtgaaactggatagtgttttgttgttgttgttgttgttgttgttgtttgttgtttgggggggacagagtctcattctgtcacagagtacagtgcatgatctcggctcactgcaacctccacctcccgggttcaagcgattctccctgccacagcttcagcagctgcgattacaggcgcccgtcaccacgcccagctaattttttttttttgagacggagtttcgctcttgttgcccaggctggagttcaatggcacgatctcggctcactgcaacctctgcctcctgggttcaagtgattctcctgcctcagcctcccaagtagctgggattacaggcatgtgccaccacgcctggctaattttgtatttttagtagagacggggtttctccatgttggtcaagctggtctcgaactcccaacctcagatgatccgcccacctcagcctcccaaagtgccagcattacaggtgtgagccaccctgcccagcctaattttgtgtatttgtagtagagacgaggtttcgccatgttgcccaagctggtcttgaactactgacttcaggtaatccacccacctcagcctcccaaagtgctgggattacaggcataagccaccatgtctggccttgataatgttttaatgagatgtacaacagtccgctgcatagagcaaatgctcagaactatttttgtcttccttcatattgctacttcctgatttctgtctgttttgtattttcctattttattatacatttcttggtttgtaaattttctcaaatcctttgtagaaaaagataagctttgattttttttttttttaaatcccattacccacctggtggcgtaacaaagccgagtgtaggatagcaaaagctgcaggcatcttcttgatcaaagtaaaatctgctcatggactaaaaaagtattacgttctttcttccaactaagtaatgccagtttctataacctcatcttatatactttaatgaagcttccttcaagggctgtgtatttcgcttacaatttttgattccttggtgtagaggccatttttaagagtcattttctctattatagacatgcctttgtctgctttcttttcatttctgagatggcactcactcacggctttatattccaagacagaaatgctattaatgacttagttagataaaaactgacagagcagaatcttttgtctccaggttcttaaaaaaaaaatccatgcataataacatgttccatccctagaagtgatgattttctgcttttaagattctgtttttttacaggttttgtttttgttaatgtgctatactccatgagactatcttaaaacatattaaacccacaaggcctattccaagattaagaaaaaaagaaaaacaacaaagagcacatcacttaattcaaaacatttcaacaattacgatgtcatttaagttggaaagcaaaacaaataaacaaaacattggtggctcttctgctacaaataggaaaaaaaaccaaaaacaaaaaaaccagcagatggtttttactcccatagcagggcactttgtacagtgtatttaaattgctctcagaggctcacttatcagacccattttttcaagcgtcaactaaaatctatgcttgacatagcccgtaactagggccacgtgattacaaccaataactggaaaattacagtgttattgaaactattgctgatattcttgtggtcctcctatcagttcatattgtctatcaccaaagggaaaagaagacaaaagatacttgagttattagtgggttggagaaaaggctgggagaaatttagtgatatccgttgatttcccatacatacagagattgggagggccaccctttgcagagaggaaagagaaaggaggtctcctgttggggagatctgctttagaggttaggaagaatggtggagttgtaagacattggaatcactgtctaggaagacagtggccttttatccagggctatttaaaaacaggacagagcttcatctatctcccacagttcagatgtgaagagagaatgattaaattgcttcttccagactgatgagtctatagtatatgctagaaacacttgtgaatgtctgggagaaacatagccacaaacgaattgcatgttgagcaatcagctctatccacctgctgtgttcaagaagcaactgttgacatttgctcaaatgtgctcaccacaaaccaaaacaaaataaaataaaaatggggtaaataggtgagggatggatgtgctagctaacttgattgtggtaatcatttcactatatatatatatatatatacacatatatatatatatatatacacacacacatatagtgaaatgtattattatatattatatatactgtatatcttatatattatagaacatataatatataatatataatatacagtatatataatatattatatattatattgtattatatataatacaacatataatatataaatataatatattatatattatatatgttatatataatataacatataatatatttatatataatatattatattatatattatatatttatatataatatatttttatatattataatatatttatatatatttttatatattatgatatatttttatataataatatataatatatatatattatatgatatatttatatattatatgatatatttatatatattatatgatatatttatatattatatgatatatttatatatattatatgatatatttatatataatataacatataatatatttatatatatataaaatcttcacattgtacaccttaaaagtcatacaattttatttgtcaattatacctcaataaagctgggaaattaaaaataaaaaggagcaactgttgtgagtctttaataaaacatctgtttaggacatgatggaatacaattttaagttcatctccttcctacataactttgtgttcatatctttattttcttctatgtaccatctactactaaattatcatgcctttctgtaatttttttttttttttgagacggggtctcgctcttgttgcccaggagtgcagtggcacaatcttggctcactgcaacctccgcctcctgggttccagcaattctcctgcctcaacctcccaagtagctgggattacaggcacctgccaacacgcccggctaatttttgtacttttagtagagacggggcttcgccacgttggccaggctggtcttgaactcctgacctcaagtgatccacctgcctcagcctcccaaagtgctgggattacaggcctgaaccaccactcccagccattttatctatttttataagccatcttaaaccctttctggaacaagaagggatatcactgaataaaataatttctataaattaaagctttgggggcttttcatggcaggaattatgccaggtacaggggatatacagaggagaaaacttcacagtgtaggagtgaacatggacagatcaactagcaacagtacctaagaatccctgcaggggaatgggattcctgtgcatcatggagcagaaagttccactcttgggaatgggaaggaggcaaggagcggttacagcagagttggtgctggagcataattctgatgcagaagtgcagatcctgcctgcaagtaggaatggggaggatgtgtgcaaagacagggtggtgggagagggtggggtgcaagggacggctttgaggctgccctgcttaccccggacaaatgtcatcgttccaatccagtaatcactgacaaacgtcttctttgactaatgtttccttctctatctttgctctcaccatgtggacagtgatcactggcgtaatttgacagtttcaggagagttctctagtttccaggggattttggtaaaaatacaatagcagaattgtcttcagcaaaagagaaagaccctacaatccttttgaggccctgattgaaaccacgtacataaaaatctttatcttaggctcttcatcatgaatgcaaatatatcctactcaatcgtaaaccttacaaataaaggagcctctcccctgagcaccagtatatagagcacctttacaaacacactaggctgtgtaacccttggcactttgattttgtaagaaaacctgaaggtttcttgaatttaatgcaagttcataagagtgaggactctggggtgacatgaaggaagcctgttcagtgacggagcctggctgagtgcccaggccctatgtctcagtgaggtttccttcctaaagcattaccagtaatatcttagcaagagatttttatttattgagcaggtactgtactaagaacttgacttgcattgtctcattaaattctgacaacagcccatttacagaggaggaaaccgaggtccagaaagattaaattgtccagtgatagacccacagctgggaagctggtagatgctgcctcagctttgattatggtctaattcataattattttgaatctctgtaatactgtaagatggtattagcccacttaaagtatgtgggaactaaacaaaccttgtgctcttgcagcagcctttctgtttggggattttacaaaggtctctggacagagcctcctggagggctgtcagtttactgagatcctccctgaactgcccagaatagccatggtgccttgagataggtgggtggttcctgcttccctggccttcagcgctttgccagtcttcctgagaggagggatggtttccaggcaacaccatggtccatctattttcatactgctatagtgacaagcattttgaaaaaataagaaatatggccccaataaggtgatgagatgctttttggagtctgtcttgtctgcctgtcataattctgcagcaaccatcagtagggccaaaggaattccaaacaggagacacagatgagtgaaagggcctgcctgccccatggccatagaggaccaagactcagaatgccaacgctgtgctttctcaggctaatagactttttacaacatcctggtcttggaggatggaaaaagtgcaggcctaaattactgctaactagattgatctaactgaaagagtagactattgctgtggtctgctcatcatagctggtaaacaaaaagtcaataatttgcatttgattaggtgcataagaagttacagttcctgggatctaaacttcatgagtcaacacttttttaggccttaatcttctcttcttgaaaactacatatagaacaacatgaacttcaataaccaggaccccccaaaaatgttcatttaaacgcaattttaatatactttgatgaagtcagaatcacccttgcttgtttctgcatgagttctatttgctgcctgtccttctgtattttcaaagttatctgtgcccaaaacgagttagtgctctgcatcaggttggctcattttaagtgctcaaagttgtaaacaatacaaaaatgcattttttctcatcaggtacaatgttttctacaataacattggctccaagggagatacagtcctctgagattggattttattgaaaatcatcgtattcaaagagtactaggatgtttgaaatccttcatagaaacttcatacagcccgaaggcattctgtagagtgaaagatgtaaatggaggagtgactgcctcacccagcagggaccactcctaattctgggctgtgtgtagggacctgaatgctgcagggatcactcagaggttaataatgataatcatcgtttgccttaaagaaggataaaatcagatccaatctaattgacgttggagaactcgagggatggcatttggttggggaatagtcacaccttcagggtcattctgcacatcccagtccttctggtatcaagtgggttagagccgggagaggcagagactccaacaaaacatggaaacgcaggacaccctggtgcacttgtgtttttgttcttgctgtccccgtgtgaacccagagctgcagcctttgtcacgaggaagatgctctatgccatgtttcatatctgcccagcagggcagctcactcacagcgcgtgtctcccagcacatctttcgttttcgtgtgatgacggtgactgagttgccggcgtgccctgaccctgctcactgtctctttgctcccacagaatctgtaccagaacaggtttttaggcctggccgccatggcgtctccttctagaaactcccagagccgacgccggtgcaaggagccgctccgatacagctacaaccccgaccagttccacaacatggacctcaggggcggcccccacgatggcgtcaccattccccgctccaccagcgacactgacctggtcacctcggacagccgctccacgctcatggtcagcagctcctactattccatcgggcactctcaggacctggtcatccactgggacataaaggaggaagtggacgctggggactggattggcatgtacctcattggtgagtagaatgtgccaagtgtattattcataattcacttttacatatgctgtcacattttaataaactctacaatataattaaaatatacaagcaactgtgttatatgccagattctaacacactgaagaccactgttgcatgaccttgtttttctgcaaaatggacaataaggtctctcttgccatctccattccatggaagaaaatcatgagatatagcagagtcaggtgtggttaaacacaaatgtcattatcatttgcaactatagaagctcttctacttgtgaataagttaatatcaaagcctgtttttaagtctatgtgcttataagacaaagtaacaccatatgcccaaccaatgtatgtagaggtaatttcactttagtttccagcataatctttgccagctcttccaacattcttactgctttgtattcaacagacaagctgggattatactcacaggcatacaggcatggtgttggagaaagttgacttgccttactttaggtggagatttattcaaaattttgaaagttccaaagttgaaagtttactagaagaaattgttctatgtgaattttctcaggtctttgcaaacaaaacaaattatgcaaataagttggatgctgaggcaattatttttatgaaagtttcaccattcccacggattggttttgaaaatcttataattatgaaaaccaatttaaatgaaaaatgtatttcatctattttatgtgatagaatcagctgtcatggaaattgatgtgtttacccaaaagtcgagttataattgctggaaggccacaagagtcaacagattcaacaccgggtcatccgaggccaggccttctgccttcagtctgtgctctgcaacatttgcacattcagacacacaacaccggatttaacatcacagaaagtaatggattgttatgagtagtttacaacctgcacagtttttctgataaaataaaagggatcttagctgactaactagttctcagggaaatattcttgggtctcttaaaggtttttccatcagcttggttagtgcgtttataatacacacattaatgtaaagatggaggtacataaattgttgaaatttttacacaaatagctgtgactagctgaactggatttccaaaagttaaaattcaatttatttctgaaaaaaaattgttcttgaataaaagtagatactatagattaagaacagagattgcaaaataacagcctaaagagcatttttttttttttttgagatggagttttgctcttgttgcacaggctggagttcagtggtgcgatctcagctcaccgcaacctctgcctcccgggttcaagtgattctcctgcctcagcctcccaagtagctgggattacaggcatgtgccaccacgcctggctagttttgtatttttagtacagacagggtttctccatgttggtcaggctggtctcgaactcccgacctcaggtgatccacctgccttggcttcccatagtgctgggattacaggtgtgagccactgccctcggccgcatattttgtttcatttacattgttttgttttaaatttgattgattatccacacttaaaatgtagaagtttcaagttgaaacacaactttctagcttctttcacaaaagcctccaatttggcagcctgagcctgtgataccacatggttctaatcagctggagttaagcgtctgcaccctccctagactggcctgtaaccttcagtgttgccacagtcccctcccacccattcggaccttcatcatgagtgtcttttgtttagcacttgaggcaattaggtttaggctccgaatctagggttttggtttgatttggtttggttttggttttggttttggtttgttttttggtttggttttttattgaaatggagtctcactatattgcccaggctcaaactccagggctcaagtgatccttcagcctcagcctcccaaaatgctgagattacaggcatgagccaccatgcccagcccagatctagttttgagtcaactcaagggcatcttcccgcagctggtgagtgctgatgttattcctcaagttaggtacccactggaagagaagcctgtttggggagaaggtaatgagctcaagatggaattactgagtgtggaacacctgagggacgtgcgtccacagtgagtgaatgaatgaatggttctgaagctcaaccagggatccgagctagggttgtagatttgggataacagacaccttgggggtggataagctcactctagtgttgtgtatagaaagagagcaccagatagtcacagtgagagggggcaggggagaggcagacgaggaactcaaacagaagaagaggaggtggtgaaggggcaggataaccaggagactagagagaacaaagaagagggtagtagaggagggggtgggtagccatatcaggtattacgaaactccatgaatgaataagatctggtgttaacatgacattttgactgagacaaaagtaaccacaacttatcatcctagaaccttaatttgacagtttgttattctcattgtagctacacatatataactgtgaagttatgtaatgcaaaatgccaacactttcaacggcatagcatttcaaaaataacttccaaatccgaaattgtctgtgaatcttaaaagtcaataatgtgtaagtccttagtagcttatcttccacattttccgtgctttgccagagatcaaatcagagatctaggctgagaaatgtagagatggtgatttcatctcatctgtcatttcatgaatgaggagatgtcgaatcagtggctcccacagtcacacagctgcctcccctggctcaggactcatgctgccacaggggtagcacagcattgtggtgcagtgttgggtatgggccatggcacatccgtgtgccatcaaatgtccagcagaggccagggttgtgatgctttcagcatggtaggacttctagagctctcaaagcaaataggactgttctgacataagagggggaagatacctggatgtagagggtgaagtgtggctgctgatttatggaacccaactcttgaagaattaaagtttttcctttacatcaggcaccctattagaatctagaagagcagaagctgtataaggcacaaacagaattcttgtgtccaaagaaacaatatgaaggaaaggccacagaaggggagaaagtggcattgatttttaggagctcctctatcactttatgcttagagttcctgcttctgcaagagaatggcgcttctacatcattggcctagtagtaagaaagacaagtagattctccccatatctcccgtcccattattattgttattattattattattattattattatcattattactattattttgagatggaatctcgctctgttgcccaggctagagtacaatggcacgatcccagctcactgcaacctccgcctcccaggttcaagcgattctcctgattcagcctctcaagtagctgggattacaggcatgcaccaccacccctggctaatttttctatttttagtagagatggggtttcaccatgttggccaggctgatctcaaactcctgacctcagttgatccacccacctcggcctcccaaactcctgggattacaggcgtgatccaccgcgcctggccctgtcccattatttagtgaagtcatggtccagccacagtgggagaatcctgggagattttttcccaagatttggttgtcagaaagcatgaattactctgaaaaatggaagccatatcttttttctgatgggtgtaggagacctgggtagtatattgattctctcttttaatcagttatgggctcacttgctcattccactcttaacagcaatagcatgtttgttgtccactcttctattatagattatggcatggaaatcatagctatgatttttattttgaagacaaatccagagaaaatatattacttgtttcttaggtatgtctgtttctgtaagctttattagacctttctgattaaaattataataatccacaaagatcctttctctattataaactgaggagcaggtggtaggattctacacaccagaagaaatgcataccactcagaaaatgtaatcttttcctgaggaacttttctgtacatgttatgtacaaaatgtacgatgacaaaatcttgaacagtactgatgtgagctagtgcttcaagttattattaatggttttacatagtaagtgtcatagggatttgcaatagagggccctatttttggcccagattctaagcagaaatagctgcttattagatgttggacactggtctaagaccactagctgtattagctcaaggaatcctttcaacaagattttgaggtaggtacttatagtatttatcctcattttgtagtgagtgattaaataaactgcctaagatcacataataatggtagatgtaagcttcctgcctcaaaggggatgtaatattgctcccacaaagaggcttccatcatgacaagaatgcagaaaataacagcctcctggtagagagcctagagcacccattccacactgaggtggagagtgtggcttggcccacagcatccattccagttctcctctcccctccccttttctctcctcccctcccctcctctcctctcctctcccgtcccgtctcctcccctctactctcttctttcctctcatctcctgtgccttcccctagtgcagaatctggtcctctaaatttacatttcccagactcccatgcagccatgttctggatgcaaattcgattcatttagctgcacctgtgcaagatcgggaaggtgaatatgtgaaatgtggggaagcttacatctaccattactatgtgatcttaggcagtttatttaatcattcactacaaaatagggataaatactataagcacctacctcaaaatcttgttgaaaggattccttgagctaatacagctagtggtcttagaccaggctcttgggcctgtggctgctacaagcatggccttgagaaatggagcttttctgcagcagcatcctgtgtctactctctagcttcctggacaccaacaggcagtgggggtgggggcaggcagtgacctactccgcttgccactggctggtcactgtcttcgccggtggagagacagccgccatggcctggacagcagcctcctgccctccagattgcagtgactgtactgagttttcatattcagcaggtcccagggcagcccttgcgagtgaggcaaaggcatcagcctcgttggagagccagttaggcagttatcctgattccagaggccctgcctagagtccacttctccagccctgaattccctgcattaaatccctttctgcataaaatatgtagactgattttggatttctgcagctgaccctgtcaatgcagtttgattcctaagcaaagactagtaacttttctaacaactggtaacaaatgcctttggggaagggtttgacctctcagcccaggcaagaatactgactactctatttttcttgtgtgatacttgtgattaagtgttattgttagtgtgagggaaggggatgcttatcaggactaacagccagtcctttaaaatatattgtgtttaaatgtgtacagcaaaatatacttttttctcattattgtgtgtgtgtgtgtgtgtgtgtgtgtgtgtgtgtgtgtgtgtttgccatcctcgtcatcctttgctgattcttcccacctccccttcatccttttctcattcatgttcctgtggttccttgataattaacccccttttgtacattctatattctaatgaaattacctgttttcttgaataaatctccaaatatattagaaactccctgagaacatagaccgtgacttgttcaccagtgtatccccagggtttagcactatgtctggaacagaacaaagtacccaatacccattatctcatgcatgaatggacatccttcttccaggtgttattgtctataaatccctgaccctgactattaaagggaatatcccagtgatcagagtggagaaattcggggaaatactatcccttggagaactgctataatgaggcaaatttctacctgggtgtgaaacttgttatatctctgctgaagacccagggagctaggaaaatattatgcctttttgcagaaatgaggcaattactgtaaaagatgtattatgcaatcttcatggtaacccaaacagggctgtgagcacacactgtgaataaaaagacaggcaaattttgcaaacaagcgattttccaaaggatacaaacagttcttatcggtaatgagtgttcatttgcccagtcatttttttgccagagaaggggcagcctaaaatgtgcaatccacatagcagattacaagtaggcttaccagttatctcatttagtgctcccctgtaagtactccccactttgcagatgaagaaagactatagaagtgacactattggcaaatggcacaaaaggcaagagctgggccctttggcttcaagctcagtgctttttgcacttcatctcttgtctgttttctcagtccagccagatgcagcatgtgaactgcagggtgtcaggagagaaaagggcaatcatgaaaagggctctctgcagagctggggctctgggcctgccctcaggtgcccttgcccaggttgtccctccagcccctacggtggatttggactctcaaaacttggttttccccacagcctcagatccacctagctcagattatttctggtgaagtggaaactacaagggctccatagaagatcaaggtgaaagccacatccctgtcttagtctgcactgaaagtgtggggtctggaaccaaggaggtgacaggcagcttggtattctcagatctgtcctcctcaagaatgccgcatttctctccaggcactggttttaaagagaacatcgggccgggcgcggtggctcacgcctgtaatcccagcactttgggaggccgaggcgggtggatcatgaggtcaggagatcgagaccatcctgggtaacacggtgaaaccccgtctctactaaaaatacaaaaaattagccgggcgcggtggcgggcgcctgtagtcccagctactcgggaggctgaggcaggagaatggcgtgaacccgggaagcggagcttgcagtgagccgagattgcgccactggagtccgcagtccggcctgggcgacagagcgagactccgtctcaaaaaaaaaaaaaaaagagagaacatcgataggttgcaaagtgatgagcagagaacagcaggaggtgaaagcacactgtcacccagagctcctcccaggcctcgtctcctccctcagtgctctcctgaccacccgccccccacccgccggcctccttccttgtcactctctatcacagcaccctgttcttttcctttcttttcttttcttttttttttttttttttttttttgtgagacagagtctcgctatgtaaacaggctggatatgatcttggttcactgcaaactccacctcctgggttcaagcgattctcctgcctcaacctcccaaatagctgagattataggtgcctgccaccacgcctggctaatttttgtaatttttttttttttttttggtagagacaatgtttcaccatgttggccatgctggtctcgaactgctgacctcaggtgatcttcccacctcggcctctcaaagtgctgggattacaggtgtgagccactgcaccccgcctcctttccatctcttatcacaagttacaatcaaacatttattcctttgcttagtgtttacagtctgtcttctcaattgtttgtaagctttggttcagaagagaccatactggttttgcccaacaccacagcccctgcaccttccccagcatctggcagatggttagatttcagctgctgaatgaacaatgaatgcatgagtgcatgatggatggatggataagttcatgggtgcgaccatgtataggatggtggtgatgcccaggtgggaggagagatgattcgaagtggagtccgtgagaactagaccccaaagggagattttttctttatgtctcgcccttaggctcaaatagggatcagttcatagaagctttaggaggaagattttcacactgagctttcacacatagaaaagctatttaaaagtgaagtgaaccgcgatagcagtaattatttctctgtttctggaggtgttccagaaccagctagatgatctcctgccagcagtgctatggggttgggaggcgatcccggcataaaaagcgtttggtcccaatggcgtcttggggtgcttcctgctctctgattctctggttccaggtgctttttcttctgttgagatggaagcagcatttgtatcctttgcttttcttttattcccctaaatatgctgttgactgatatgtttctctgctctgctttcttcctctgggaatatagatgaggtcttgtccgaaaactttctggactataaaaaccgtggagtcaatggttctcatcggggccagatcatctggaagatcgatgccagctcgtactttgtggaacgtgagtacctttaccattcttgtggcttggcagacatggatgaagcagaattcaactgtttcattatttgttcccgttgcactgcctccactaagaaatgggccctctaaaagagaggtgtagatttaaagagatccttaaaaagatgttcagtagtaagtggtgaggtctagggcagttggataaaagccagccaaccagcccagagggctgcccctttaataccaagaaagagttggttcctattcataagcctctggacttgggaccctttggctcaggtcccttaactttcactccatggctcctccgggggcatctccaatgtggccatagttagaccaggtcttctcaacaggcatcctaccctccagttttgcctttgcttgaccaaatccttcaaggcttcctgcccatggtcccagtctgtcagtgattttccacattttgctctgacctttggctctggccacagctcccccggagggctgtgagacattggtactaccagcctgtttctttgatttttaatctactgacatttctgaatgtataaactttctatcatatatcttatttatatgttttctaaaattttcttctgcctttgaaaataaatcattatcagagttatggcaggcttttttcatgggtccccatactggtgtatttctcattgcatgaggaaatacctaggtgggcttcgtgtgtaggtatttcctacatacgaagctcagattatgggcttgacatttgccagctgagggaatgcacagcttaccttcagtccacagctccttctcctccacttgggtatggagtgatttcatggacaaacttcttcatgcactttctggttgttagcagatgttcattcaatgtggcatgtcagaaaggaaatggagtgatctgttattccggctatccagttctcagagaaaaagatgcatggctaggaatctgaagttatccattggcatttgacttgtggtccaggaaaaactatatcctcaagtatattttgctttcattttcattcactcttattttcattcactcccttgacaaacatttttgtaagacctgctgtatttcaaggactatagatgtgaagatgaaagtcctggtgtctgtctttgaagaaacttatggtatccccgctcccggcaatgacaccaatagctctttcttgtgttggctcatgcagaatgaatagacaacgaggaaatttttatgctatcagggtgtagagggaacatgattttgtaagatatggtttctggctcttgtgtttgagataggcataataaaactcccagcaagagaatttcttttcttttttttgagacggagtttcgttcttgttgcccaggctggagtgcaatggcacaatctcggctcactgcaacctccgcctcccgggttcaagcgattctgctgactcagcctcccgcgtagctgggattacaggcacctgccaccattttttgtatttttagtagagatggggtttcagaatgctagccaggctggtctcgaactcctgacctcaggcaatccacctgccttggcctcccaaagtgctgggattacaggcgtgagccaccgcacctggccagaatttcttttctttacttatctccctggctctggcttttctcctctctaatccatgccaggcaaaatcccttaaacccaattttgctaccatctgccccaaagctccatggatcctctttcctattgcatcagctgcaatctctctgctcagctgccaagccccaacataaactcgccctcagcccacagccctacttctccatcctccccagcagacacccttcaccctggtcatgttgacctctcccattacctaacaaatagcatcattcagcataggaaatatgggcttatttggggtgtaaagatggctccagcaagtggtacctgatataaacctcctaaagttcaagaagaatggaaaggatacaaacttgcatgagtagtgattgttagacataatactcgaatgtgtgcacaaacctacaatggaagtttggtaagagaggtttttctctctcaccatgcaccaattttttccctttggcctctaattaattgagaaatagacataagaacccattttaaggtcacagtaaagtagcagttctcaatggtgctggcacaaacacaacttgaaagtttttatcttttttaagtccagaagataaatattaaggaagaggaaatcctaggtgggaatttcaatatacctgactcagattcaaagggcagtgaccacatcccataaagccacatctcttctacactttgatactatatgatctcctgactatctcctcatttgcatggcccaacacaccaaaaaatggggaatttgtgttgtaaattaatccagccctagtgccattctcttcaaagcagttttgaaagatttctgtaacatatatagaacatttcttgtatatttattccaaataaccacttcatataattgtcctcatgggcagtatgaaaacacactttaagtattattagaaatacattataggccgggcaaggtagctcacacctgtaatcccagctttgggaggccagggcaggcagattgcttgagcccaggagttcgagaccaacctgggcaatgtggaaaaaccccatctctgcagaaaattagtcacgtatgatgatgtatgcctgtagtcgcagctacttgggaggctgcggtggaagcatcacctgtaccgtggaagttgaggctgcagtgagctatgatagtgccactaaactctagcctggccactgaactccagcctgggcggcagaatgagaccctgtctcataaaacaaacacaacaacaacgacaaaaatacattataatataaaaccatctctttataatacataaacattggcataatggaatgaaagcatattcaaacttggtcaagcagcagcatcctataaaaaacaaatggcttgaccgtgcgcggtgactcatgcctataatcccagcactttgggaggcctaggtagggggatcacccgaggttagaagttcaacctagggtttcaccctggcccatatggtgaaaccccatctctgctaaaatacaaaaattagccaggcacggtggcatgagcctgtagtcccagctactcaggaggctgaggcaggagaatctcttgaaccagggaggcggaggttgcagtgagccgagatcgcaccattgcactccagtttgggcgacaagagtgaaactctatctcaaaaaagaaaaaaaaaggcttgcagaaggcatattccaaataactgaaagttgaacactttagataatgacattgtaaaatgtttttgtgcagacttgagaagatgttggtccacaatatacctgttggactagcaatgtcccagtgttttgggaatatcaatgaaagtgcaatgggaaaggcaggtacttacattttgcaaatatatcaaactaatgtagtataatttgtcaaaaagtaaaaatttattgagacaaagcttcagtttgcaaatgattagagtattaactcaaggcacatatattaatataaataaaataagatgctataatgaattatagctttagggatctgaatgcattaaaattgtatataagatgctatataaatttacatgttatgtgaaataattagtgctttcaaaaatgtatgattgagaggtgccaaattaacaagtagggagagattggctctacgaaacgttctcatatggctatccttccctaacacatccaagcatcaaagctctcttgctataataaaaatgcagaatcccagccatgatccaaagggttacagaagcttctattatgaactaaaaataagactctttgcagtctcccggcagtaataaacacaattaatctaattggtaaattatactctcttaaaattaaaaataattttgtaaacattaaaaattggccagattttaaacattgaagtacaacagaagctcattctttctacctggggattaaattaacataataaaataaaatgaggtgtaccttttattttggtttttatttttccctttattttttccttttgttatttctttttatgagattggatgtatattgcagatgacctggagtctgcagggttctaatagcacttttctttggggataatgattcaatttagaagtaggtaattgctattgatttatacaatttttaatggtctgactaaatctgattttgaaagtaccatcaaattaggaatattttaaacaaatattttctgcactctccaaggagtaacatacctgataaaaatactaaagaaaataaagcctgaatcatttcttattctctggcataatttttctccagtgggcacctggctatttgaccatagtgtcaatggctataacatgagaactctaaagatacaaacttgaacactgacagaagacagaactggtgaaatcttaagttgacccatcctataaagtcatatgatactgtattattgtagtaactcaattatcattttttaatacatgcatttgggctccgctggcccattcagaccttcagagggagctagcacagtccttgttcattgtgtattttgtcagaatccttccaagtcagggcttggattgccccagaacactgagatgaggtgatcctgaaaagaaggtatcctgtcttgatctctggccaagatctgctctgtgtacctccttgttcatccaattttagtaggaagaactgggcagtgtgtctggactgacctctgattacagcaaaaagagaccactgccaaaggggctgcccttctcccccgcccttgtgttgtcgtcactgtcgtaggcaccgcctcctcacagctgtccaggcataaatgagaaatcaggagtcattttcaacctccgtgccttgccctagtgtcctgcccccgccagtcagcaccactcatcccggatcccacctcacctcccgggtcagtcttaggctcggcctgtcttgcccctcgtttcctcgtgtggaaacctggctggatgcacacccagattgctgcacgctgtggtctcatcattccctgcacccatcagaagaacgcccctcaacctttttagcacctcattttaaaatccttttccatcatgccatctgtctcagtccgttgaggctgttataacaaaataccttacactggggaattcataaataatagaaatttatttctcaccattctaaaggctgggaagtccatgatcacagtgccaacagattctgcttctgctgagggcctgctcagcttcaaagacagtgccctcttgctgtttctgcgtaggaccagaggggccaaaggggctggggtgccccttcaacctctcttacaagggcattaatcccatttaaatcatcatcccatattttaaaaacacacaggggctcctgatgatacataacagaaaatctaagcagccaaccttactgacagtttgtaatgactccccccttgaccatggtgaggtgaacctcacacaggtaggggctgtcgggatctgcctcctcactctgggcttcagccagtggcttctaagccagaggcagcatgatggccacggtgacttggggctcaaccccacgcccagggaggccctctggactctgagattctgtttcttcatctataaaatgaaagtgatatatgtcctccacaaggcggccccatgaagatgacctgaaaaaactcaggagaagtgcccagccatgtgtcagggacagtaagagctcagtcaacaccagaccccctgccataattagagggctgtgaattaggaattacaggtgtcactctgagaggaaacagggcaggatcgtacatccaccttttatttctgctctggaaatgaacatattggtgtcttggtgacaattgagacatgaatggctttatgctgagagttttctgtggggaaaccctctgctctgcagccaaagctggagaccaaagggcactggaggaaaagcagggctccaggggagccggtggccttctctcccttgacattcagagcaatgtttccctgcggcgaagcagccagagccagaacaagctcgctgggaccagaggcaccagcaccaagactagacacaggggcttcatcaggccacagtccagatggttaaggtgacatgttgttagagccttttatttcaacttgggcatgttttcaccaggactgctctgcctttagagccagtgtggctaaggactgcaccgcgggctgccattttcaatcactgttgtgttatttccaaggagatgtctcaatctgtgctacaataaatacttgggccataggcgctaagcccttaagaaggttaagtctacatgaggagactgaaccccacctgtgcaacgtaaaggtgtgatcattgcactgcttcacaggttttctgttaggaaaaagtatgactccatatacatatctgcaagataataggcgtatttatattattgtgccatctgatttttttatagagctccgtggaaaccaagactccccccaccgctgcccacccactttagcactacgctaaattgaaatcatggttaaaattgcactgtgtaacggtcgtgaagtaattcgtgttgcttatattcttacttgtgtttcttaaattttaggaaaataatatagagttcacagtgatactcctgaaattctttttatcctttcaccacacaattaattcccctccctgctgtccctaccacctaaacttctccataaacctacctctggttatacctcgtactcatgttggtcttcccttcgttatttccttccagttttgctttaaaatcccaaaagaattaatcttgctagagaggcatcccctgggtagaggaaggagcccaagctaccaagtccataggcactctctagcagccccaagtgaaagggttggaaatattcatacagtgataattttgtccctttgaggttatcatgcatcatgtgatatcatatattagatattatgcatcctgtgtgctaatgggatgtagaaagaacataatagtgattaaagagcaagattaaaggcacggcagggtggagctgagaagtacaggaaagataagtgcttagactttatgtagtctatgaaccatttatattattattattattattattattattatcattattattttagttttaggatgacatgataaaacggatttggggccaggcatagtggctcacacctataatcgtagcattttgggaggaagtggcggaaggatcactagagcccaggagctcaagaccagcctgggcaacaaagtgagacctccatctctacaaaaaataaaaatttaaaaatgttagctctgtttggtggcatgcaccagtagacccagctacttgggaagctgagatgggagaatcacttgagctggggaggtctgcagtctagcctgagctatggagcaagaccttgtctcaaattaaaaacaaaaaacaaaaaacaaaaaaaacaagggtttgtgactattcgtgcaaggcaacttcagggaaacatatccaccttcagcaatcccagtcaaggcctgcaacatgggacacagaagaagcagtgaactagaggggctgcggttgctgctggtccctgtctgaactgcatggggctgccagaggccaatctgactgaacacggccaatgagacaatggcgtgtggcagtggagggcccagcccacgtgggaagacaagacgcaggcgtgcagtcacttctcagcacatcaaggattccattgcatctgggggacatcaaaattgacctgcagtgcatggaggtctcagtccctcagattaaataacaaagcatgactgagcgttattacagaaaacagccagaaagatataaccggaacattccattcagattcgcagcaatacaaaacgatggtgccggcttccagtcagatacatgtcagatcttcccaatgagaagaaaacactcaatcgacataaataaagggtcaaggccctattaacccaaagtcacacttttctggattaaccttaagttgccaagtcggtgtgagaacataacagatacagctgtctctcttagccctattgtgctggaggcctgctggggatcgtgctggtctccaggggctcagatctagacatgcaggctccgtccctgcatgccaaggttctggcattacactggggagacaagcatgtacttctttttgtgctttgtgtgaaatagtaagaggaggagccctagcctgaccttggggcaaagacctaatcacctccaagttacaggaactcggccagttgggaaggaaggtctgggctcagggccaagtggcatacaggggtgggaaggggtgaggctggggtaggtgagacagaattggaaaagaaacattccagggaaggagcccagggtcagaggttctaggcagtttagacatatgcctgcagagcacacagagctatgcaaatgctttaagtagaaaaagcattccgattaggcttgcattctagaaactgcattctggcagaagtgtggcgagaagactgtaaggtgctgatattagaggcttgagaccaccaagaaactatggcataaaaacaggtgagaaacaaagaacacctggaatgagaaaaatggaaggggctgattcagaaagaggcttaggaggtaagatcaacatggcttggtgaggaactggatgtgtgcctggggagaggaaaggggcagaaggagaatcagctgcctctacggcacatcatccaagactgaggggtcagaaagggggcgagtttggggattgaagacaccaagttcaggctgaagtgtctgtgggctggaaagatgcagcacacagttgcccggacacggcgtgctaaggagaagaacccggctttgaaacagagatgggaaaggaacaagcaactgctgtgtgaagtgagggtgtgaaggactttgtgtagggggagtgtaaagtagtgtttctcaaagtgtagcctgctgaaaattgcaaggcagtcgtttacccagggtggttattagaaatgcagattccataggcaagagcctttctttttaataagcatgccatgttattctgatatgcctgtaaatgtgaagatgactgatacagactgtgagaagaggagagttgaggacggaattccatcgaggagcaagaggaagaagaagagaaagagagatcatggagttaggcaggttaagggtggccataaattccctgatgctcctcctattgagaggcggggtccatgtcgcctccccttgagcctgggtgggtgctgtgacctgggctggtttccaaactaaagtaccaacttccagcctaggcctcaagatattggaagcttccacttcctccctcctgggacactcactcttaaagccctgagacagctgggctgggagaagccctggctagctgtgttcggggctgtgtgacaagagcatgctggcaggcccagagtttccagccatcctcaaccaggcaagaggccacatcatacgtctagccctagctgctgtcaatggcaacagcatgtgagatccgcaggagaactgccatgctgagcccacacctcacagaactttgagagataataagagggtgctgctgaagctgtcaagtttttggtttgatgattatacagccatagtaaccagagcaccagagaaaccatcaagagcaaggccctggaagtcaagggaggagaaaccatcaaggatgtcatcaatatgacctgctgagcgccacagagtcacagaagatacagaagtcacctgtggagggtggccatgtgggggctatgggctttgtctaaatagttcgaggagttggtgagaaagactgtaggctgaaaggtatagagtgactggttcatcctggtttgctggaactctcctggtttgggccctaatagttctgtgtcccaggaaaaagctcaggcgtgaacatgctggagtggttggtgaccctctggtgagtctgcactgataaagaagaggccaggggaatacagcagtcctgtgggatggctggcaatgacagtggctctgagaaggtaaccaaatgaggaataaaatcaaagggaagtcttttatttatttatttatttatttattttatttttttatatactttaagtcctagggtacatgtgcacaacgtgcaggtttgttacatacgtatacatgtgccatgttggtgtgctgcacccattaactcgtcgtttacattaggtatatctcctgatgctatccctccccactccccccaccccacgacaggcccccgtgtgtgatgttccccaccctgtgtccaagtgttcccattgttcaattcccacctatgagtgagaacatgtggtgtttggttttctgtccttgcgatagtttgctcagaatgatggtttctagcttcatccatgtaagatcggggtggggccaggcacagtggctcacacctgtaatcccagcactttgggaggctgaggcgggcggatcacaaggtcaggagatcgagaccatcctggctaacatggtgaaaccccatctctactaaaaaaaatacaaaaaattagccggacgtggtggtgggtgcctatagtcccagctactcgggaggctgaggctggagaatggcgtgaacccaggaggtggagtttgcagtgagccgagattgcgccactgcactccagcctgggcgacagagcaagactctgtctcaaaaaaaaaaaaaagatcagggtgagcttgcacatgtttatagactgagtggaataggccataaaaatagggactctcattaacttagtgcttacaggtatcaacgttcttggcaaggatgttaccatgaggtggacgccatcactgttgtatccagtgagaaatcttattctctgagcatcatggcagcttgcctaaggttcagagtggtaggtggtggagctgggatttgaggtcaggattatctgttgtgcttcagcaccatggcagagcccatgggaatgtcagagatatgggacattgaagggcagtttgatggattgaaggccatgaggagtcagtaggcaacaggatccagagaacagttatgggacaggactttcctagaagctcttgactggctaggggtgggatgaccagaagtgtgggtgacgcaggtggcaggtgcaagatgggaacaaagagacaggaagaaatgtgtttctgctgaccattctacagtgcccgctttcctaacaagaagagaaataataagaagaaattggaagaactcaggagtgattttcatctacacagatgtggtacagtgaaattggatctctacaaaaataaataaataaataaaaagcttctcctcttcctcttcaaagccactctacatacaaaatgaatctcttttgctcaaaatcacagacacacggagctggaacctcaacccgggctgctgagaccctctaaagacttcaacaacccaaggaagggactgttaacccattttgatctccatgagatggatacagatccccaggcatgcgcacaggccacattcttgaaatggggccttgctctaaaggcctgttgcaggtgtgtgtggcgagaggccaaatttggcaggcaagaatatggggcagacaagggacactgacctaactaagattctgtgtctggacctgcagccaggtgggtgaggcagtgtctgaagggcatggcaagctgatcaccacggtgtccaattacacagacagacacagcagatgggagcaaaggcggctgcggtcacttcaggagtgtggcctgtgctcatccctggggaacagtacatgggctgcaaggtccgacccctgggctgttgtttggggtaaggctactgtcctgagtagaggaataacactaataataccagcagctaaacttctttgagccatcccaatgtacctggcatcatgctgagcaccttaaatatattgcctcatttaatccttatggaaccctagatggcagatatttttatttttcctttttgttaatgagaaacctgaggcagaggaagataattcaaccggtcccatagtcacaggtaacaaacaagtgataggactgggatgggaaccaagacagcctgccttcagagactgctctttagccaatagaccaaagtaggccagtaggggtcccatgactaaggcagaggattggtgcaaaattctggtcccatagagagctcagtactggcttatccactggatagaactttgaagtaggagtcattcctgggggccttacctccctggtatgataggcaaggaaatgtggggggcatcagagaatacagacatcactagactatcacattctaccaaaatggaggtctggaaggaagatcaaggtggttagtatacagtctttctcatatccagatgatcccaagtggggagctcagtgtgcctcctataaaaagctgtagagaaagtcacattaaaagaaaaggcaacacaggatttcaatcgcttcctcacaggtaaatccagaatcgcccctgttttggtgcatttgttatgtatggatggattccatttgtatatgcatttataaaagtattacttattccctacagaaaatttgaggaaaagatcaaagcaaaaatcgtctataatttcaacacctagataacattttagaagagtgttttattgctagtagcatttccccttagaaggcttaataagtatgtattcaattatataatgaatgaattaagctggtgctcagtattccagtgcaggaagcatgagacttatgctgaaggacagcagccattacatcttgtctttcctatagatgcccctgagcccaaaacgttgggtttccctgctagaggaagagacagggaaatgcgggcagagggaaggggccagatggtctctgggtcagccacagggagataacagagtcaactgacctatctaccttccccttgtaataaagaggtggcagaaagttaccacctttgaaaacagaggactctgctctctgtcaaacatggcccaatccacactgggaatctgaccaaccagtttagcaactcctcctccctccactgggaccaggaaacggatgttagaaaagcagtggaaagggagaattttcactttttccactttattcctacgttatacctctctcttttaacctattgagtgtttcagccaagtcaatggttgtgcatagccacagctgtttttggtgaggacagagatctgtggagcttcagaaagtcctgcctgaacattgtgtgtgccttcctgagtactttcgcagcttctgtgcatcttatctacccaggaccaattcggaggtcactctcaggactttctgacatcagtcaagataggtctctagtcaactgcaaggccattgtcaaatggtgccagctacattgtccactccagctttcaacaaccaggaaagtgttcagagtccaaacaatacaaaaatatacaaaacctctcccaaaatgttgttaatgcagatgtctctgtctcatgtatcacacgttcccaaaattctagagtcaatatggtacctaagaatattgaaaaatccgccaacacccacaaaatttagacacaaacaacccttatccgttgcagcagctactaatctaagccttgttccttctctctaagcaaaaccagagtttgcagaacctggtacatatttagacttacattgctgttgccagctgtgttacctgaggaaagtaagcagacaaaaagcagaaaagaaaaaggagaaagtcatccttgttttattgtcattagaatgaatgtcagtctcttccaggttatccaaggcttatgaatttaaatcccaaatcagagaacccaccttagaggggagaaattgtgacattatgcttctcatatcctttggggaaaatacagttacaaatagtctaccctctaccagagaatggcatatgaaatactctatctctataccgagtctagaaatttggacctacagacacagccttttcttggaacttctgttcttttcttcatatttaccctcgaaaagaagaggcttattttacaatatgaattttctataacacagaacataaatttctggtgaaaattaaacacttaaaacctgcctaacccttcaacaatgaaaaggttaagtattaaaataatatgatgaaatatttttcagaaggggaagagtagattatgtcaattctttttaaacagtcaataatagaagggaaaaggcagaaagagttcaggaacatgcagaaaaaagtagtcaaaataatccacaatcaggccttacccttactgctagcctaatcaccagcagttcccaaattagagaaaaatacatttcaggcaaactcaatataaaaaattaatattcaaatatcagaaccagttaaatggaagtctagctgcttgacacatatgaagtggttatggtgaccttacaacctcgctgctatagactaatgtttgtgagtgggccctcctaatggaattaatgcctttataaaggaggaagagacacatgatttctctccctttgctatgtgagaacacagcaagaaggcagccatctgcaaaccaggaagagagcccttagcagaaacctgatccaccagcaccttgacattgaactttccagccttcagaactgtgaggaataaatgtctgtagtttaagcaactcagtctatgatatttttatagcagtccaaaatgacttagatactcacaaaacaaattcttacaatatttggaatctttctttctttttccttccttccttcctttcctttccttccttttttatctctttccttccttcctcctttcctctctttctttctttcttttttctttcttcctttcttccttccttccttccatctctttccttttcttcatttttcctctttctcccttgactccctttctcccttcatctctctctttctctttctcccttcatctttctttctctctttctgtctttatctctttctctctcctttctttctttttctttctttctttctctctccttccttcctttccctctctctctctttctctctctctccttccttcctttctctttctctttctttctttttctttctttctctctccttccttccttcctctctctttcttcccctccctttctttctttctctttctttctttcttctttctttctttctttctttctctctctctctctctctttctctctctctctctctctctctctctctctctctctctctctctctctctctctttcactctattgcccaggctggagtacagtggtgggatcatacctcactgcggcctcaagggctcaagtgatcctcctgcctcagcctcctgagtagctgggaccacactcacacaccaccatgcccagctacttaaaaaaaaattttttttagagatggggtcttactatgttatccagactagtctccaattcctggcctctagtggtccttcacctcagcctctcaaagtgctgggattacaggtgtgagccaccactcccagccaagatttggacttttgaaagaaaatccagcttccctctcaggactctgtgcagaccatgactttttcttttcttgtttattttctcttatttcattttaaattcaaggggtacatggcttgtttgttataagggtattacatgcataataatgaggattgggcttctaatctacccatcacccaaatattgaatattgaactcaataagtaatttttcaacctttatccctctcccaatctccccacttttggggtcctcagtctattatctccatctttatgctcatgtgtacccattgtttagctctcacttatacattaaagcatgtgatgcttgatttgctgtttctgagttagttcacttaagataatggcctccagctccatccacgttgctgcgaaggacatgattttatgttttatggctgtgtagtattccatggtgtatatatacattttctttatccaatcaactattggtgacacttaggttggttccatgactttgctattgtgaatagtgctgcaataaacataggagtgcagatgtctttttaattaatgatttcttttcctttgggtaggtacctagtagtgggtttgctggatctaatggtagttctatttttagttatttggaatatctccatattgttttccatagaggttgaactaatttacactcccaccaaaagtatatgagtgtccccctttctctgcaaccatgccaacatccattgttttttgactttttaaataatagccattctgactagtataatatctcactgtgattttaatttgcatttctctgatgattagtgatgttgagcatgtgtttgttgaccacttgtatttcctgttttgcaaaatgtctgttcatgccctttacccagtttttaatgtggttgtttttttcttgttgagttgtttgagtcatctgatatagactcatctctgagcctacccagacaaagatatatttgagagccccaaggtgacatctctaggtcagtcaagtggccaagagccccaaggtgacatctctaggtcagccaagtggccagtgcatgctgcaacatgttgtgggaaggcacacactatttcccaggtgttacaggatggtatgtgcatgtacttcatttctcaccttttcttctaacagtctgacactaacctgcttcatcacagcatctcagtgtcttcagatgctcttgctggatggcctctccaactcagccgaatagccaagatcattgtctcccaagaggcaacaattccagcaaattctaaacctacagacattatagtttcatgaaatcccacaccaatggagcacaatgtctttttttttatagaagacactcacttgctgtgaaggctgcatttgcagtgtcaggggccccttagaaggaacaaacatccagttcctgcaccctgaatctgaatcaactgcaactgggagaagcaactaccaattgaatatgcaccatgccagatggcctggcatatttatgtgctttgagttgccatgtcctgtgtgccagagagctaaaactggtttcaggcaactcagtcctccaccatctgaccagccaagattattctctccacttagattgaaacacagagacctactccagtgatctaggattagggacttttgtggcacagaaggcactagactcagtgatgatattactgctgctcttgtcgttggcctgggagacactgctgggataccctgcctccagcctgaatgcttgggataggcttagaaagtactcagctggttccatccaggataggggactgcagcgtcagtgctgtgtgatgccctgttttcatacttcatattcttcactcttgccttctatatccctcaccagggattttttattttattagtcttttcaaagatctaacttttgattttcttgatcctctatatatgtttgttttctgtttaattactttctgctctttattctttatcatttccttctttctactttccttggatttaatttgttgttcttttgctaatttcttgagattgctgcttagctcgttggtttgtagccattcttgtctaatgtatgcaatgagactgtcaattttcctctaagcagtttttattttgctttattttggtaaaattcttgctgaagcacaacacacacacagaaaagtgcacaaatttaagtgcagagcttatgaatttttcagaaagggaactctttcacgtaaacagcgctcaaatcaagaagcagagctttactcacattttaatctgttctgtttctcttcatccttctcacacatctgtgtttctgtctgggatcattttcctctaaaaaaaaaaaaagagttccctttagtatttcttttagtgcaatcccactggagataaatagtctcagtttttgtttgtctgaaaacatcactatttcacctatagttttgaagagtaatttcacaatatatatagcgggaactcaaagttaggtgtttttctctttagcacttaggaatgtcatttatcttctgaaaagtcaatggttagtctttttgtcattcctttgaaggtaactatcttcccccatcttatgcttctaagacttttatctttgtctttggatttcatcagtttaactatgatgtgcttaccagagcttcttgtttttatcctacggcttatcctgaagcttaatgagaagctattatcttctcaaaagttggctttaccccattctctggaactccaattacatacggtggatcattccattgtgtccctctgttcctttttctctatgtactttctcccctttctttcctctaccttctttcaatccggatattttcagtcgacctatctcccggtttacgaaccctctttctgctctacctgatctcctgctaaacacatgcataaagttcctaatttcagctattctatttttcagtaataaaatcctcatttgattcttttctattggttttaattttctggcaaaggctgtacttaatatatccattttctatgtacatcattgcttctttaaagtctttgccagatgacttcagcatcaggattctgtttccctgcttctatctattgctgtacttggtaattttctgtcaattgccatacattgggtatgaaatattatacacttgagttactttaggtgatgacatcttctcccaaagagggtttgccatgtcctcagctaggcagttggggtgctgatggccttgtccaataagaggggagctccgcggggtgcagtccaattctggtaagccacagtctccctctggctatcccatgttccttaggacccctctcaagggctttcagtggggcccctctccctgccagatctcctcaataccaagagatggaaaattttgcctctacttttcaaatgttttcatgattagatttttagtcttttgccctcaaagcttcagtatttgtgaatgtctgaggggaaaccagttgtgtatttgagatctcctgtgctgtaactctcgccccatctagtgagccaccaggaaaaagggggtacaggttaccagaaacctctcatctagaagttttagtcctatctgagattccactgctctgcagtgcctggaaacattttgttttaaaatcagcttacttagttagctgtagaagcattcatgtgctgcaactactctatcctagcagaaagaagaagtctctaattcccaccccccaccccttttttttttctaagacggagtatcgctctgtcgcccaggctagagtacagcagagcagtctcagctcactgcaaccgctgcctcccgggttcaagcaattctcctgcttcagcctccagagtagctgggattacagtcgccagccatcacgcccagctaatttttgtatttttagtagagacgggggttcaccatattggctaggctggtctcacactcctgacctcaggtgatccacccacctcagccttccaaagtgctgggattacaggtgtgagccactgcgcccggcctctaattacctttgaactgtgcaagcaatagccccagggatcaaaaactctgtctgggggtggtgacagtaatcaacactgaaatgaaaacaaaatgcattttttgattgtttttgaatttagaattggccccctgacacgtgaagtaagtatttcccctaaattaaagctacagtgtcgtctgttggtgggagtgtaaactagttcaaccattgtggaagacagtgtggcgattcctcaaggatctagaactagaaataccatttgatcccctgatcccattactgggtatatacccaaaggattataaatcatgctactataaagacacatgcacacgtatgtttattgtggcaatactcacaatagcaaagacttggaaccaacccaaatgtccatcaatgatagagtggattaagaaaatgtggcacatatacaccatggaatactatgcagccataaaaaaggatgagttcatgtcctttgcagggacttggatgaagctggaaaacatcattctcagcaaactatcacaaggacagaaaaccaaacactgcatgttctcactcataggtgggaattgaacaatgagaacacttggacacagggcagggaatatcacaccccagggtctgtcatagggttggggggcagggggagggatagcattaggtgaaatatctaatgtaaatgatgagttgatgggtgcagcaaactaacattgcacatgtataactatgtaacaaacctgcacattgtgcacatgtaccctagaacttacagtattataaataaataaataaataaataaataaataaataaataaatagttacagtgtcattttacatattggttcgttttggtcacttttgctatgctatcgtatttaaagacattaacatgggatttattcttctaaataacaaattagtcaagtaatatacagttactcatgtaaaaaatatatatcagctatcacaattacttcaaaaagaagttgcaattaaccatttttcattcacataaccagacagctcagaatttagctattagagaagcatgagtttatcacgtggcaatttgtataagttaggcaaatgtgaaattcttaaaaatacaaacatctactgtttattaaacatttatgacttttccagttattttaaaattaatttaattttagtttagttttagttaatataaccagtccgtaatacagcattctaaatcatgatgacttttggaagtacaaatccaagttagatgatacctgtatcaaattataaaattttgactgtcaatatgacattctgtaatacaataagattttttctgttagagccatatattactttaatgataattttactacaaaaatatcatttgagtagcaaaaatatcatgactttcagggctgtttatagtagagcaagggtttgttgttgttttggtgcaatttaatatggctttaaaaattatgtaattttatccctttgaatgagttcttagatacaagttgctaaaattaaatgcagcaggacaagtatgtataaaagatgactgtttcattctggtgttggttaaaaaccagactcacgcctgaaaagctttaacattttaccttaaggagattcaacaggtaatatcagtttttaaattaacataaattttccagtgtttactatgaatatttacacttagagtggaatcatcaatgttagatgcctcgtcaatgaacattatttccatttatcctcatttatttggaaacccttcacccttcctttgttttgatcaaaagtcacagcctttctctaagctgcttatttcttaaaatccatttaattcataaaaagaaatacaaatggatatactgccatataggatagactggcaggactcaaggttttatacaattaatgttgattatttctctaaaagtactgctcttattgtttcctcttgctgaaactaaacactcttcagactcaatttatatcacattattctactgttacttaatctttttgagcatctgaagacattgtactttccattcctccttctagataactcttgaggctaactcttacagagtaattatagcttttttggttaaaattgcttttcttggggtttgaggatatagtctcacatctattttgtaaatgacatattagcagatttaagttcattattcttaagaatgtttatacatagaggccgggcatggtggctcacgcctgtaatcctggcactttgggaggcgcaggcaggcagatcatgaggtcaggagatcgagaccatcctggctaacacagggaaaccctgtctctactaaagatacaaaaaaatcagctggtcgtagtggcaggcatctgtagtcccagctactcaggaggctgaggcaggagaatggcatgaacctgggaggtggagctggcagtgagccaagatgcaccactgcactccagcgtgggagacagagcaagactccatctcaaaagaaaaaaaaaaatgtttctacgtagataatttgatcctttctgcaaaataagtgacttcacaatggaaggctgtgctgatctatctctgtctaattcatcaactctgattatactctggttcataagatctcagtgtttttgcattgcagatattgtaacacctgagtagctaaaaacttgccatgatgttcagatattcacggtgctggcaaactgcaatgtctgggcaacagtattcttttttttttttttaattatactttaagttctagggtacatgtgcacaacgtgcaggtttgttacataggtgtacatgtgccatgatggtttgctgcacccatcaactcgtcatttacattaggtatttctcctaatgctatccctcaccctgccccccaaccctatgacagacgtgtgtgatattccctgccctgtgtccaagtgttctcattgttcaattcccacctacgagtgagaacatgcagtgtttggttttctgtccttgcaatagtttgctgagaatgatgttttccagcttcatccatgtccctgcaaaggacatgaactcatccttttttatggctgcatagtattccatggtgtatatgtgccacattttcttaatccactctatcattgatggacatttgggttggtttcaagtctttgctattgtgaatagtgccgcaataaaaatacgtgtgcatgtgtctttatagtagcatgatttataatcctttgggtatatacccagtaatggggtcaaatggtatttctagttctagatccttgaggaatcccacactgtctccacaatggttgaattagtttacactcccaccaacagtgtaaaagcgttcctatttctccacatcctctccagcatctgttgtttcctgaccttttaatgatcgccattctaactggtgtgagatggtgtctcattgtggttttgatttgcatttctctgatgaccagtgatgaagagcatttcttcgtgtgtctgttggctgcataaatgtcttcttttgagaagtgtctgttcatatcctttgcccactttttgatggggttgtttggtttttttcttgtaaatttgtttaagttcttggtagattctggatattagccctttgtcagatgggtagattgcagaacttttctcccattctgtaggttgcctgttcactctgatggtagtttcttttgctgtgcagaatctctttagtttaattagatcccatttgcctattttggcttttcttgccattgcttttggtgttttagtcatgaagtcctctggacaacagtattcttaaagcatatttttatgttgacagatatctcctttcagcactttgaagttctcattcccttgtcttccattgtttctgtttgtgttaagaagtcgtctgtcaatatgactcttgctcctttgaaggtaagctagctttttccttcattggatgatgatgttgtttttgtctttttttttttctctgatgtctgattgctttgttccttttggattcatagggctttttgaatctataccttgatgtctttcgatgtagcaccatcatctctctgctgtccttttagatttcagttacctatattttagactatctgctagtatcctgtgtgtttcttgctctttcgtctatattttccatccttttcctctgcatgcttctttctgggtttttttctgacctatattccagttccttaaaatttctcctctgtgttgtttaatctactgttaaacctattcattgagttcactatttcaaagtacagtttatcagaatttctcggattcaaaatttctgtttggttcattttgtagacttaattctttgctagtagtttcaatcttgtcttctttttgctcgagtgttttaagtatatgttcagtgacatctacttgttttttgtttttaatttagaaaggggactttattttgtataagggtttatagtctgcagggtggccattccacaggctgtgaagtatagactccgctcagcaaagactggaaacaggcactttaagggaggagagagcagaagaggaacttatgttgaacaggttggccaagtatacatatttaatgggttatagcaggagttatgaatattcacaaaggggttcctgaaatatgcatattgaaaaacatgtatgtaacatacaacccaagttaacattagggtagagacttaacatttaaatgaattactattaggccgtatacatcaaaagctaaagcagggacatggaggcactcaggtgtgcagcctctgtaaacaagccagaaccagtctatggttggcaatctcttatcagaagaaagttactgaaatcattctcttttatggttttttatttttatttttattattttattttattttccataagttattggggtacaagtggtatttggttacatgagtaagttctttagtggtgatttgtgagattttgatgtacccatcacccatgtatacaccacaacatacctgtagtcttttatccctcgatcccctctcactcttccccacaagtccccaaagtccattgtatcattcttatgcctttgtgtcctcatagctcagctcccacatatcagtgagaacatgcaatgtttgattttcccttcctgagttacattatacttagaataatagtctccagcctcatccagatcactgcaaatgttaattcattcatttttatggttgtgtagtattccatcatatatatacacacacacacacacacacacacacacatcatatatatatacacacacatcatatatatatatacacacacacacactacagccacttgttgattgatgggcatttgggttgcttgcacgattttgcaattgtgaattgtgctgctataaacatgcctgtgcaagtatctttttcaaataatgacttcttttcctctgggtagatgcccagtagtgggattgctggatcaaatggtagttctatttttagttctttaaggaattgccacactgttttccatagtggctgtactagtttacattcccaccagcagtgtagaagtgttccctgttcaccacatccacgccaacatctactgtttttttattttttttattatggccattcttgcaggagtaaggtggtatcacattgtggttttgatttgcatttccctgataattagtgatgttgagtattttttcatatgtttgttggccatttgtatatcttcttttgagaattgtctattcacgtccttagcccactttttgatgggattgtttgtttttttcttactgatttgagtttgttgtagattctggctattagtcctttgtcagatgtatagattgtgaagattttctcccaatatgtgggttgtatgtttattctcctgactgttccttgtgccatgcaaaagctcttcagtttaattaggtcctaggtatttatctttgtttttattgcatttgcttttgggttcttggtcgtgaaatccttgcctaagccaatgtctagaaagttttttcaatgttatcttctagaatttttatagtttcaggtcttaggtttaagtccttaatatatcttgagttgatttttgtataaggtgagatgtgaggatccagtttcattctcctacatgaggctagccaattatcccagcaccatttgttgaaaagggcatcctttccccactttatgtttttgtttgctttgtggaagatcagttggctgtaagtatttgggtttatttctgggttctctattctgttccactagtctatgtgcctatttttataccagtaccatgctgttttggtgactatggccttatagtatagcttgaaatcaggtagtatgatgcctccagatttgttctttttgcttaatcttgcattggctatgtgggctcttttctggttccatatgaattttagaattgtgtcttctaatgctgtgaagaatgatggtggtattctgaaggggattgcattgaatttgtagattgcttttggcagtgtggtcattttcacaatgttgattctacccatccatgagcttgggatgtgtttccatttgtttgtgtcatctgtgatttctttcagtagtgttttgcacttttctttgtagaggtctttcaactccttggttaggtatattcctaaggttttttaaattttttaaaatttaatttaatttaatttttttttttgcagctattgtaaaaggggttgagttcttgatttgattctctgcttggttgctgttgatgtatagaagaggtactgatttgtgtacattaatcttgtatccagaaactttgctgaattcttttatcagttctaggagctttctggaggagtccttagggttttcaaggtaaacgatcatatcatcagcaaacagtgacagtttgacttcctctttactgctttggatgccctttatttctttctcttgtctgattgctctggctaggacttccagtaccatgttgaagaggagtggtgagagtggtcatccttgttttattccagttctcggagggactgctttcaacttttccccattcagtattttgttggctgtgggtttgtcatagatggcttttattgcactaaggtatgttccttctgtgacgattttcctgaaagttttaatcataaatgttggattttgtcaaatgctttctctgtatctattgagatgatcatgtgattttgttttcaattctgtttatgtggtatatcacatttattgacttgcatatgttaaaccatccctacatccctcttataaaacccatttgatcatggtggattatctttttgatatattgttggattcatttagctactattttgttaaagattttagcatctatgttcatcaaggacatcggtatgtagttttcttttttggttaagtcctttcctggttttggtattagggtaatgctggcttcacagaatgaattagagagggttccttctttctctatcttgtggaatagtgtcaaaagtaccaattcatctttcaatgtctggtagaattttgctgtgaatctgtctggtcctggacttttttttgtttgtaattttttaattaccattttaatctcactgcttgttattggtctgctcagggtatctaattcttcttgatttaagctaagagggctgtatttttccaggaatttatccatttcttctaagttttctagtttatgtgcataaaggtgttcatactagccttgaatagtcttttgtatttctgtggtatcagttgtaatatctcctgtttcatttcttagtaaggttatttgaatattctctcttcttttcttggttaatcttgctaatggtctgtcaattttatttatcttttcaaagaaccagcttttgttttcatttatcttttgtaattttttttttgtttcaatttcatttagttctgctctgatcttggttatttcctttcttctgctgggtttgggtttggtttgttcttgtttctctaattccttgagatatgacttaaactgtctgtgctctttcagactttttgatgtcggcatttagggctgtgaactttcctcttagcaccacctttgctgtatcccagaggttttgatagtttgtgtcattattgtcattcagttcaaagaatattttaatttccatcttgatttcgtttttgaccagtgctcattcaggagcagtttatttaatttccatgtatttgcatggttttaaaggttccttttggagttgatttccagtttcattacactgtggtctgagagagtgcttgatataatttcagttttcttaaatttattgaggctcattttatggcctatcatatgatc

SEQ ID NO: 61427 - DNA, 289 bp, Homo Sapiens
  misc_feature (255)..(255): n is a, c, g, or t
ttcaccttcagtgaccactacatggactgggtccgccaggctccagggaaggggctggagtgggttggccgtactagaaacaaagctaacagttacaccacagaatacgccgcgtctgtgaaaggcagattcaccatctcaagagatgattcaaagaactcactgtatctgcaaatgaacagcctgaaaaccgaggacacggccgtgtattactgtgctagcctcactcgaccaccttacgatattttgactggntaattaatcgtgctactacggtatggacgtctgg

SEQ ID NO: 61428 - DNA, 1007 bp, Homo Sapiens
gaatacagaatgtgggcaaactcgcttctgtgccggccgccagaaggtttgctgagggcaatcactccctggtgccgggctccttgaggttatgcactgggacatctagagcctattgtttgaggaatgcagtcttgcaagcctgctctggatcaagccacagactgaaacacccccgaagagcaagcacgtttcttggagcaggctaagtgtgagtgtcatatcttcaatgggatgaagcgggtgcagtacctgaacagatacatccataaacgggaggagaacctgcgcttcgacagcaacgtggaggagttccaggcagttacggaactggggcggcctgtcgcagagaactggaacagccagaagggcatcccggaggagaagcgggacaagatggacgactactgcagatacaattacggggttttttgagagcttcacagtgcagccgcgagtccatcctaaggtgactgtgtatcctgcaaagacccagcccctgcatcaccgcaaccccctggtcggctctgtgagtggtttctatccaggcagcattaaagtcaggtggttccagaatggtcaggaagagaaggctgcggtggtctccataggcctgatccagaatggagattggaccttccagaccctggtgatgctggaaacagttcctcggagtggagaggtttacacctgccaagtggagcatccaagcgtgacgagccctctcacagtggaatggagtacacggactgaatctgcacagagcaagatgctgagtggagtcgggggctttgtgctgggcctgctcttccttgggacagggctgttcatctacttcaggaatcagaaaggacactctggacttcagccaacaggactcctgcgctggactcctgagctgaagtgcacatgaccacattcaaggaagaaccttctgccacagctttgcaggatgaaaagctttcccacttggctcttattcttccacaagagctctctcaggacca

SEQ ID NO: 61429 - DNA, 105357 bp, Homo Sapiens
gatccacccctgtctctgaaccgcagcgtggagatccacccgtgtctctgaaccgcagcgtggagatccacccatgtctctgaaccacagcatggagatccgcccgtgtactctgaaccatggcgtggagatccacccgtgtctctgaaccatggcgtggagatccacccgcatgctctgaaccacggcatggagatccacccgtgtctctgaaccatggcatggagatccacccgtgtactctgaaccacgggcgtggaggcaagaacagccggtgtccaagggctccgagtccactcaccgccagccccatcccgaattcctgccttgccacaaagagtcacctttaagtgttgatcctaaggaaacagagtaaacagatgtggaagtgaattgtcaagaataatcacagaaaataaaacagcacagggtttcctttaaaagcatcactgtggaccgaattcatatgttaaagcccaaccccaatgagacagtatttggagatagggccataattaagattaatgaggtctttaggatggggccctaagccaattggactggtgtccttagaagaagaagaggctctggggtgcaggtgcacagagaaaggatccatgaaaacacagcaaggaggtggccgtctgctaggcagggagaggcctcgccagggaccaaccgaacccatgccgccatcctgtacttctagcctcctagacggtgaaaaagtaaatcagtgctgtttaatccatccagtctgtggtattttgtcatgtcagccagtgcagactaaggcggcacaggaataccctccacccacgtggcccagcctgtatcccaggctctgactcacattagcacacctttcaccttggggaaagcagaaccagaggccgctgggcggtggagctcgcttcttcttgagcacagtggatccttggaagaagggagggtggtgagaaatgggcagaggccaatcttcaatgggagggctggatcctgtctccaggcccagggatgggtgagttttaaatcaagagtacttggccacaccagagggccagctgccagggtgatctggcccccgagggcttgtcttgtctaagaaatatcacaggagtgcggtcctctgcacgcataaggtcgtctgaggggtgaccttactcactgcccatccatcctgcaccaggctggccccggccacgaggctttgcaatcaaggattcccagcgccactaggacttgttgcctgcccagagtttctcatgtccatgctaagaaaatccgtctccactccgggtgcctctgcaggcatatctgtgacccccggagacagggatccactaccaagagtggctctgtcaggcctgagatgagctgtggctttgcaggctggcttcctccctctgtatgatgctttccgaacaagcttagaggaaaatgtcacagctctttcacctgcacaggaaggcaaccctcagcccccagccacacgagtgggagccaggaggagcactgtagcctgcactctcatctcagggacagccagcacttcacatctgcagaagcaataaggacattacaattgcatatcagtaagatattgccaggatgatgctatgtagcaaccatccccaatctcagtggctggtcagtaacctgtctattactgctctcaagtctaaaactcagctaagcagttctggtctcaaatgggttgattcctgagtctgtagacagctctgctcaccttgactgggttctcttatatgtttggggtgagctggtcactactgccttaggatggccttgatcgcctccttgtgtctcccatgtgtatccctccattgggccagccccggcgtgttctcataatgagacagatgggtgcagtgagcaaaccccactgtgtagggcagtaaaggagttggggtgcatgatccaaacctctgcctgacccacttgtgctaacatcctgcaggcaaagcccatgctacagccagagcctgggtcagtgagggagaggcctgcatgattactccactgaggacatagacacagcacatccaccgaggacactggatactgtggtcagttctggcttgcccgtaagtcagagagctgccaaacgggggatagccctctagggttcttgtatttgcccaggaaagaattcaagggcaagctggtggttgggtagaatagaagagctttatgaaagccacagtgtcacaggtccatggctgctcctgtccagcagggccaccccacaggcagtgtgctgagctgagaggagcggctcagggtggttctccagtcatatttctacacacttttaattacatgcagattaaggagtggtttaggcagaaatttctagggaaggggtagtacatttcgggtcattgagtcattgccatagaaaggggcagtaacgcctggctgttgccatggcaatggtagattgacagggcacgctggtgggtgtatgctatggaaaactgcttccaccccagccctgttttagctaatcctcaatacagtcccttgtcggagccctgcctctggagttgagtcccgtctcctgcatcaagaagccaaggagatattttggatcaaatttaagcaaaaaaacgcatggataaaagaaaacttattaaagaatagtccacattcaggagaatgcacatctcacaaacgtggaactctggattttcacgaactgcagacagttgagtcagcagcacttgcaggagcaaatggaaaatcaccagctctcagaacctccgtcctgctggctccagtcacctcagccccctgggggcaacatcacaatggcttctaaacccctagatgagttccatccacctctgcatatcctatgaggtgtgcaggcctccacagttagcctcgttcactcactatattaatctgttctcacgctgctgataaagacatccccatgactggacactttacaaaaaaaaagaggtttattggacttatggttccatgtggctggggaggcctcacaatcatggtggaaggtgaaaggcatgtctcacatggtggcagacaagagaagagagcttgtgcagggaaactccccttttaaaaccatcagatctcatgagactcattcgctatcatgagaacagcacaggagagacctgccccacgattcaattacctcccaccaggtccctcccacaatatgtgataattcaggatgagatttgggtggggacaaagccaaaccatatcattcagcccctggcccctcccaaatctcatgtcctcacatttcaaaaccaattatgccttcccaacagtcccccaaagtcttaactcatctcagcattaattcaaaactccacatttccaaaagccttccaaactgttacaacctctgcctgtttcccagttccaaagtcacttccatgtttttgggtatcttttcagcaacgccccactctaccggtaccagttgactgtattagtctgttctcatgtggctgataaagacatacccaagactgggcaatttacaaaagaaagaggtttaatagactcacagttccacgtggctggggaagcctcacaatcatggcagaaggtgaaaggcaggtctcacacggtggcagacaagagaagagagcttgtgcaaggagggtcccatttttaaaaccatcagatctcgtgagacttattcactatcacaagaacagacccaccctcatgactcaattacctcccaccaggtccctcccacaatatgtgggaattcaagatgagatttgggtggggacacagacaaaccatatcactcaccattttgcccatgagatttgcccacatggtctccgcagctgcagaccgcacgtcctcacggccgtagaagtgccgtcagtgagatgatgtgccctggcttatgtgttcaaggggcattcggactctttccagtttgaggttattatgggataggaggtgctgctgtgtacatgttggctgtcatttgggtacatacctgagaatcaaactgctggtcttggagtaggcttggctttattagatgctgtcaaagtctaagcgacccttcacatttcgcattcccccgagtagtgttcagggtttacttggtgcacacttggccaacacgggatgtccttctatttctagccactctggtgagtcatcagtggtgcacaccatggtttcaagttcatttgcactttctcagtgtctataaaaattgagcaactagcagtacctttattcacatctccttgtctgtgaaagatccactcaaatattctgctggttctgcggaatgatctgctttttctcagtgatttgtgggaatcttgcgtgttatggatttcggtcctttgctgggcatatgtgctgagaatatggcctctcccccatggactggtttttccttctcctaatggcatcttgttatgagtagacattcatcttggctcactccaaggttacaaaagtgctttcctggctgggcacagtggcttatacctgtgatctcagcactttgggaggccaaggtgggaggatgaatagaatccaggagttggagaccagcctgggcaacagtatgaaactctgtctttacaaaaaaatataaaactttagccaggcatggtgtcatatacctgtggtcccagctactcaggaggctgaaacaggaggatcacttgagcccaagaagtcaaggctgcagtgagccaagatcacactgccaccactgcgttgcagcctggacaacagagaaagtccctgtcttacaaaaaaaaaaagaaaaaaagaagaatattttcctccacaatttttattgtcttgtctttcatatttaaacctgaaatttatcttaaactgatgttcgatacgctatgatgtagaacttgaagttaattttttcccatatggtctttgattcctcaagcccccattactgaaaagaacaccctttcctaccgtggcaccaccccacctctgtcataaatgagtggatggcatctgagtctgtctctggacttttcttatttcagtggccagcatgcttatctttgctctctttaatcctgtagatttgcagtcatatgggggtggacgtgatatctgaccaggtccatcctcaactttgtgcttcctcaagactgcaatcttcttgtctctttgagctgttgcatggaatttagaatcaacttgtcaaagaccgggggaaaagactgccaagattttaattgatattacattggaatgttttgattatttcagggagaattagtatctttacagtaccgaatgctgtcatccctcaatgtgttatttccattcatttatgccagatttctttaagctctctcagcaatgttttgtagttttactatcgatgtcattcacatcttccattttaattcataggcatttgatgttttaatgctattgtcagtgacatttaaaaatgtgttccatttgttgctgttccaaagaaatatgattgattttttatgttggccttgaatctagtgaccttggtaaaatcacttgcaaaatctaacagtttgtctgtagactttctggattttctatatacacattcacgtcatctgtgagtaatagcactttcatctcttcctttccaatccttatactttaaatttctctttgctgtgggctgcagagatgggacctccaggacaatattcagtagaggtgtggtgaccatggctgtccttttagtgcagactccagggacatttttgcaatatttcaccactcatgatgtttgttttggaattttctgtagatgttttttaccagattaaagaatttcttttttgttccaagtgtgtttattttgtaaagtcatgaataagggttgaattttatcagtatttgtttctgcttccatcaagataatcatgagatttttcttcacaccttctgttactatgatgtattactttgatttttttttgaatgttaactcacacttccttccctggaataaactccagttggtcataatataatatatgctttacattgttaaattgaacttatcaaggtctcactaacacggaatgaaatgcaccaattttaactgtacacttcagtgagttttgtcaaagttcgttccccaggtaatgtccacccaattaaaacacagaacatttccttctcccttagaaattccctcttgctacctcccagtcaagtcttgtccccactccacataagcactgatgcaatttctatcaccttatgctaaatgtacttattccagttaaataaaaatgcaatatttgacctctttatgtctgatggcttctgctaagcatgatatacttgtgaaaagcaaccgctttttcatacatctccaggattccttttaaaatataaaatggactttaaagtaatttcagatgtatagaaaagttgtaaagatagtacagacagtttctgaatacctttacccactatcccacgctaatgctttacataatcatggggtacatttgtcataattgaaaaaatttacattggtaaattgctgtcaaagaaaccccatgccttactgtgatatcagcagtttttgcacgaatgcgtggtttcctgttccaggaccccatgcgggagactggatcacttttatttgtcgccttagcttcttcaggctgtaattgcttctttctaaaatttttttttagtaagttaacaatcgtgaggaatactgtagctccaaaatgtctctccgctggggcgcctgtttttcctgcaactgtactggtgttgagtgtttggggggacagacaccagagttaaagtgcccggctcatcctgctgcctccccgcctctcaaaacaggagacgtgacgttcgcccctggtgaaggcatctccacggtagttattttttcctggattatgctatatttgttaaatgattctctatttgttggattatgctctatttgttggaagtaactcaggaagtccagctcacacatagagaagagaagctaagcttcatttcctggagcagagagaagctccatatattatttcaaatttgctgtggactgaacgtttttgtgtctccccaaaatttctacttagaaatactcatcccaaggtggtggtattaggaggtggggcctttgggaggtgatttagtcatgagagggagcctcactggtgggattactgccattatgaaagagaccagagagaccccttcccctttcacctcatgaggacacagccagaaggaggctgtctccagatgatgaatctgccagcaaccgggtcttggatgtctcaaccttcaaaactgtgaaacataaatatctgttgtttataagccactcggtctatggtattttgtcacagtcacccaaacagaccaagagagaaattggtatcgagagagggatgctgctccaataggtacctaaaaatgtggatgtggctttagaactgggtgacgggtagaggcggaagagtctggaagtgcatgtaataaaaagcctatgttggcctgaatgaactttcaaacgccatcctgatgagggctcagaaagaagaaaggagggcttggaggaagccccctccttcctagagagcatctaagtaaccctgaggagaatggctgcagaaatggggatcataaagaccactctggcaaggtgccagtgggagtgagaaacacattaccagacagtggaaggacggctgtccttgttacacgatggcaaagaacttggctgaactgtgtttgtgtcctagtgttttgtggaaggtggaacttgtgaacaataaaatttgatatttggctgaggcaatctgtaggcatggtgttgaaggagtggcttggtttgtcttgacaaaggaatacagtgtagaaatggtcaagtcaatgggctatccattgatccaatgtatcaatacagactcaagtacggggcattgatttgatccaatacaagaattggatgcataaattgatggggagacagaacacatcttccttacagaaggtctcttccttagttcgtttgggcagttacaccaaagggccctagactggaggctcataaacaacagaaattaatgactcccagttccggaggctgcaagtccaagataaaggccatggcagattgggtgcctggtgagggcccaagatctggttcatggactgtgccttctgtccttgtcctcacatgctggaaggagtattcaaaattcaggctacccctgagtctctgaaaatacattttatgaatgaagtgaatactttctttcatgatacaattgaaccttaaggaagatgagcccgtgtgccttgctctgaaagttcatcagactcatcctccttccaaaatgcacttccgcttgactgtgaaactagcccagtgtgtcaggaagtggagaaactcaagccctgcccgtgtgcgtgtgaacacgggtgtggcctagacgctccaaactctgcctggaatgacagccagctgaaccagcaaagccatcaaatgacttccaccgttgagttgatcggtcttctaagtgtaagagcgtttattaccagagcccgcaaagtgaggactattatggcaggagatttccaagcactctcgtccccccacaaacacacacatgcagcaggggtgggaagagcccctcctgtttttcagccctttcatgaacatcacacacacatcagcatggtatgaaggccacggtggggggcttggggctggcacaagaagggccccagctgcagccatggctgagggaggtggggacctgctctgtgccctcagtgatggactggacactgctgtctcataacagtcctgtgcacctctgcggggctcaccagagttgccccttccttcttcaaaaacatttacgtgtttggtacacctgtttaatcagtctgactttctccactgttggagtggtgtgcttacttctcttacaaatgaatagaatcattgaatgtaaaagagatggaaaaataaagcttctacctcagcgtcttgggcgatgagtttcgatgggtgaggaaacgtttccgcgagatagagaaggggcgccattgagtgaacaatctcatctttcacctccaagattcatgcactagcagccccaagccccaccaaatgaaggggtctgggtggtgtaggcactgcctggtcattaaggaattcaccaagagagcacaggtagattttccaccaaggccagagtgaatggtgtttaatgaacgtggctttatcataccatggtgaagggattgccaccgtcagagaggagtgaagctccccaaggtcgtgaattgaggctgccctggagaactggaagccactagagctggacggggtgggagaaaacgcacctacacccaccatgcctggtgcacaggctgaatggccgggacggcctggccctccctgattctgaggtgtcgagttccctggggatgccaaggaaccggcaaacatcaaccaactcagaatcccagccccgtgcagatactatgggacatcactcagaatcccagccctatgctgatgctgtgtgacatcacgtggagtccgtggcctgtgtgtcaggaagccgacaaagccaggaccccacagtgaggccagtgtgagctccatccaggcccagatgggtgcagaggctcttgcccatggtgcccatggctgagttctcccctctcagccccatgtggactctccacagcctgctggggtgctgtagcctccatgagatgcttatccgagctcagtctctgcaccgttgaatcaggagccctcggagagcaacagccccttccttcatgcaccgacttctctgggatgatcccaagccctggacatcacggcatggacgacgtccatctcaacctgaccactggagaagctggtcagcatccacagaaccgacatgggggagctgggggggccccacccgctcagccagggacacagacagccttcatcctgcactacctggcctccaggactcacggatgaggaccggccctcaggacggtggacactcacctgtcaagcccagaaagagtccggctctctggaacccagcctcaggagggcccctggggactaatcctcagagttaactcctcagtcctgctgagttttcccatagctgaccgatatctgctcaggggtcagggggacccagctccccgctgggcccagggcttctgagaactcaccctggctaacatcctccaagctcctttggcagactggcccctgaatcctctgtgggcccgagacactggctggctccctagtcatcgagcagctcctgctggactccccacaggggatggagcaggccgcgtggtgaggccacacagggacagcgtcggaacggctcatggtgggagcagccacagcgcacctgcctagaacgcctggtctcctgcctctgtgcagtgtgggcgagggggtggctgcctgctaagggctaatgagaagacaggacctgagcggtcactgccaagcggggcgcccctctgcaggtgctggatgtggccacattatgaaaaggacgcctcatccctcagctgtttcgtaaattatctaaaaatcaaccttccgttccaaaagtgacctaaaatgataagctccgtggcgggaaatgttgccaaatgttttcttatgaaaaccatgatgtcagaaaaaaggcgtaatgtctttatagagggctggagcggccggatggggcctctggggcaatcaccttaaaagctttccaatatttttagacttgtatttgctatttgttcgagtcactttggaagctcagcacagcttttgttttgggggttttacgagtttgtttaatgcccacggtccaagtgtttccatccattagctcggctgcgtcagcgccaccgcgatctattaactcctcccgccaggccctcggcggccccgtggccacggcaggcgctacccaccctggctccctgcctgtggcttcagaatttgtggaggtgagccctgcacagcccggcttcccactctctccgggaagccaccatccctggcaattctgtccccccggaggtcgggccctcatcagctgcactgtgtggcctcctgtctctgggactcctgtccttgaccctgttatgaacgagggaagcatcctgtgatcctctttgtggtctttgctgctggtcgaagcattttttggggctcagggatgggaactgtgtcctggaccacgtccagcctcggggcagggcagagatacactgcctgggagcctctgtggttccagcaaagccgcccaggctccagccctgccccacgtttcctggagggcacaggcagtgcctgtcctaaccctgagaggtctgctcacggggtcaccccactgtggtcctcattcctgatatcgagcctgagtccctgagtcatggagatgcaattggagatgctgtggaccctctaagaggaatttccgtcccagctgtgtccctgggggtgccctggccccgcctgtgttgcccctgggctgcagagttgtcctcctgacccatgaccagcccctgagtgtagtggaggccgccgtccccccgtaccccctgctggttttgagggagctgtcttcttcctcataccagctttctgccaatgcctgccccagccaagaagcagatccacctctggaatgggaggctgggtgagccatcaggagctggtgccagctgcacacaggaggtgtgtgagacagccagtgacgtgcagtggcaggaagacctgagtgtggtcctgggctccccccacggctcaccaccctaaaggtcctatgcatggggccacggggtcgtgcctgcagcaagacctaggggagtgctcagcacatcccaaaaccccaggctccctctgcacatgtgggattacctggagcctagctggggttgacccgagtagggggatggcccagccacagcacacaggacccccagttcttccagctccaagaatggcctctcctcagacatgcgtccatcaaacaggcacagtggctgagctccttccagtcacctcctggacctccggctgggcgaagccgcctctgcccgcccactgctcacaaaacccctggactgtcccaggtcctccagcccctgtggatcccacttccgtctcaacccacctccctgctcctgtttccccaccacgttaaaatgcccagaaaggggcctgtagtcggtagccttttcccgtctccaccttctcctgactcacactgcccggccggcatctctctatggaaacggggctcgccaaggccttcagtgatgtctgtgctgcaaatgtagttgttggttctctgccctcaccgggtttaacctccctcctgaccccacacaccacttccctgatttatttacttttgtccaaagtccttgtgtttatcagggttctccagacagtcagatacacacacacacatactcacacgtgtacacacacatgcacacaccgatatacaaatatacatatatgtatacaatgtacaaataggctttacacacacacacactcacacatgtacacacacacccatgcacaggtatacaattatacatatatatgtgtaagatgtacaaataggctttacatatatatgtaaatgctacatgtctgtaaatgtatacatgtatgtaaatgtatgcatatatgtgaatgtatgcatatatgtatggatatatgtaaatgtatacatatgtacatagatatatgtatttacatatagatataaagcctattagtacatcttatacatatatatatgataatttccgggagcaaggggctgtctccctctctgcgtatatccatatatggagagaaagagagattttaagaaattgactcatgtgacagggggtactggcaagtccacagcctgcaggccaagctggcaggatggataaagggttgatgctgctgcccaagtctgaggccacccggaaccagtgttccctcctccgggggcaccccagccttttgtcttaagcacctcaacggattggtggcagctcacccatgtcatggggactgaactgctccactcaaagtcggctgatttaaatgtttgtccaagaaacaccctcactgcggcctctgcactggtgttgaaccaggaatctgggtcccacggcccagcgagtggacacaggacactgcccattgctgaccaggcctcgccactccctcgtccacgctgcagctgctgtgctagctttttcgtggctggccccatcccgctgccacacagctccctgagggtggcgttcctgtcttgtcagctctggcaccccaggctttctggccatttctggactgcatgaatgaaggccgaggcagaagcaccacctgagacgcaggctcagggatcaggagggaccgttgcccacaggactggtctgggaagctggactcccggcagctcttccccactagcatgcaggcccaggggtaagcatgtgcgattacaactccaacaggaccctgtgcacacaggatgtccgggcggcttggacttcccacactacttaatgtgggcaggaagccatggcccctctgccgatggcttcttcatcattggggaatcttctccgtagctccagcagccggcgcacgggcccaggaactggtcaacagcgatcaatgacttggcagtggctttcatcagggtcagcaggacacagacgaggtgaatgccatttctgccctggggttaggacttcacaagttgtcaataccttggaatcacccatgcagctccaccctcatccgggcgaactcacaagccccacgcaggccatgcatctgccagggatgaggcccaggaagacgcctcggccaaaccctgaggatcacacaggggcaacatcgttaccggatggattcgaatccagagcagtctggggcaaagcaagcctaattctgttttcccccgtcatctgcgccaacctcctcccacatccctgtgaggcagagccaggagtgcagcagagaacaggggtgaggatgccaaggcccacgctcggcgctcctaccggccctgccactggctttgatcccctggatgtggaaggagcccctgaaccgtcttccttcacgttcccgtctgactgcctctgactcacctgtgaactctccgcacagcacccaccctgagcttgagctcgcaattgagagcccctcggcgccacgtgctcccccttgctaaccacgtcgccctggggacagggcaggcgaccgagagggttctccatgtgcaagtccaggccccaccctcacagctgcgggacgctcatccatatatccctcacttattcattcaacaaacagcaactaagtgccctcttagggccggcaagggctgaggagctgggcagccctcaagaaggacacagccgggtctcctgacaccaaggggcgtgcctctgagcagaggccgtaagagccatgtcggcacatctgtgtttcaaagaattttcgacagcaaggactgcagaggcacagaacaaactgaggggtgggaggcggaggaagcagaggacgctggttatggcagttggggaaagattcctcaaaggagggcagtggccataaggggttcccaggggccaagcgaagaccccggcaagagctctagttcgtttggcttttgctttcctatccgcaaagcgtaggcgacgactcccacccagcggattattgcaaggagtgagcagggtggatagagaagtcgtgccaggagggtctcccgtcaagtataaaggagaagacggtgattgttttgggtaatggagccatttttctcagcactgctccatctgccagctgacaggccacaaatggggactggcccgcggcgtcactggggtcccacccaccgcacgacacacacagaaagcggaggaggccccggaggacggcaggcgtgcaagtggcagctgtagacccagcagcatcctacagggcagtgaaggggccttggcccaaccttgtctgacccacgtggacgccgaagtctaggaggggaagggacacactcagtgctcagagcagcccagcagcaaagcaggacaatggctctgctctcccaacccccaggccagcatttgtcacctcagtgacccagaggagagcgtcagccatcagggacgtcctggagctcccgttggccctgggggccgcccctcccatggaaagctcggggctgatttgtgcacagggctgggaaacacagcagcaagtacaggggggccccatgggggaggtgcagaggacttttgggggcaggcgggtgggaaggggccttgaggggtgcagaggagcccactggtctgaggactccgggggcaggacggggctgaggacaccttggccctgtgaaagccgagtgtcacagttccgcttgctccacggcggcgcgactccacgctgtatgcgtggtacgaggcgagggtggtaaggcaggaagtgggcagaggctttgtgatgagttaaccggctgggcgttaccctatggagcgggagagccatggtgcatccaggcagccagaagcatcctccggcgcctgccgcagaaggaactggaattgcgagaggacaggggtggacgctgccgcgtgggaggcgtgctgtggggatgacgcaccatcctgtttgtttgcaccaagtcatttatctcgtgcaccccagggggccgtggtccctgccgggccatcatgtctgcttcccttatttgggttttctgccccctcacttcatttctcacttcgcttttcctccttatccctttgcagtcttgcttttgggggcattgctcagccagtaatttgagggacacctcgtggagccctagtgtggagccgtcagagcctgggtaggattctccgtggtgaggtgctcagggagacacaggagcattccggcgcctgttccttgtgcacatccgcaagtgtctgcagtgagaggcatgggtcccatcttgaatgccaacaatgtggcacccacaccccacttgatggggccgagccacagctggccaggttgaccaccatggacgtgccagaggcatccgagacccagctcttgcccagctgttccactgccaactccagcgttagcaaagcagctctcccttgctttgtcttctacagcagagaacagattaaaagaagagaagctgcaggcagagaaatgcctcttggagccaatgccccaaaggatctctttgaacaaagggttgctcaggtcagcgttagttcctggcatcaagcaacaaaatcagagatgctaacagttctcagattcactccaagtgaagactcaaagctggatttataaatccccacagagccgctgtgcagaggtagagggccggtttcaggatgaggaagccctcttggaagcaccgtcctccgctaacagcctccaacctctgtccccagggagaggcgcgtccccagcgagtcgcatcagacacgtcccaccgtggacgtgtttgcccctagtcacctcatttctctgctcacagcgcacagtgctttcgttgcattcttcgttagaacacccaggggaatcccagcttttcctcaaacggagaggcaggacacccagagacagctctgattaaggtgggttcttcccagaggagcagagggaggggagcagcctctaggctctaggacttccttgtcaccagaaaactcggacggcttctgcactgaacaaagcctctttgaatgctatggactgaattctgtctccccaaattcacttgttgaagccgaaccccagtgtgtttgtatccacagatggtgcctctgggaggcacccatcaacccatccattcatccatccatccatttatttcccatccacctttccaccattcgtccacccaccattaatctatccacgatccacccatccacccattcaccatccatccatccatccatccatccatctatctaccattcatctatccatccatccattcatctacctattaatccatcattttactcactcacccatccatccactcatcatcagtccactcagccttccatccatccaccatccaccattccatctattcatctatctaccatttatccatccattcatcctttcactctccacccacccatccatccttctcttctctaagcttctctgtgtagccgtgcttgctgggctccagggactcttagttcagtgtggggagtggtcaggaaaacaatgaacagcattgctgagcactgtgagacacatagtaaacaagtcctggaggacccttggactctctgaagcagacagcagagctctcccagaggcaaaggcaggtccgggattctgcagtgagcaaagtgtggccacacacaaagtcatgagctgggagcagctgattccccaaggctggaggatacaaggttgggccagggttgagggatcacatggtggtcctagtccagcctctgccctggccaggtggtttgtgagtgtctctgtgctgtgctttgtgtgtctacacctctttagcaggggaggcttccatggtattctaacagttgtcgagggtgaggaagagcctgggtcactcagggctgagtagaaagtaaccatctttgagccttgtttggaaacatgtccactggtcctgggttcccttctttgacttaaggagttgaatttttatgaccatgacccagtgtttctgtgacattccctgggagccttcttctcacagaggtgagattgtgtgttattgagggttccccagagaagcagaatcaacaacatgtgtgcaaggttgtgtgtgtgtgcatttgtgtgtgtgcatttgtgtgtgtgcgcatgtgcactcacatgtgtgggggagagagatttgttcacatggaaacccagggagacacacagttggggtcccaaggccttgctggcagaattccttctttctcagggaggtctgtcttttcctctgaaatccttcaactgattgggcaaggcccacccacattaaggaggtcatctgctttacccagtccatggatttaagagttaaccatatacaacaagccttcacagaaatatccaaagtaatgtttgactgaatacatgggccctgtggccagcactgtctggtatgggttgtcagtggagctcaggtggttggaaggtgactctcatgacatggggtgcaaaggacaggttcttggaagcctcagggctgagcagtggagtcagccatccctggctgtgggtggaggagggaagagcccagggtaactgggaggctggttctggcttggcctctcacacacggcagctcctccagcctcagccatgaccccagccacaccctccgacatggccccaggccagtcacaggacttctgtgtgtcctcatgtgcagtcagtgaggatgacaccagccacgcgggagggtttggaaagggcagccgtcacgctcactctggccatcatgtgatgatcacgatgactgctatgaatggcatcaccgctgcagtgtaatcatcatgatcacggctgccactgtcagatgccacctggccagcctaaagcagacgctgtcactgcagctgtgactatcagtgctgctactgcgactgcaactctgtacagagtgggtgtgtggacatacatgcgtgtacacatgcacgggaatactattcagtcttaaaacagaaggaaaccctggcatttgtgagaacatgaataatctggaggatgttaagataaagcaaaataagccagacacagaaagaaaaatgttgcatgatttcacttattgtggaattaataaaagtcaggttcctagaagcagagaagagaatggctgttcccaggggctggaggtgggaaaaagggaaatatggtttgaagggtgcaacattttggttattcagcatgaacacaatatggggttctaagggacagcagggtggccgtagctgataataatgtattggacacttgaaatgtgccaagcatagatccccggaatcccccacacagctgtgaaagaaagctctggaggtgatgagagtgtgactcagcctggtggtggcagtcactacacaatgtgtgcatataccaaaaatcacattgtataccttaaatatacattttttatttgtctattataatcaagtggagagcaaattaaaaatgatgatacaccctgtattagtctgttctcatgccactaataaagacatacctgagaccgagtaatttatgaaggaaagaggtttcatggactcacagttccacatgtctgggggggcctcacaatcatggcagaaggcgaaggaggagcaaaggcacgtcttacatggtggcaggcaagagagccgtgcaggggaactgccctttataaaaccatcagatctcgtgagacttatccactatcacaagaacagcacgggaaaacctgttcctgtgattcactcacctccctccaggtccctccaaaccccttcccgtgattcactcacctccttccaggtccctccaaaccccttcccgtgattcactcacgtccctccaggtccctccaaaccccttcccgtgattcactcacctcccactcagtccctccaaacccattcccgtgattcactcacctcccactcagtccctccaaacccattcccgtggttcactcacctcccactcagtccctccaaacccattccagtgattcactcacctcccactcagtccctccaaaccgattcccgtgattcactcacctccctccaggtccccccaaaccccttcctgtgattcactcacctcccactccgtccctccaaacctgttcccatgattcactcacctcccactcagtccctccaaacccattcctgtgattcactcacctcccactcagtccctccaaacctgttcccgtgattcactcacctcccactgggtccctccaaacccgttcccatgattcactcacctcccaccgggccactcccacaacacgtggggattatgggagctacaacccaagatgagatttgggtggggacacagccacaccatatcatacctctttgagttctgagattctgtgcattgacctcagaccgaagcttctccctgcatgacaggtacctgcaaccacagctgcccggagacctgggttcttcccatgcagcctcacatgtgagattctccagctcccagccctttgtttaaccgtgggatattggctcagggctgaacatcatggggaatggccagcacgtggatgatggagcaagccctctgttttctgctgctctggatgcactcctcagacactcagtggctccttccagccacgcaaagccatgcgtcctgcagaacccatcaagggacgaggttctaaggatgctgacggggctgccgtggcctgtggacaggacttaccaaggacagatgtgagtcatggagataaagagttgcgtccttcagtagaaatcagaacttctacccagtggcatttatcagaaatcaaagacatctaggttgactcggcacagcgtaatgtgctggagtcagagaggggaaaacataagaagctgtcagggcctacagggctgggcagaaagcaaagagacagtctcaattaaattcttcaaattaggtcactacctggttctcacattaacaagaacaaaggtgggcgcctcaaaccatcaaagttacgtcatccttgggatggcacggattcggagggaatgcagttgcagtaccaggtgtgtctcctggaagaatcttccaatctggttatcaatcaaaacagaatgatgctgccctcattcatcagtccatggatttctgattgtccagccactgggtctcgagcttggactctgggaagagcagatggaggcagtgggagccgggcctggtgctatggcggagctctcccattcacaggcttgtttaaggcttggtttggggcgtccaggtggggcctctgatgcctgtgtgactcaagggtacacattccccagaaggcctgtcctctacgaagtcatttctgtgtgccctccctccatcggagctcaccggtgcctctgcggtctgtgttacaggagggagttgcgaacaaaacatggtcaaagtgatatgaaaaggataaaaacgagggtatccctgtgcttggataaagtgacatttccagacaaccataagttagaggatcccacctcatcttcaagataccgtgaactacagaggcctccctgagggcagagataaggccccatctcagcaggggctgggggagagtgaagttttcagtgagaagcagtctgtgtcttggaagcccttgagtaaatgctgctctggagtgaagaagttaaggaagactgtggtgggttggattgaagttggagatcttggagttgagctttttacaaaatacattttcctatctgtccagcgaaagggtctaaagcaggcaggcagagcagaagcagtgagtgccaggatcgcagccgatcgatgccagtcctgctcactgcggcgagggctccttggagaagcagctgagtccagggcttaggccagaagaagagcaaggtgagccgaagcgctcggctcccgaaggcagagaagtgtccaaggacaagtgggccctgtcccacggcacaggagccggcccgagggaggtgctcactggccaaatttggcccattttgaacaaaaaaatatgacagcaatgggttagatcacatgagaatatacccaagaacgtagtgtaataaaaatgggaacttttttttttgagacagactgtcgctctgtcaccaggctggagtgcaatggcacgatctcagctcactgcaacctctgccctccgagttcaagcgattctcctgcctcagcctcctgagcagctgggattacaggagcccgacaccacacctggctaatttttgtaattttagtagagactgggtttcaccatgttggccagggtggtctcgaactcctgacctcaagtaatccgcctgcctcggcctcccaaagtgctgggattacaggcgtgagccaccatgcccggccaaactgggaacatttttaaaaggaaagaaagcaataagagaggaaaatagaaaagaaggaaggaagggagagagggagggaggcagagaaggatgaagggagcgaggcagagaaggagacaggaagggagaaaagggtcttcccttcagaagaacaccagctaattcatgcaggacgcagtggcactgcagtcacacatgtgagcctctgagggagagtccagctgtgcagagatcatcaggggctgctgcagaccccaggtgaaaagtggcagaaaggaggtcattcccctggactctggtgtcaccctacagatgagtcataattacgaagggaaaagagacctctccagggagaagacatcgcggtcactgctgggcctgaggctctgctgcttccctgtgctgtgggacaacctgtccggacggccgcagatgccaggaagtcagaagtgaacacaccactctgcagaattcctaccaggagctgctcaaccacatcgacccattcagaactaatcagacaattcctgagtgaggcccgtcctatagaccactgatgggggaccctacagagacgtgagaacctacggccacccgtggctgcccttggccacccacgagctttgatgaatcctgggttagaagggaaatgatccaccatcagctacactcctgggaccacagggtaatctgggtatggacctcagactctgcagacgcgggaggggccggacctatgagctcgcggagcaggctggcagagcccccactctgggaccccccaactcttcagtcccttgaatatgtcagtggattgtgcatttcccggaagtttgcatcaacacataacaagtcccagctccgtctcggaaggaggagaggacgccgaactcagggagaaggaaaagccgggcttcctccctccgagcagcgcggtatccaccccgagaggaagagagtgaggtcaggtggagacgggattggagggctccctccaagcagcgcggcatccaccctgacagggacagtgaagtcagggggggagggattactgtttctgtggcaggaccctgggtggtctcgttcccccgtggtgacagcatagccttctgtgtccactcgccctgctcaagtcccagggtccctgctgccctggcggctgaaggaggcctcactaacatagatggcccagaggcacgagggctccacccaggttctgggtgtgaggcctcccggcggaatcccccacgtcccacctcacaggaagggcagggagaagccctggagccccagcctcccgtcacctcttgctgacattccctccatgaagtatgtcaagagctgaagagcttggccatgaggtccacatgacaagccttctccatttcacgttgactcaattccaagtgcaggaaagccagggaaccttcctttatccaccagtatgtgggcccctcttggatagtctggccttaccaacaccggctcagtcagcgtgggaacaggggtacccacgactcggggttcaccacccattgccaggaacacctgggtctgatgacgatcatgatttgataggagaccactctccccagctccaggtccctctctggtggtctggtggctcctgcttctgtcaatgaatgacgaaagaggccctgcctgcagctgccttgcctgtggttgcagcggccaacccaggtgcaaggggagacacatgggtcccctgatggggcgtaacagccgagttatccacagtcattcatcctgcaggatgttgggtgccttccgtgagcccggagctgcaggtcaaacgtgcagtgactgcccagctgcttccgggaattcacttggagcagtgctggggctgtccaggcccgtcctttatcctgccctgggctcaggctccgtaggaacctcgtgacctgagctaggacttgtctttgcgttgagtggagggaaagccgcaggagcccggctcccctgagcacgcctccctgttgttcagggaaacaggtgtgcatggccacagatgttctgcttctctggggctcaaagtgtgagccaggcccctctcctggaggaggccccagctggctggggagataagaggcacgcggaggcatggcagaggcagattgtaagcgccaatggtgccaccgatcggcacggtgggggctgagggcatcgcgtgtggccgactccccagacagtccagaacgattctgacttgaagaaagtacaaagtctttttcttctcaaacctgggctctaatatgctgagattggttcttttattttttcttttcaaccctggcagtagaacaagcttctcatctgcatgtagcagattaaaggagagctctgagccgtggcctcgcccaggctgtggacaggttctccaggaggggctcgatgtcagccccacataggcagagcacgctgtggttagaggtgggccatggtcctccctgggagacaccagcaagcatgcacaggggcaggtgctgggaagagcaggctgctcaccttcaagtgtggacggatggatggtgcctgccctatggtcctggagataaggacagacgacccagaatacaggcatcttcttttgcctttattgaaaaaggaatagaatcaaaccaaactgtcaagccgcgccagcagaccttgcagctatcaccgatgcacccaggtctaacttgcaaatgaagccggaatgctgcttacacacaggcgcacacagagagagcatggacaaagaagagcagaggctgtgtgttctccatgctggcggtcccgtgctacccactgcttatcttgctgtattcggtccaggcgtcccctggcacataccttcggtccaggcgtcccctggctcatagcttggtaatgatacggcattataaatagtacattaactcgacaccatgtcttgcaactgtggacagcaaagaggtgtcagggcagagtccaacccagaggccatctgtccggtcgcaggtactggtgccatctctgcagccaaccccctccctgcccaggctggaaattaggcagctgcacctgttgccttgtgaacacgtcccccaagaaccctgccgtccgagccagagaggccagaccttgggaaacgcagcttcccccaagcatccttcctgacagtattagtagggtgcactccacagatagcacttgcccagcctctctgtaaatttacactttttcctattgtatcaatgcaaaatgttttttcccaggacacattcccctggggatagaagaagagacttagagcaggtggactttccaggactgtaggcactccagccctgtagcctcctcctcttccccagctgttggactatctgctagagaggctggggttcctccatgtgcaggactccccttggctggcactggggctgcctctttctctgctgggttctgtctccctgggatggggctcaggcttccccggcgagggctgtggtggcacctcctttgcactgtgcacaagccctgagaaggaggcataggaaggatggacagagtggctggtccagagccgcccacctcctccgggggatcccagcggccatcctgggtgtctggatgctcgtccttgtgtgcctggtccgtctcctcccagcggccattctgagtgtctggatgctcgtcctgtgtgcctggcccctctcctctaacctccatccaggtctgcagtgcagtgatacagaggtggcacccgtgagcccagtcccgacaaactagaaggtggaacaggacgaaagagaagggccctctggtcacttctgtcccctgaagcacctgctgccactgccctgtgagcagagctgtggatgctgagcagatgtggggcggggatggatggagctgttacattctaaacacgggcactccacagaggtcacaggagcccaggcctgcccacacccacacaggaagtgccccaaagggtttgtaactcaaggttccaagaaatggagacagggccgggcgcggtggctcacacctgtaatcccagcactttgggaggccgaggtgggcagatcacaaggtcaggagatcgagaccttcctggctaatatggtgaaaccccgtctctactaaaaatacaaaaaaattagccgggcatggtggcgggcacctgtagtcccagctacttgggaggctgaggcaggagaatggcggaagcccaggaggcagagcttgcagtgagctgagatcttgccactgcactccagcccgggtgacaaagcaagactccgtctcaaaaagaaaaaaaaattaaaaaaaaaaaaccagacagatccaggcctgggtcccttcattgaaataaataaaacacacggagaggagcgcgcaggagccagagacaggtctgtgagaatgaggcgagggtgacgggcgagggggcttgtcctcccggctccgcctctcgctggagggtgagggtgaaattcaggcactcactcagccaacagcctccaaaaagagcctccctcaccttgcttgttctaaaggaaatcccatgaattcagtccccaaaggacctttgacttttatagggagggagggcagggtacggagagacccctccttcctctcggcctcccagccttcctgaggttccctccattccttcaacccagattttcatttgtgcttgacttcttgctttgtgctgtgtttctgaaactcttctaagcccatcctcccgctcactcctctaaagttaatgtcccagccaagaagcctcaaagcagggtgtcctggtgtggagtggacatggccaaggttggaccccaggggaaaagaagccgaccttgagcggcaaagacacagggtgggcgggggcctcatgagcatgcaggggatagatcagggtgggcggggacctcacgtgcaggcaggggatagatccaaccgtccgtgttccaccatggggacagaggatcaagagccgggggcctcagtctcagcagagcccgggtggcagagagggactaaggcctggaggaggccctgccgctctgcgtggaaggcaagagtgagccatgggatatgatggggagcagggttgtgactggagagtgttgctgggacatcatgctgctgcaggcggggtcagagctgaaactctgaagtggatgagggtggggtggccttgggaaggtgctcagagagaagggagggcccagccgggaaccgtgagccatggtggcatccgggcaacctcccttgtctgggggtggctatggggctttggctgcgccgagtcctttggtgagtgctgccccgctcactcctcccgagactgagcctccgaccgccctgccagcgtggtctctgtgtgaggagaagggtcccaggggagaacaacagccagagtgctggatcccgcagcccccgatgtgaggtcacacaggaggtcaggctgggccatgctgatggagcttctgacgggtgagaaggacacacacccaaagccacgctctggaaaccggtgctccagtcaccatcagcaaacaggctgcaggcctggcgtctggggcacgtaattaaggttgtggctctggagcagccttgctgggtgcaacctcggtcacgaagccacctcccctgactgtggtttgtgtcccgctgggcacaccggccccagctctcccaggcccctgggcagcgatgtccaccccacttggagattgggaggaggcccctggaccaggtctatgtgagaatctcatctcaggaggactgctgggcttcaggagacagaaagcagtcactcagaaagactggcagagccctgggggaggatgcgtggagccgggggtcctgcaaggcacagagctgaaggagcagtgagcgaggaccctgatggctccacagaggagggtgtagctggggcctggtgactgaggggaccagagaggaccctgccagctccacagaggagggcatagctggggcccagtgactgaggggaccagagaggaccctgccggctccacagaggagggcgtagctggggcccagtgatcgaggggaccagagcagcacagcgtccaggacctgagacccaactggctgtgtcctgacaaggaaggaaggggctggagagttttgagtagagggggccacatcattgctttatataaaggattcctgcccagcacagtggctcacacctgtaatcccagtgctttgggaggccgagttgggaggatggcttgagcccaggagtttgagactggcctgggcaacatagcaagtctctgtctctacaaagaataaaataaaaattagccaagggtggtggtgcacgtctgtggtcccagatacttgggaggctgaggtgggaggatcccttgggcctaggaggtggaggctgcagtgatccacagttgtgccactgcactctagcctgggcaacagagtaagactgtgtctcaatgaacaaacaaacaaataaataaaggctcactgtggcttccacaggacacagggagacagtgaagaggctctggatgctcatggtgaggactggcgatggggcctccccaccctggagtagagaactggggaggacccggtggcctgaagcttcacagtgagtggaaattacctgcaggttagaaatgcattaactttacactcagcgacttttactatgcaaatcgagaaacctagttttatttacctttttctccgagggcaacagtaaagagcatcccactcgccctggagaactgggggaatgtcagccacgctgatccccccccagaaaccctcagcctcagtccacacgcctgtggcttggcagcttcgccatcactgtgcccaagcaaagtcggcgtccagcttttcactcgttcagtctcgagcactgcctgtgtggccacacagcccttcaactgctcctctgccatgcctgaagaataattattcgggaagcctccagaagttcaccacttcgaaacagaaaccccagcactgccaggactccctgtgattggtggcggtgctgagtgcggacagcaggatgcagcaagagtgctcgggtgattaggggaagtgagcaggttctcgttccaacaggatccccaagaaggcgctgggaaccggcaggctactttcaggagtgtggggagatgcgccagcgggaagccggcccagctccagctcttcctaacaagactgcctccctgccgcctgcctcgcgattccccagtacaacattaatcacccggctcccagccgtgtttctgcagaaggagctctttctaattcagctgctccagccaggaggagccataagtagaacaggtggaagtgcgtgctgactctgctattcccttctccatcctgtattagaccagtttcccttatcattaaataaaaacacgaaacaaagacaaatgagggaaggtggtctctcatttatcacccagacccagcctccctgtgtcagccctccccgggtggaagtgctcctggaaaagctgcaatagagataacaaattgggaaaatccgccttcacatcacgtcaggggcaagcggcatcgcacctgggaggtggcactaggtgagggaggggagtacgggggctgcgtctctgctctttggggaggcagcattcaccgtttagcgggcagccagccacagggccgtcctcactccacaggcagatgtggggcaaacaaagcagtgctaatgtctttctatcgtggctgagtgaattttaggctggtcttctcatgagtgatcaagatgggagaagatgaaaagaccccaacccctaaagcttgaaggcacaaaaatgcatccatcaacccaggaggtggaatcaaatagccctccagtgaggtggactagagaacgcccagctggaagggaggcgcttccgtgaccatctgctgtgtggggcccacactggccgcctccctggaatccaccccacaggtaatgagcaatcaggtgtgtgcatcaagccacgtataggcttctctaagaaagcttgaacgccaacaatgctttgctcggtatcaggaaagtcataaaaagaatcccgcaattccaactgagcccctagtctgtgcctttctggacatggtgaagcactttttgggagaccccgattgaaagtcatagaacatcagatctggaagtcgccaaactccccacctgctgagtgggggctccagaccccacccagggctgaggtcccaagaacatgatctacttgacggactgtcggggctgaccttggaccagggccagggtggaaggaggtgtattcactcattcattcaacagtaggtgaatgcttggataaatgggacagcctgggatgaaaccttgaaaactacacagtcatttgcctccgtgtagctcaccattttattttttagggaaacaattaactaataattataaaaatgcaatgggtggagatgcaaatgtagcatcgtgaatggtgcagatttacatgggagcccaaagagacaggtccccttgagagaagggaagctgaaaacagaaagaggccctggaaatgagtcccctctgcaactcagggtagacgaggtccccgcagactgggcgtggagtcacgtggagcttggggagaactttagggtcaggtcagacccctgccctgaggaggcttccctgagggctctctgcctccccctccccagctacttcctgttctctcacctccagtccctcccacccataacaccactccttgcagaactgatcaattcctggtcgccacgatgccttctggggtcaagcaaagctctcagcctcgacagtgaaggtccaaggcatttttttcctctctaattctggctgctgctcagagaggagagttgggctggtgcagtgcagcagggtgagctctgttccacgcagcggggaaggggctcctaacctgagctgtgactggctgcccacacaaatccatccactgtgaagatttttctaaacattgtcccttctgccaaccatgactcatccatccacttacccaactcattcaacagagaggtgttggaccttcaccacgagccgggcaatggcttaccctagacatgcacagccctcctgctaacaattttaacatggcattttctctactttctcaacaaagtatctctaggcagtcagctctgaacctaactctcttcccctttgccctgggagtcgggcagagggagccctgtgggaattccatttcctggaacccatttgatcatttctgtttttggaaatagcatacatgtatcgaacttttttcctaatttattagaatatgctgacagttgtatacagcttaaatgtatacatttcaccctcatctatgtgattatcatgttttatttcgctttatgatttgagttcctaggaaattcagatttttattttttaaagtacacagcacaatcaatgtttataaattcagttgttccctaatttattaatttcttctttcatccttattattcccttcctcctgatttattcagtattttccattatttccctaagtttctcaattgacaggatattaatatactgttttcttttcatcttaaggctgtgaatgtaccttaaagtatacctttggccaattatcacattttatatgttgttagaataaatatccagaaatgctctattagccgtatacacacaatcatgacagaaaaaatagtacttccctgaccagttatttgaactaatgttactgaagtttttacccttcccatggaaaacaaactttgagattgtgttactaaactcctcattaattttactgttagatacattgatcaatgtgttttgataatttcttgacattttctttatggcctagtatcaccttttgtgagcttcccatccatgtttgactagtcattttcttcaaatatatagtataaaactctatatttagatacatttatcaacgtatgttttgataatttcttgacattttctttatggcctagtatcaacttttgtgagcttcccatcaatgtttgacaagtcattttattcagatatatagtataaaactctatctgtatgcgaatattgatgtgtaggtatttacttacgtgtttggtcccatatattatagaatgatccatgtaatgtgttatcatcatttactttcatttttattgagtcatcattgcatgccaagagtttttactgtgatttacatttgttttttcaagtgttttttacagctcttctgtgtgtttagatattttatgatgtgacatggaaatgtttcttttttaaaacatagattctgtcttctatccatgagaaataatcatcgcttttctttttacagctctgctttctctattttgtcctgtattaatgttgccacacaacatatcacaaataaccttcaaaatacagatagcaaatgacatcattgtactttctacattctgggactgtcctaagtccttcgccgatggaggtgctttcaaatgttcctcggggttaaatggccacggagcattcggaggctgcgcgagcccgtccattcctgcgactccctacacatgcgggtgacggtcacacgctgccactgctagccctcccgccctgggacccttctgtgcctgcccctttcatgggtggccacatctccctgggtcagaaaacctgcacattcatataacactgctgggttttaacctgctgccaccatgcctggcctgctccaaatttattagccttgctaataccagaggtttcctctttttaatgtcctaagccatgcacaggtgtgtgtgaaagagagctgagcatctgcacgtgtgtggctgaagctgcattattgctggaagctgaagatgcataggcatctgaggaggcctcatggatgccgccacccccacctccccccttgtgggattgaaaacgctttgtgcaccgtctttagctccaatacgttttcccacctgtccaagtactagtgtctgagaggctggattccctgggtgtacagacctggctcagtctctgtaggagatgatctcacctgggattctgcacaagaagaggaagccccaccacagagtgaccgtgagccctgtgcaaggaagtcaaccacagacatccaagcctgccccagccactccagccccaccacagagtgaccgtgagccctgtgcaaggaagtcaaccatggacatccaaccctgccccagccagtccaggcctggggaagactcctgctccagctccaggtgcctcctgattcggctgtctctacgttgcttctgcactcactcagggtttggtctgcttctctttcccttgttcagtgctaatgaaggacacacagacaactctcagctctccgtctatgtttgcaccaagtttttttaaattttttattatttttatatatttatttttgagacagggtctcactctgtcacccaggctggagtgcagtggcaggatctcagctcgctgcagccttcacctccagacctcaagcgattctcccacttcagcctcccaattagctgggactacagtcacgccaccacaccctgcttttttttttgtattctggggagagatggggtttcaccatgtttcccaggctattcttgaactcctggacttgagcaacctgcccgtctcagccttccaaagagctggggttaccagtgtgagccaccatgcccggcctgctccaagttttatcactgaagtatgaaatccccttctcacaggatagaccctgtcagctgcaggtctcaccacctctgctcaggcccagctgtgcattccgtggaccctgcggaatgtcttgctgtagagcaacgtctgtgcagccatggagcggagggagggccttaaagacacacctaggctggacgaggtggctcacgcctgtaatccaagcactttgggaggcccaggcaggcagatcacaaggtcagaagattgagaccagcctggccaacatggtgaaaccccgtctctactaaaaatacaaaaattagctgggcgtggtggcgcgtgccagtaatcgcaactacttgtgaggctgaggcaggagaatattttgaaccagggagctggaggttgcagtgagccgagatcacgccactgcactccagcctggcgacagagcgagaccccgtctgaaaaaaaaaaaaaatcccagcctcagccttaggcagagaaagagatggtgaagggcgcctctgggctgtgtggttagagagcctgcagctacctccacactccctgtccccatcacctgacaacagtgcagagaaggaaaagctgtttctcgctgccttcctggattttgttttgtttcctatgtatctacatcgtttgttctttactaaatctgcacgatctctatattaatcacctaaagacttaaggagagacaagcgtgggatgccccactccccaggtcaggggcaccgtgccacgtgggagccggtggagagtgagtcaaaagcgcttggtgactgcgcggggcaggcctccacctgagccccgccgtccacactgccagcctggagcctccatctctctgcgccctcaggcaccgggtgggctcccagcctgaggccctgaagctgccttttctatggatggcccctttcttgctggaggcctggaacgccatcgcggctgcgggggagctgtagaaccgcgccacgcgtttccatgcaacgaggctcctcaagatgcagaggaaggaagggggtttcatctaagatgataaatcgtctgtgctgcaggttctacaaggctcggtcggttgtcactgcgataaaatctgatcaaacagtgtcatccagcagggaaaggagccggcagttcccaggaggcgggacccactggcgctctgcagcctgcttcggccgccaggaaaatcggctcagtttagactccaaaggggcgcctcctggttcgccttttatttacaccaggccatcctcctgccggcgcgggggctggagaatcccttccctgctccaacctgccctctctctgcctccttcatttttccagaccactttcatttcacaagagcacaatttgaatcattatcagcttccgacagttgcttcagcctctgctatcttccccgaacaaaagcgacaatattcaattcaacctgcgtgtgtgtcaaagggaaatgcagctgattaagctctggaggcctcatctcatagggattaaacgcacaggcccacactatgtctcattttggacacacccagctctgcgcaacgccggttggcttcagaaagttgacagtgagaagcctgaattctttagagcaccacaatgatactcaaagggcagctgcccagggcagattgcatgataaacccagagtatttgcgaatggaaaacacacttccatgcaacgcttcacgtcgtggggattctgtggctgcttttccctgcggtcagcctcagggctcctggcctccctcctgtgggaggtgaaggccactctgtgtgagtctgtcttgggctggacctcaggtgcagctgggaatcttatcaagtcgtaagtcaatctctcaacaaatatgtgcaatagcaacggtccccccgggcttcccaagcacccggagtcggggctaatgggaggaaagacagagaaatgctcattgtgttcaaggggcatctgccgcgaagtgagccctgcccgggaatcggatggaggctgctctcagctcctcggccccagtgccgggtgaccttggcccacctgcttcccttcaccgggactcaatttcctcagccgttcaatgaaggggttgggctgggtgaccccggaggctccttccctctctactttatgatcacgattgtgcggtattgaccgtggcggggcaggtcgtttcagctccgcgtgcagcgcggctctgtgcattgatctcagcaccacttctccagttatccaaagctgacgtcccaatgtgactttcgctgggcataaaacaagcagcgcgatattgttttcagtaattttaacttcataattatgtttacggtggtgcaatagcattaccaggatttgaaagggcttcggggtgtgaaggagccgcccgcagcccctgccagtgcccgttttccctgcgacccactcccatcctggccttcgtgatccacgcgtgtcaggacactcagggtgtttcaccgtcctgcgctttcccagatgcttttctctctcccacatctctctccagtctgtccagctcactggatttctcaatcgctgccctaatccaggtcgcctctatgggcccccaggtgaccccagcggcctcctatctgggcaccctcctccccttctgcactgccctgtggctgggacactcaggcgggcctcagctgggcagcagggtccacactgacccctgaaggcagtggagtaatggggggctctggcaggggctggcagcatcatgtctgctctgcagagatatcacccagctctggtggtgaggtctggaggttcatctgggactaacgctttgccaggccagcatgtgaaaggggaggaagatggcatggagggcatttgctgggatccagagcagagaaaggaggagagggaagcagagaaaccaaaggagctggcagggggtggtactaggggtacagggaaggaccaagacaaggcccataattccagagggacccagggaaccaaggtggggataaggctgtttctgacattggcaggtcctgtcattgtcccttgagaactgaggcaggatagagggagggtcgctgggtaggaggcatggaggagccaggaggtcagggtgcacgtggctcatcctctatgctgggagggcagggtgcatgaggtccatcctccatgctgggagggtagggtggacgtggcctgacctccatactgagagggcagagtgcacgtggcctgaccttcatgctgggaaggcagggtagaggcagtccaacctccatgctgggagggcaaggtgcatgtggtccaacctccatgctgggaggtcagagtgcacctgatacgacctccatgctgggagggcagagtgcacgtgatccatcctccatgatgggagggcagggtgcacatgatccatcctccaggctgggaggaaggggtggacgtggctcattctccaggctggtggggccactctgataatgacaaagcaggcagtagggactcctgcaacccagtgtgaggttgtgggtgagggttggaattgcccccacattcatgtattgagatctaaacccccagctcctcagaatgtgactgtatgtggaggctgggtctttaaagaggtaattaagttaaactgaggtcatttgggtgagtcctaacacaatatgactagtgtcctcataagaaggggagatgagggcacagaacaggcacagagggacatctgtgtgaggacacaaggaggggaaaacgtctacaagccaaggagaggccttgggaggaacgagccccacccacaccttaatcttggacttccagcctccaggatagtgagaggataaatctgtgttgtttaagccaaccattggtcatggcaccctccagacgctgatccatcctcccgatgctgatccgtgaaacctcaaaggttctgtctcatttacctttgagtcccccacctcctgccagacacttgctctgtacatagacagtgctgacttacatctgttactcagtgtgacgtcagctgtccctcagcagccatgaagatatccttcaagttcaacaagaacttgtcatcccccagtgaaagcgtgcaatgcctcctccacctactaacacagcagcgcacagagctgcctcccgctgcctccagccaccctccctctgcctgcctcgctctcgctaagtgtctgtgaggtgtgaagtgtgctgcgtgcgctaccaggactgcatcccttcatgggctcccccgtgctaacccacaccctccgtggacatgcctatctctacgtggaaatctccaactcgctactggactcatggttcagtaatcactgtcctaaaggaaaaacacacctgccaccatctcaaagttagcatgggagcgtcttatgaaaaacagacaaccccttctaaatgttttccatagtgagggtgctgctgtgtattcgtgaaaacctgaatgctttttcacctccttcgcctccctgtcttctctccagaaggaatttatcaggagccataaaagaattcccaaggacagacaccgaaaatgggtcagccgtggtgacaaatcactgaaggtgttcccagcattgtcctggctgtttggaaatggcctcaggatgctccattatttaggtaggagggggcccagaagagcccttgaatggctattttcttacagggaaaccagggggcctggagagggggcaggtgtcacgccctcccaggaagactttgctcaactctccttcaggtgcaggaggtgtggatgcccacactccatggactcccatgtgtaaggtcacaggcgggactatggctgcagggccccctgctcatcacccagatgtctccaaaccagttctctgtggctcctcagatggggccttggagtccagctttgtccagaggcccagcaagcccgaccctcagccctgcaaggcaccaggagtcctggaaagccactcatccccaaatcatggcagccacagccatgagagccgtgggtttccctggtcttgaagagacaatgcccctccaggtaggtgatcctttcttcccgagagagtgagagggagggggaaggaaccagaagaggttaaatccacaggctctggctcacaagccacagtcagaggaggagcccatggatttcacgacatccggctccccgggcctcatgtccaccaccaccgacactgaatggcagatggcgtccatggaagctcagccacaggacccaactggcgacagctggactctggtgtgagggtctcccatcctcttctctgggggcttctccctttgagttgtatcttggggtcctgcctaactcagggtgcctgcgttctttgcagagcagctctttggggtttaatcagcttgtgctggtgtggggaagccgcgttatgatctgataaatgtatcatgtgtggcattgcacttgttggttatgaaaaatcagctgttgcctggtaaccaaaattgtcagctcccaaacctcgaaggccacggagccaggcctgatggcttctaaggagccatagccaaggctgaggaacaaaacctgatgagcctgggacatgggggccagagacaccctcagttctcattcaaagttttcccacaaagaaaacaaatcagggaacctcagggctgtggtttgtagctgcatccagctttcagagagaagtggggaggaagctcttccaggctccttgtggtcccagcagccacacagggacaggtatcatgtgtgggagtagcagctgccattcgtgccgggtcttggggggaccctgagctcattcccagtgtctgggcagcccaccccccacaggcagtgcccacattgtgcctgggctcaggagtggccctagatggccctagacatcacagtccagtgagcttggcaggggggcatctgcttccaagactttctctgggtgcctctcccccagtggcctggcccctctgtggggtccatcagccaccccaaaggccacagacctcaactcaggcatgataattgagggaggaatgtaaaaattcccctgggaacgagagccagaccatgaccctaggctgcattctctgtccctttcccctcccaggcacctcatcattgaggcctagacctgtctccgtgtcccagcctcagggtcctcctccccttctccacatataccccacccctcatggacagatcacagcgagctggaatcacacgtgtaccacctccctcgcttttgcccagcaagtgtggaacactgggttttactgtgttgcctttatagtaaatagctcatgtaaaaagacttatggcctaaaattatgttaataaactcatgtgtgaaatcatctgtcgagagaggaaacgtcactggcctcttgggattgtgagaattgaactaaaggctgtggaggcttgttgtgaaaaggaatagaaacctgagtcttctctgccccaggctcggtgcctttgaaccctcaggggtggcaggagctgtcccaggtgctgaagatgtcagggaagcaagggagcggcggggtagggaacccccgctgcagagccgcgaagcatttgttgggcagggtgacctccttcgttaactcggtaggctgccccagattcatattctgctcacccgtgcatcaggcattcattttttcactcattcattcattcacatgccgggtcttggccatcagtgtcaccttcttactacactccatgccttgcttgacctcacctccaccaggctggcagagggggcggcacacacacctgccgcactcactgttggccctctctggagccgtttgcaggggctttctccgtgtctttccagtagacacagcatggaccctgtagccagacgtgtgagttcatctgggctccaccacttccagctgtgagaccctgggacagtcacgtagaccttggagacctcgtaagatggttatgataattaagttgattcatagactcaaccccttggaaacggcgctctccatataagtgtgatgtgctgcctgcccttattcttaccaggtccctgacggccttgtgacagggccctgggctcatttgccgtttaacccccacacctatggacactgtgcacacccctgccaccacatgaggccttctgcacctctgcaccccagcctctcatcctgaggcttagtttgtgattctgtaatgacatattctccacctacctccgcccgctaaagtgcaaatcccaccaggcctgggccttggtcattgtctccccagggagctccaggccccaggacagtgacccatgcacagcagacactccctccatggctgcggaatggctgtgtggcttctgcagagatgtctcccacttcaggctgacctgcctggagaaagacaagccgcttctcttccattatgctttaatttctagaagtttccttgtttgggggcaggattgctacttccttagaataatttcctttcctattttcagcttataaactttggaagcaaacaagctctcctcctgtagaacgcaccccgacaggaaagctgcccacgctgtgctgcgctgtcattaatgaattaccaggatggtgcaatgctgtaagcgctcatctgctccaagccgttcccagggagcgcagcttttctgggctggatgccaggacagccgggcagcccctggaggggtgggggaggggagctacagcccaggggccctgcttcagtgtcgggaatgtgtgtgcttcctcctgctcaatcgctttcatcccaaatcttttgtatttcccattgatccatgtctagaatggacagagcagcaggaacattcaagccacttccctgtaggacgattagatcttgacaattggatgccataaattatatatatatatatatattgagatggagccttgctctgtcgcccaggctggagtgcagtggcgcaatctcggctcactgcaacctccatctcccaggttcaggggattctgctgcctcagcctcccgagtagctgggattacaggtgtctgccaccacgctcaactaatttttttgtatttttagtagagatggggtttcaccgtgttggccatgatggtctcgatctcctgacctcgtggcccacccacctcggcctcccaaagtgctgggattgcaggcgtgagccaccatgcccggccataatttttaatgcagtagaatactgtctacattttcttagcacttagacaactcatggtttccaagaggactcacgaggatgaacatccgcatctctgggaccattactctcactctgaactgatgttggcagaaggggagttcctgcttctctgggggactgtgacctcacaagggtgcctggtcttggtcatcatcattagattcctcaaacagagcctggggcgaggttggcccagcgttgaacatggcccagtgaagatcaggcgtgaagtagacgcaggggcctggcttggccttacagctgtgtcagtcaatacttgagcttcatttttagtttaacatggaccttgagaggaaatcataatgtatctcaacaaacacatggaaagaagaactttttacaatttttaaatgaagtgagacaaaagcaccatgtgtggttctctaacacggtgtcagggtgttcccttttcataacagtggcctttaataatcagagactcacaacattcagcccatggcgggcaacactgtgggcttcactcgtgttaactcaggcagccctgacaaaaactctaagaaacaggtacaagtatgaccacagcttatagttgaggaaaccaaggtatggagaggttgggtgacttgtcccaggcaaagagccagcaagaggcagaggtgggatttgaaccccaaccatccagccccagaatggacgttcttagcccctctgaggccatgctgaatgtccagaagccaagcgggtctggaggccaaaagtcactcacatgcctgtctaactgcgagttagactccattctgaagcatcagagctgcgggctacagacgggaggcagatattccaaggcctggcacttccagctcccagggcaggtcagggccatgagagaggttggctctgctcatcagagcctggagggggctggcagccagtctggatggagagagtggcctcactgagggttcactgacaattttgggacactatcaagtgggcagaaggctgattttaggctgtccttgactctcaccatgaaaaatagtaacagtgcttggatcctgttggtgcagggttatgggtagaaactgtgctaaacatcaatctctgggggaaaatgtaactttcagatgaatattaagggtgagaccaaaagagatccgggctccatctggccaggacaggggggtgtcagtgagtattgtgggggtgcttggggtggcaaaaggctggagaaagtcacctccgcctgtgtacaccgaaggctgtctggcatcaccaaggagatcctgtgatcagaatttatgttcctgctttttctgacaaccatcccttgatatccttcactgaagcatcttctcctgcacccaaaatgtgtcaccgtttctcatttctccatgacccctgggtccctcatggttgtattgtcacccacacaacagcacataggatcctgtatccatctgcagagactccctcagcaggccccacgggtctcattcatccacaattggtaactggcctccttgactctgtggccaaagatgtaggtcttggattccttgacccaccacttgttcgttgtgaaagctggggccggtggaggggcctcactgactatagaaggcaatgatgttactgcccagctcacaggatgagtgtgaggactgaccagtatccatcaggagctttggaaacagcacctgccatgcagctgatgctggtgcttccattctgtggatggagccgtgtgggtgccccaataaggctgagattttgcccatcacccttgtacattatttgcgtgttttgctcctctcctggggaggtcaattacaaaatgtcctatggttttttaagtcacaaagcatcatctcaatcagttgttgaaacaagcagtcctcctctcccctacagctgccacagctctggactccattcacgtttgcggttttccatcccacattgcaggtttggggctgtgggcaggactgcagttgggccgggcgagaagttgtcaccttccctccttcctggctcagtgcctggtcctcccagccaggacagacaccctccaggactcccgatggtggggaaggggtggcggggacagacgaggcagcgggaggcatcctgctgggctggcaccatggcggccgggacacactgccccttggggtgcagccgctgtcttaagttgactcttcccatggctgggatctcccccttgtcattccctcatatgccctaaggtagaggggtgtgttttttgtttttgatttttttttttgagacggagtctcactctgtcgcccaggttggactgtagtggtgtgatcttggctctttgcaacctccacctgctgagttcaagcgattcactattctcctgcctcagcctcccaagtagctgggattacaggcacctgccaccatcccctgctaatttttgtatttttagtagaggcagagcttcaccatggtggccagtctggcctcaaactcctgacctcaggtgatctgccctactcgacctcccaaattgctgggattacgagcgtgagccaccatgcccagccatcctaaggtttctctatttgggatggctgcgttcaacacttccctccagcttctggaagcccatctctttcagaacatcctcttgccccacctgggtgaatctagagcaaccccaagcactcttgggggtgcctgtatctagttcaggggtaatcctcacacatattgaactacctcaatcagactttcaccctgagatctctcagagatggctcagatgcaattcccatcgcccccagattatccagggctctgtattaacccttgtggagggtattatcaaagcctctcttctttgccaagaggtaaaggggatttgtcctgtagcctttcttcaggcagaacttacgacaccctcagatctctcgatcatcacctttgacggtgtccctgagtccactgtacttagtctcaggaggtgtcacatccccacctctcccctagatgggactcaccgcgcagatctccagagaaatcttctacaaaaaccctcatgggtcatctgctccagcccctctcactgctctcagggttgggagatagaaccatgtggtaggtggaattgacagcacagctctctccaaagaaatggaacgcgccttacagttacaccctccactgaggaatgacaaaacgctctaaacatcttgttttgtttctcagccagctgtgctttactgacaatgcaccactcaggccttgaccgtgtacttcctcagcagggacaggcgctccttcctccttcctcagcggggacagccactccttccactgctgcttcttgcccttcaggttctcctcgtgcttgttgagacagtggctcatggcgcatgtcttcttaggctgcaggtccacgggctggtacttcttgcccttgtagaatttcctgaggttttctctggttaataaccatgagaacacaggcaatggatttgcggacgactcggatcttagacagcctggaggctgcaccgcctgtcactttagtgacacgcagctgggacagctccaccttcaggttgtccagctgtttcagcagttcctcttcttccctcgagggtctcaggccttgatcttggccattgctgcacaggcggccaccgcccgctcctgctctaaacatttttatgtcttttaccttaaaaatatcttcctgctagtctaacactttgcattggaatacacagtgatctagaatttccatttcaacaccctgtctaattattgttttcacccagcgtttctgctaaacctgggaactgatggagctgtttgactgctcccaactgccacattcattggcacattaatttatttactgtaatccacacctctaaccctgaacaaggtgttgggaaaggtgtgtaaatgtgtgtcaacaacacgctctaattaagcgttgtttctcaactgggggcacttgtaccccccagaggtcatcaggcaatgtctgaagacattaatgcttgtcataacccttgtgtttgtgaaagggttgctgttgcatgcagtaggcagaggccagaaattcttctaaacaccccacagtgcagggacagccctgtcagccctacagagagtgaccagccccaaagttaggcgtgccatggtcagaatgtttgccatagggagcccccaggccactaatccaagaagaccagcatcatcagccccactgccctccgcactttgggcttctgagaacaccagcttcacagtggaggtaaccctgagtcatcagctccatgggttggtgaaaagatgcatctcccagaggaagctgaacatacactcagtgctgggcatcttttagagctcccttccctgcctcaagcactcagctgacttggaaagagccacacgcgctgggactggaaggaacgcctcctttcctggatgcccgtgccgcggtgcccactccactcaccatccctccttgtcgtcttctggtcaccgtgtcttcggcagggcgtgagtacctcacctgcgggctgtggacgggtgctcttgtgtttctgcctgggaggagggtttggcactgctgcggatgcagcctcccgtctgttggactcctctacctgctctgctggagcaccccttggctgcagcgaggctggccctggagttcgctctcctctggggtcatcctgcccacagctggggccctctctggcttaggtgtatggataagaacagccttttcttgaagagatgaggagtcccttagaggaacgccaatagcgatgaaaccagattcttcttacctggtctataatgaagccagccaggcagagccggagctcccagcatccctgagacctgacaccttttcctctcggccacatggccctcctgagtccagtcaggactcaaggctgtgaaactctgcatgtctggttcccccttcttccttctcatttttttctttttccttttctctttctttcttttttccttttttggagatgaagtcttgctgttgcccaggctgtagtgcaatggcatgatctctgctcactgcaacctcctcctcctgagctcaaacattctcctgcctcagcctcccaagtaactgggattacaggcatgcaccaccatgcccaactattttagtatttttagtagaggcagggtttcaccatgttggccagtctggtctcgaactcctgacctcacgtggtccatctgcctcgacccctccaagtgctgggattacaggcatgaaccaccatgcccagcctctttttttctttcttcctttactccttcgtgatcctatgagtctcacaccggagcctggcactatgatctatgcagaaaactgagcatctcctttgaccttccacgcaggcttgcccagctgtcattcatgtcgggactggcattccattccaggcctggggagctgcatagtgtttctattcttgactctcacggatgacaggagttaggatactgtggccctcccctccattggaccacagtgtacgctgtgatttatgctctaaaaccttggaggcgtgttccccagcctgctcacctcccactggcaatgctatagggaattgtagggtatcaagttgagcttctggccttctagaaccttctccctgattaatctatatcctcaggagttctcatgctctgggtcatataaccacttcatttttgttctctatcccctccccataaggaatacttggaattatttattattaatgagaggagcatgaagaaacctttaagacacttctagaatggtaatttccaagaatccatttcccagcaaaacaaccaaaactggtaaaaaattcttttaaaaaacaataatatctctacaaattattttaaggggattaagcaaatgaagttacattcattcacaatttcaacaaaatcttaagagcagtgagagtctgtgacacatgaggccctaaatggtcccatgacctcctctcccctggtcagcttcacagagctccatttccattggcaggaagacggggccttctgtctccttggctgtcagtccgcattgactgtatgaggaagggcaggtagccagcatttcccaaccccaccgcctccgaggtgcagaagctgagtccttgttgaggggaagtaacaaatagtttgagacttccctcttacacccagcccccactcagagggcagtggctctgccccaggcatgccaggctgagaatatgagggccccaggtcaggctcacatagttgaatttccaaacttgaagagaaaagagaagaagatcagaagctacttcagagactttgctcgggggaaatttagtccacaagaatgcagactgccaaagctctcccccagtagaattaacttcaaaacacagtgttcaaaatagtgtgttcaaaccaaaagaatctcttgaaaataaggaagattgtggtggtgggaaatcaaagggcccatgctccatcagaacaagctaaacataagctagctagtttaccagacagaaccaggaaaagagacagctaagagagccctcttggggttcaaatgaaccttaaatactggcttaaaactttcccttcctgaatttaattttatcaaattatggagcaacttatgtaccagggaatagggggtgaaaaaacaaaaacatacccagcaatgagtaaagtctaacagctgggtgcaataccaaagagaaagaattctgcatagagatgtcagggacagagacagagacagccccgctaatccaccatcaccccagggagactgcccttgtccattgctgcctgtggagttgacatcggaaacctcacactgtgtggaaatagagttcattaaaatagtccagcaaagtcactaaaaaaaaacaaacaacaaaacaagcctcagaaatagtgctaggagattagtgtctagagttggtataatatcttacctaaaatgttcagttttttaaaaaattataagacaagaaaagaagcaggtaagtgtgaccctgaggcatggaaaaaagtgagccacagtacttgcctgtgagaggccctgatgttggatttagtagacaaatactgcaaagcagccattgtaaatatgttcaaagaactagaggaaaatatgcttaaggaggtaaaggaatctattatggtaatagctcattgagtagagaatatcaattttagtaaaactaaatggacgttctgaacaaggaaagtatgctaattaatacaaatatgtaccaaagagctcaacagatttgagttggcagaacagtctgcaaacataaaaatagatttacagaggttcagcaatctgagaaacggaaagaatagcaaatgaaaaaaaggaagaaaacctcagaggcatgaagaaccattcagagcaccagtatatgtgtcctgagaatacaagaaaaaagagataaagcagaaaaatgactggaaaaaccatgaaacttccccaaatttatgaaaaattgttatctacacatatctatctagctccatgagctaggataaaggcaaagacattggcaaacagacattggcaaacacgtcatcattaaaatgctttttaaaaggacaaagaccaatcctgaaagcaacaaagagaaagatcagttgtcacacaaagggattccaggtgagatgaacacatgacttctcatcagaagcaatgcgggtccgaagacagtgggacggcagagtcgagtgggacggcaaagtcgagtgggacggcagagtcgagtgggacggcaaagtcgagtggcaacaggaaaaatcagaaaccaagactatcagatgcacagaaactgctttttaaaaattaaggtgagttccagtttcacatgtaaggaacacggaagtcaccactctgacctaacaagtaaaaagcgaaacagattaaaaactccagaagtatttttgattctgtaagtggatgagcacacagtgccagccactccccctgaaattgaagagacagttgtgtggaagccgggaggcacagcttgctagaggagagatttgggatgagaaaccgctgtgggaaacagtgtcagagtagaagaaactgaactccaactcatggattgctagaggcccagagtggatgagtctgagagttataaataactccaaagggacccagtaccaggaggcccacctcactcttgtgagttttacctgtgagagctaaccaggttccccaagaaaatactgcagaaaaaaactgttatgcttccagcaaggggaggaaaaaaggaactattctgaaatctaccagatcactcagttctcaaaaaggcctgtcctcaggagaaaacatccaaccagagcataaaataccggggttttattggagtttaacttacctgagggaagagaaatatccaactttagcctgccctagctttccatgtaggagaaggaaaatactcaatccagatcctaaaatgttggagttttatcacagtccagcttgcttgagggaagagaactacccaatttcagcttgtcctggctttccatgtacgaggaggaaaatgctcacctccagcccactctcgctatcctgccccatgtaaattagcaggaactgagaagcacttgtgaggttaacagtccagagacgcagggtcgctaaacagctgggaccgaattgcaggattctataacactttgcctccccctacaccgtagcaccgcattcctaaagacctgctaaaaccagttcctctcattgagcacacaaagcctgcctatgaaaaacattataaggtgtacttaaaaacacacatacagtttcaagaaatagagctagcatcagaaccagacatggcagtaatattggaattatcagactaaggatttaagactataagcgcaaatatgctacaggctctaatagaggaagcagacagcaagaacaccaggtgtgcaatgggagcagagacagaatcctaagaaagaaccaacagtaaatgctagagatggaaaacactgcaacagaactgaagaatgtctttgatgggtgtattggtaaactggacgcccctgaggaaaggatatctgagatgaaggatgtatcaatggtaacttcccaaactgaaaagcaaatacaataaaggctgaaaaaaacagaacaatattcaagaagtatggggtgactacaaaagatgaaacatgcttgtagtgggaataccagaaggagaaaaagaacagaagaactgaggggagagaaagagaggaagaaagagaagagaagagaagagaagagaagagaagagaagagaagagaagagaagagaagagaagagaagaaagaaagaaagaaggaaggaaggaaggaaggaaagagagaaacagagaaagagagagaaagaaagaaaagaaagaaaagaaagaaagaaagaaagaaagaaagaaagaaagaaagaaagaaagaaagaaaaagaaagaaagaaagaaagaaagacagaaagaagaaagaaagaaaatacttgaaacaataatgactggaaatgtcctacaaattaataccagacacaaagcctcagttctaggaatttcagagttcaccaagtaggataaatgcaaaataataataataatgaaaaatctatgcattttattttccaacaacagaaatttgaacattttttaaaaatctggaatgaagccagggagagatgaggagaaagaccatacctataaaccaacaaataaagaattacatctgactttttaagcagaaattaaacaagcaagaggagagtaaggtaaaatatttagtgctaagggaaaaagaccaccaacctacaattctgaccctgcaaaattatcttttttttttctttttgagagagtttcactctgttgcacaggctggagtgcagtggcacaatctcagcttactgtaacttctgcctgctgggttcaagttattttcgtgcctcagcttcctgagaatttgggattacaggcacccaccaccacacctggctaatttttgtatttttagtagacacagggtttcaccatgttggccgggctggtctcaaactccggacctcaagtgatctgcccacctcagcctcccaaagcgcttggattacaggcgtgagccgccatgcccggccaaaattatctttcaaaggcgaaggagaaataaatcaaaacaataaaaaatggagataatttattatcagtcaatctgcctagtaaaagatgttacaaaagttctttaaagagaaggcatagactcagatcacacagaaaagatgagtcatgaagaaagaataagttaacataaagtaaaaacttatttttcttgtttttaactgatctggaagataatagtttgtggcaaataacagcagcaagatcttcaattaagtatgcttatgatatatcttatgtgtgtgtaatagcagcaaggtcttcaattaagtatgcttatgatatatcttatgtgtgtctacatatgtatgcatgtacacataagctatacgcatgcacgtgtacacttacgtgtgcctatatataagtgaaatgaatgacagatataatggaatgaatgcaagggaggaacgagggatcttatatcacactacatgtgaagtggtataatgttctttgaaagtaggattcgattccttgtaaatgtgtattgcaaactctagggcaatcacgttgaaaggtttaaaagcgggggttactgatatgctaagaaaggtgagaaaacagaatcatataacattctcagctataactacagaaggcagaacaaagagtgaaagacaaaaatagaaacaagagcaagtgcaagatatagaaaacaggtaccaatatgatagatattaatctacctgtatcaataatcattttgaaagtcaatagtttaaatgcaccaattaaaagatggagatagtcacagtggatcaaaaaataagacacaaatacatgtaatctacaagaagccaactttaaatatttaaaaatgttgattaaaagtaaacggatgggaacgatgtcatgctaacactaatccaaataaagcaaaagtagctacattaatttcaaacaaagcagatttcaaagcaaggaaagtcatcagggataaagaagagaattacataatgataaagtggccaattctcccaggagacatggcaatctttaacagatatgcacccaaaaacacagtgtcaaaatacaaggcaaaagctgatacaactgcaaagagaaacagatgaattcactctcacagttgaagacttcagcgccccttctatcagaaatggacagatccagcagacagaacatcggcaaggacataattaagaatacatgttcttcccaactcacagggaacattcacgaaaacaaagcacattctgagccataaaacacaccctaacaaattaaaaatcatataaatcatacagtgtcagctcttaggccacagtagaattaaactagaaataaataacagaaagataactggaaaatcacaaaatatatggagattaaacaagacattaaaataatacatgagtcaaaaagaaatctcaaaaaattttttttaaatttcttgaactaaattcaaataagaaacaacaacaacaacaaactcctggaactaatataaataattaactacagcaagattaaaggatatacggttaataggcaaaagtaaattgctttcccaaatgctagcaatgaacaagtgaaatttgaaattaaaaacaaaataacatttacactaccaccttaaaaactgaaacacttcgatataagtccaacaaaatatgtacaagatctgcagctctgttgaaagaaatcaaagaagaactaaataaagggagaaatactccatgttcatggccaggatgactcaatattttcaaaatgtcagttcttcccgatttaatctctagattcaatgtaattcaagtcaaaatcccagaaacttattttgtggagatttaaaaattgattataaagtttatatggagaggcaaaagactcagagaagactacgtaatattgaaagagaagaacaaagttgaaggagtattactacccagctttaagactgtaatgctgcaataatcaagacagtgagatactggtgaaaaatacacccatagtctgtatatttttaacaacaacccttaatcagatatgtctttactgcatatctgattgtctactgcaataaacccattggcaagtagatcaatggagcagaatagagagcccagaaagagacccatataaatgcagccagttgatctttgacaaacaaacaaagacaacgcaatggagtaaagataaccctttcaacaaacggttctgaaataactggaaatccacatgcaaaaaacatgaatctaaacacacaccttacactcatcataaaaactaactcaaaatagatcacagacctaaacgtaagatgcaaaagtataaaattcctaggctataacataagagaaaaatatagatgatctcaggtatgatgatgtgtttttagatgaaacaccaaaggcatgatccatgaaagaatgaattaattggactttgttaaaatgaagaacttattttctgcaaaagacaatttcaagagaatgagaagacaagacacagactgagagaaaatatttgcaaaagacatgcctgataaagaactgttattaaaaatacacaaagaactcttaaacagactgcgagaaaatatttgcaaaagacatacctgataacgaactgttattgaaaatacacaaagaactcttgaactcaacaataagaaaacaagccagttaaaaaatatgccaaagaccttaacaggcaccaaaccaaagaagatacacagatggcagataagcatataaaaaagtgcttcatattgtatgtcatgtaagacctaaaactataaaactcttggaagaaaacatagggggaaagcttcataacaataagtttggcaatgatttcttgattatcacaccacagacacagaaaacaaaagttaaaatagacaaatgggactacatcaaaattataaacttctatgcatcaaaggatgtaatcaacagaatgaaaaggcaacatacagaatgggagaaaatatttacaaatcaaataactgataaggggttaatgtcgaaaatctataaaaaactcctacaaaataactacaaaaggaacaaattaaaaatgagcaaaagacttgaatagatatttctccaaagaaatacaaataaccaacaagcacctgaaaagatgcccagtgtttctaattattagaaaaatgtaaattgaaacaatgatataccacctcacacccattagaatggctactaataaaacaatagaatacaaaagaaacaaagaaaatactagaaagaaaagtgttggccaggatatggagaaattcaaacacttgtacgttgttggtgggaatatgaaatgaggcagctgctgcggaaaactgtatggctcttcctcaaaaaattagacattaagctaccatgtgatccaacaattccacttttggttatatgcatgaaagaatcaaaagcaggatctcgaagagacatttgaacacccaagttcatgggagcctgttccacaatagccaagaggtggaagcaacccaagtctccatggatggatggatggatggatggatggatggatggatggatggatgcatgggcggatggatgactggctggctggctggatggatggatggatggatagattgttggatggatggatgcatgcatggatggatagatcgttggatggatggatggatggatggatggatggatggatggttggatggatggatggatgcatggatagatggatggatggatgaacatgtttttgtccatccatacaatggtacgttattcagccttaaaaagggaagaaatgctaacatatgctacaacatagatgaaccttgaagacatgatgctaagtgaaatcagcccatcacaaaataacaaattctatataattccacttatacgaagtatttagaggagtcaaatccatagagatggaaagcagaatggtggatgtcaggggctgaggatacagggaaggggaaaatattgtttaattggtattgagtttcagttttgctagatgaagagttctggagatttgttttatgacaaggtgagtattctcaacactactgaactctacacttaaaataattaggtggtaaatttatgttacatgtattttactacaacaaaaaatttttatagaaaatgaaaaaaatacacagaaagaaataccgagaactggaagacttcaccgatgaattctactaaatacttagaaaagaatttgtacaaattattcacatattttctcaaaagtcaaagaaaaggggtcatttcccatgacatttcataggacctgtattgccttgttatccaaaccagaaaggcatcacaagaaaatacaaccacagacccacattctccatgaacatacatgcaaaaatcctcaaaaaatatgaacaagctaagtccagtgacatagaaacaggattctatacggtggcaaaattgggcttatcccaggaatgcaaggttgctttaacatccaaaaatcagttaatttattataccctatcaacagaacaaataataaaaccacatgataatttccagatatacagaaaaagcatataacagaactcaacatcacctcataacaaaaagaaagaaagtcacaacaaactaggaatagaagaaagtttcactctgataaaatgcatctattaaaaacctccatggctaacatcatatttaatggtgaaagattggttgctatccacctaagatcaggagcaagacccaagaggtccactctcaccttcttctttattaatatactagaggtcccgcccagggcaattagcctagaaaaataaaaaaatacctctagagtggaaaagaagattaaactatctcagtttgcagatgtcatgatctcatatacaaaaattcctaaacaatccacaaaataactattagaagtaacaaattcagcaagttttgggaaacacactcattatgaaaaataactgtatttctatactcttataataaagaatccaaaactgaaatttagaaaaacaatttcatttgcaataccgtcaaaaagaatagcatatttaggaataaatttaacaaaagatgtataaactgatactctgaaaactacaaaatattgcttaaaaattcaaaacgatctaaatgaatgtaaagctttcctatatttatggataagaattaaaacttaaaattggttagatggcaataatccccacactgaggtatagattgaatgtgatacctaacaaaagccaagctgacttctttgcagaaattcataaactgatcctaaactttaagtggaaaaatcaagggatctaaaatagccaagataatcttgaaaaagaagagcaaaattagggggctcacagttccccacttcgaaacttgtgccaaagctacagtattcaagacaatgtggcgcagacataaggagaaacacccagatcagcgagataaaattggaaatgttgaaataaacccagacgttcacggtcaattgaattttgatgctgatgccaagacaattcaatgtgggaaatcagagtcttttccacaaatggtacaaaagaattcatctgaacccccacctcacatgatacacaaagttaactcaaaatggaacaaatagttaaatgtagagacaacatgataaaactctcagaagaaacagccgtaagttgttacgaccttgattaggtagtcatttctgagatgtgacacaccaaaatcataagcaataacaaaaaaagagtagatgaatttgacatcttcaaacttcaaacctttgtgctccagaaaacaccatcgagaaagtgtcttttgaagcactaaatggcattttattgccattccatgaattaaaaaggtgagccagagattggcagataagttttgaaaagttacatatctggtagtgaacttctgtctagaatattaaaaggacccttgcaactcaagaataaaaaagacaacacaaattaaaaatgggcaagtgattcgaatagaaacttcttcacagaagatgtgcaaatgtccaatgacacgagacgatgctcaacatcttttgccaccagagaaatgcaaattaaggccagaataagcaagtgcatcatttccatgaggatggctgacataataaacactgatgttaatacctcttggtgaggatgtagagaaatgggaaccctcggacactgttggtgaggtgtaaaagggtgaagccactttggaaaacaatcctgcaagtcttcaaaatgttaaacatagcattaaaatgtgaccagcaattccactcctaggtgtataccaggagaaatgaaaggggacacaaatgttcatcgtttatggcaggattattcataatagccgcaaagaggaaacagcctgaacatccatccattaatgaataggtaaataaaatgtagtgaacattatttggctatgaataaatgaagtactgatgcatgatacaatacggatcaatcttgaaaatactgttctgagtgaaggaagccagctacacaagaccaggcattgtatgactcaaatgatgtgaaatttccagaataagcagaatgtcaggctgtggttgtctagggttgggggtgtaggcaaaatgggtagtgactgctagtgggtataaggtttcttttggggtgacagaaatgctataaaattgattgtggtgttggttacgtatctatgtgaatacactacaaaactttgaattgtgtagttaaagagggtgaattgtctggtatgtgagttttatatcaatagagctgctgtttttaaaaatagatgattaaaattaatacttttctcctctggaggatattctctttctttctcttttatttgtataaatttatgggcatggagtgaaatgataggcagtgaacacttggcacgtatccattctctaacacagaagtagagcagttatcaaaggcgtgaagctagggctaaacttccaggattgtagttgcaatctggagaatgttttctgggcacaggtccacccttggcattgaaagaaatgcatcatctgaaaaaagatgtttcttctgcatcaaccgagatctggctgactcccaggaagagagaagctggcaggctggaagctgacactgtcctagcagtgagcaccttctccgtggtctgagagaaggccaggcgcttggtcctcatgcttcatttccctcttatcctacttagaaagtctccatttctctcgcctgtaatcccagcactttgggaggccgaggcgggcggatcacaaggtcaggagattgagaccatcctggccaacacagtgaaaccccatctccactaaaaatacaaaaattagctgggcgtggcagtgtgctgcctgtagtcccagatgctggggaggctgagggaggagaatggtgtgaacccaggaggcggagcttgcagtgagccgagatcgcgccaatgcactccagcctgggcgacagagcgagactctgtctcaaaaaaaaaaaaaaaaaaaaaaaagtctccattcgtcctctcatgtgataggacaatctttatttatttgctattttttgatgtaccaaaagctgtacataattaatgtacagaactcaatgagtttgggataaggtggtctaactgcctctgaactcccctgaaggattctgagaagctggctaaggcagcgaacatagtgagagagaagccttctgaccagactggaggggctgctaacctcaggagaaagggtggccattcagaccctctgagtgggaggggctcccaggacctgcaggcctagtatggcttctgcaacaagctgccctgcctcatggaggatcggttctcaaactcttatttgcatagcattcagcttggacaagggccagggaatggggagattttcttttaaattcagatccccaggcttattgtctctaggacctgattcaatcagctcaggtacctgcatattgatgttacccaaaggtctctggggcaggtggtctggacagcatcgctacatatacaatggcagtggaatggcaagacctaccaaaggctttgggatcggggtcagaaaacctcactctcggtcctgggttatgtgcctgctggtggtgtgagcaggagtcggcaccttctgaccactcctagccctgcccttggaaacccaacccatctcagagcttgagatgctgtctgtatactgataaaccccaaatgtatagctccagcctcaggcattccctcaaatcccagtggtttactacagggcatatttgacatctctgcccacacatcacaaaggcctcttcaggttaacatgttgaaaagtaaatacctgcatgcctatctgccatcaagctgccccatcagatctaactgatgtctgtgctgaaagctccatccttccaggctcttaggcaagaagacctggagttcccttcaggcctctgtcgttctcccaccctcacacttgatccagcagccaacctacttggctctgcctgagacacacatctggaatccaatcacttcccaacaccccctctcacaaacaccctgaccaaggcaccattgtctcttcctggacccacgaacttgcctcctaacagagccccctgctccctcgtcatgcacctgctgcctgctctcaactcaacacctacacctgtcatttaagccaagtccttggctctgaacctccagaggctctcatctcagttggtggaaaagatgcaggctgtgctcaaccctccagggccctacgttctctgctgctcacacgcacagaatgcagctctccggtctcttctcccctgccctccccgtgccatacacactaacctctttgcagaatgttccaggcaagctctgccatgcatctgagcatctgtgccttcccccgacctccttcccccatctcccttaggcctccactcagttgcccactgccatccccgaccactggtccagaagaagacgctgctttactttctcagcagaacttcctgccttctgatgacattctcagtttggtgacctcatccctcctgttcgttgctttgttcaacagccaggcagcacctggcatgcagtaggaggagttaagagagcagcatctttgagtgaggaggatggatgtgtgagtgagaccccagggccacgggagcaaggaccataggaccctcttgtccaggttctggtataggtcccctatcctggcaagacaccttggaaggctggatggggcaaagagaggacacccttagcccaggcaagagttggcccaaagagctttctggaagcctatagctgcgtcccagcactcacagtgccagggtgagaaagggccagggtgccagcaagccagtcagtcacagtggaagggacaatgcatggagcttgggccacctttcctagaacccagcgtccccctgcccactcaggtctccaaggaggaccaaggcatgaccctctgaccctgtgggccacaggatggcagggtgggggtgtccaatgagagtgaggggtggccaaagtggtgcagcaatgctccacctcggggaagccagggcaggattccaggaaggggctctaggcagaaggcagccctggcccattacattcacctcttcagcaccctggccttggacagctcccgagatgaacaggaatccctctcttcctaggaggaggtgaaggagggtcctaggatgggaatctgcctctgtcctgccccagaggccaggagttggctctcggaaaatcttggctgagtcctccccttgtaccttctttttttttttttttttttttttttttttttttgagacggagtttcgctctgtcacccaggctggagtgcagtggcgtgatctcgactcactgcaagctccgcctcccgggttcacgccattctcctgcctcagcctcccgtgtagctgggactacaggcgcccgccaccatgcctggctaatttttgtatttttagtagagacggggtttcaccgtgttagccaggatggtctcgatctcctgacctcgtgatccgcccgtctcggcctcccaaagtgctgggattacaggcgtgagccaccgcgcccggccccccttgtaccttcttaaaaaatactgctattttcgctgctcatgggttaacttgttgtttcatttgaagccccaatttccatgctaaagcgaagcatcataagtagcagtagaatcagctcatcctgcatttgtttttccccagcgaggagcaatcaattacctgagagatgtccgtggctgtggctaaacggtgacccaacaaggtgcaattggcaaagtgtcacttttattcatggcctcaaatccgagaatgggctcccctgcattttaattatcggaaagcactttccacccttgctttaatgaattatataaaatttaaacacatgcaattatatattttataaataaaaagctgtgggattgccttgaggatgctgcggccaccagcagagctgtatttacttttgtcgccccatcctctgtccctgccagggtctcctggcctccttccttgacctgcctgcatccctcatttcatatggcctggctcttcctctgtctcctttgagctgtgaatatttaatcatgaggtggagactcaccctttcctctgccttatcccggaggagagtagggtgctgtggtttgggagagaacccagcagcatgcttcactctctgccggacaactttctctgcaaggctgaggtgctcctgataagggccagccctaaagcccctccagcactctcttcctccacacacatcactcggagaccggctttgtcctctgggtccacagagcacccagccacaccattctgttgggcatttgtcacctgggagtcaaaagaggctgtgaatagctcctttcaccttcctctctcctagaacccaaggccaccacacagatccttacaggggctcctgggtgtcacccacacatttttagatgaacaaatatgattctgtgaatgatggttttgtttgctaagaaccaagacctgaggaggtgtgtttatcacaatgcataggctcatcacctttttgtctacagaaaactttgtaaatccatcaccaaagcatgatacctctgctgaagcccagggccaagtttctcctggacaggtgttcaacaaggagggaacaaagccaggccccagtgtagggtctaggctgggagtggaagagaccccagtggcaggtggcgtgggcagcgtgggaacggtatgcgtggtggaaaaattgcagggggcctgagattatcttggccacactctctaggcagcccagtgcagattcccagtcccctctcagacctgacatccactgtttctgcagatacaattttgcaagcggtcatgggaggcacagaggggtctgggccccaagaaaaccagcattgcttcatttttcccctggaattatgactctgcaggcagaaggttggggacagagtgacgcaggcccacgagggcccttctgtggctttctctatgcagaaacttaacagggctttatttccccattgtttataagcctttccaaagtcacattccacagcccccgagccatgccctgattcacccgctgacccgctgctttcccgggtcgtggaggaagagaagtccctcaggtcctacctcatgctccagccctgcgcttgctggggagagatgtcctgcagcctcaggtccctgaacacagcttgttctgcttatacagggaaaccctggcatcgcatgcctgctaatgtgagtgaaagtaatttcttcaaaatcacgataaataaaaggtgaaacaatgtttaagtcagagagtggttaattgtctctctctaacgagcaactgacctccagggctcagccgctccgggaactcattacccaccacgctctggcagcggtgccgagcacaggggtgagccgatgaggagaaggttgtcctggccaagagtccagcgtgggagggaccctgcttcctgctcctcctgggaaggtttccgggaggggccggctgcttcccattcctgggtgtagatgctgtgctgggggcacaggctggggcaggaggtgcagggagcagacggcgcgggtgtgaattggaatgaatgaccaactctccagcagacttttggtggctgccctgttgagaaaagctgtcccagtggctgcaggctggtgcccaacactgtctggtgctggtgtccctcccaatccctatagctggtattgagagcgtatttattaagcaccaggcacggggctaatacacagcccacaaataaagctaaagacagaaggaggttcccgtggctgtttgaatgctcagccgctcccctgtcatccaatttatgaaatgcaaaatcagcaccacgctggcgtcagtgtgctgcgcagacagtgtgtgccgcagtcatcccaccctagaccattaggtttccatttttcctcgtatactattattgcttatcatttattaatatgaacccaagcggaataaaatgatattacagcaagatctccatttcttgctatattccaactaggtacgtggtcagtaaacaaagtctctctcattaagcattactgcacttaggagctattaccagtgaggcacacagaccccgctcccccgacactggatttcatggtttctcgtttacaggtggcctctgatgtggcctggaacacccaggccacaggtctgttgaggggttaacagaagtgtagctcttgggacctctgtaggcttcccagtggggaggagggtgattttcaaagctcctctgagcagagggaggtgggggatggagacacagggtcaccttgtttgcatagactgctccccgagggagcccagacctgtccccgatctaggcacctgcctcggctatctggaaagtgtaatgctctgcaatgttggatgttgagtgatcgatagggtgatgagaaatgagcaagggcacagtgagaaaaatgccaggagcggcagctgctccaggctgcgtggcccacacagtgagcaccgctggaggcctgctcacggctggtgaggggctgacagggatcctcagggacacgcagtgggaggccggctttggccaaagtgtctgacttcgaaagttgtaacagacaagaatgttctgcctcctgctcttggcagaaatggggatccattgacgggtttgcttactgcactctgcgtgcctatctgtgaccccacgtgccacccactcatttgctgttccctggtggccctcattcactacactccatccagcctgtttcttcagtgctgcccaaggccttattgggtaaggtggaagcaaataatgtccccaccacgaggatggcacatggagtcccagccactcaggcagctcacctgctgacccttctggaggagttgctcccatttacaaggttcttcgtgtaaaacataagctcaaatatacacaggaccccaaaatagccactccccagattgagtggcatgactcccaagtttcttctcttgggggaagaggcccggagacaactggagttgaccgtccttgaggctgtgacatggcctcactcactgcgaagaaccagaaggagaggcagtctgctgtgcttcctcctgcaccagagcacaggtgcttggtttgtcttacttacgtacctgtctgagtggggtctgaggatgctcactttctctgccctgttccctccctcaggcctggggagcaggcagcaaggaagctgggaccagctgggtggcaaacagcccataccttaggctcctccctggagcccagggtggcgtcctaggatgctccaggccttggactctgggatccttccttctgatgcccacatcacagagaggtggcccagcagcctgaggccagcagaggctgacactgcccagcccaagaggacctcttcaccccaggcactacaggtcagagccagctacacccaaagatgggccctagaaagccctcctgtgactcttctccaagacttgcaatgctctgctgatgagcactgaaaagtgggtgcaaattctgaatacctgcatgcattctaaaccctgttacggaccaggttctctgcgttcttctgacagtatgaccgagacaaaaccacctgtatgcttctctgattaaatatccagttggtgtctgagaagaggagagcccagcagattttgatgcctgctgcccattagctgttaaactaagatattgtttttattagaccttatctgaagaaccagccaagcacgggttttaatgagaagcaaagagtgaatgaggcagctataggactgtgcatatgaaaatgtaggagtgtctgatgaaaggcatggaaatctcatgcccgaaggatcaacagtggcaggtcaccaggaaaccgcacggttctgtgcataggcttaatttttccccctcatctcagcctgcggtaatattttaagtagaacccaatgatacatgaattcatgtatttatgctttttttgcccatttgctagcctgtgttcttttttgggcttttgtatttttctcctaaattcaaagctgcatcctccacacccccacaagctttggggagtggttggttagccatcctggcaagggtctttctgtcggtcttaccttctgacctggaacctggctccctgggctcccctttcccaggccccttgcgggtctcaccagtttgccttgaaggaaggcaggtgtggcagcagcttcccctggggtgcctgcctcctaccaggaggtattgctggctcgccggaggcagccccgcgggggaggctgggtgtgcagatgtgcttctcctttctctcctacatggataccagccttccaatcccctctttcaaacccaccaggagctgtgcaggctttgggttcggccttgtcattggctctgtgctcctgctcactgcttctgtatgtggactcgacttcctgggtgacaggatcccatcctccccgcagatgggtcatggagctgcacgcagggccccaggaccacaccatctgcacatctgcagtggcacctgggccttccccagagcagggggagcttcgtccagcatggggacccttcaaatcagagactctattgagaataaagcaggccctggctccttgagaagggcaggtgggtggagtctccagggacagcaggaaggggagccatgtgacatccttgcaatgtcccttttattggctgactccaaggtggtgtttacacattgtctttgctcagctgccacaacaatgcactgcagacaggaggcttcaagaacagacacttatttcctcacagtgctggaggctgggagtccaaggtccaggtgttggttccttccgaggcctctctcctcagcgtgtagacagcattctctctgtgtcctcatgtgggagtccttctgtgtgtatctgcatcctcgtctcctcttcctattcagacactagtcagatggaagcagagcccaccccaaggatctcatcttaatttaatttcctctttaaagatcccgtctccaaatacagttccattccggggcgctggaggtcaggacatcaacataggaacttagggagcacaattcactccataatacacatataattatttcctgaataattttgagatcgatgcattcacagagtcctgattgggagaccaggaggtctgtggcccgacacccactcacagggcacacagcgagtgctgccacctgggtagaaccaagagatccaggtgtggatgctcctgcagccacctggccctcgggcctctgctgtcttcttttcctcttgtgctccccagcctccaatcctcggttcctacctgccctcaccatttgcctccccggaccccaggacacagggttgagggcccacgccatctctgtccattgagtctgtctgtgggacttggcttcaggtttagcactgggtccagctcgtgctttcgtgagggtgcaccatggcgtcccagctccaggatcactggggccacatcccaccccctagagatttccagttccccaaatctcagggctcacgggtgctcccaggacccctccaaagcagctgtgggctgtcttgtgggatagtcaggggccatagctgagacccccagaggcagtcaccacagggcccagcagagattccagccagcctccctgcacagggcccagcagagactccggccggcctccctgcacaaaaagcgaggcaggtatatttttatctgataggttttaggaacatttttgataatttctaaagttaaggcagagagccaggaacactgggcaaatgggactagtggggccggccctgtcaggcgttcacagggcgcctcccaggctggctcttctactttgtaaactgcaaggagaagacgctgtgaggaacaagtcagctggtgtgtgaatgtgggcggcagtcactaaagcagactactggtccttgacactaacagtaaccaggacagtttcatgccaggggaggggccacttagccccatccattttgtaggactggcaattatgctgatacacaaagaagattttcacacaccaacatccatcagttaagagaatgtgggaaacagtattcgctgaatgaatgaatgaatgaatgaatgaatgaagtgtcttagtccacattggtgaatgcaggctccctgggggagactgggctctgtatccttagtattcattctaaagttttgtgcctgagtttcagatcctctccctcccctccctccctctctccctccctccctccctcccagcaaccatcctcactgcttctagaatccgcctgctctgtcttcttcaccagccagcctcctgccctctatggagaggtttctgagggaggaggcagcaaggtattcttaacagcctcaggggaagggattgactgcaatgtggaggggggtcccagggcccccacggtccagcagcccccaccgttttcctgacctggtcttggagcccctggcacctcaccaaggagcccgaagaccataagtggagctcgtggctgagttggggctgtgctccgactcgaggctagtttttgaggatatttttcttagagacccaaatgtcagaactctgtgtaactggcctggacttcctgaaactgaagagggtgtgggccctggagggctctaagcatcattttattagaaagggggattgtcaccttcaaatggataaaggccatagggagcttatgcccacacaagactcaaattcacttcctacacggcaggtgcctgggagctgctctgcccagccttccagctgtgggttctaggaaggtcctggcccatcctcccaccaggggacacattctgtgtgcctcacaggagcccccctgagtcccagagtggtcccctaaaggccaggagagtcaggagaactgtccctcacgtctcccaggtgaggaaactgaggctccacgaaatgggacgtggaggagctgaaggtgcttctcagggcgttgcagcccaggccacgctcttcagacgctttctgcttttggctcccagaaagaggcacacaaaggagaacagggcgttcctgccaccaaggattggccaggctttctggggagatgacatggagacccagccatggggccagaccaagtgtccctcagagaggcctaagaaccatccaggcaccagaccacagttcgtgccaaagcccactgcagagcttcaagtgcccagttctcccttcagtaagaagatcacactccagtccccacagggcatgcctgggggcaggcaacaaagagggaggtgacattagcaacttgggagttgggcagctcctggtgctgtggaccctggaagttgacacagtgctccaggagaggaacagtttccacgcccaaacaacagggcctggcgccttcgcccctttgctggacagagcccatccatgaatcacagaaacagaggctgcctgccacgcctgcgcctccgagaaccgtccaactccccaccgctccaaacgccccggctcccttgactcccagagcaactcccaggcctgtgatgaatcacccgcgttctgagccacgcacggggttcacaaatggctaatgggaaacaccatgcattccttaaaatgcaatcactggtcagcttgaccgtgcgccatgaggccagacggggtgggaaggagcccagagcctttcccagcaccatttccaggttgggggtctgaggctgcaacagggggatgaggaggtaccaccgggggccacggacgggaacggtgaggctcagggggctgtggtgcttccaggggactctggaaacctcattttgtctgtgaggggtgggggagtacaggccggccctgaccttgccctccttgctgtggatcagacactcacgccttatctcacagtctgcagggcagcaatcgggcaggcccagctgggttctcaacttacagcctcacaaaccccaatccaggtgtgggccgggctgagcccttgccgggagggtctgcaggaaaccgctccatgctcactcggggtgtggtggacccaggtcctggcagccgtgggtcccaggtcccatttccctggtggctgtcggccccaggccatgctttgcccctgaaggcagccgggattcctggccacagggtcccctccctccctgaagcccatggtggtgagtcaggtccctctcatgctgtgaggttctgacttcatcttcttccaccaacttgagaaggcgctctctgctttcgaaggcccatgcttagcaaggggcctccctgagagacccctgaagacagtgcagaaaaacacaccaaagaaatgcagagaaaagaacacgcagggcccacctgcaccctccagggtccctgggctacaggctctgatggttcctttcccgtgtccactggactgggccacagggtgcccaggcatctggttaagtgagattctgggcattcctgcgaggctgtctgtggatggagttaacatttgaactgggggactgagtatggccgatggccctgcccagcgtggggagacctccagcctgggaccctgctcttctccggccttcagactggaaaccaagcaccagctcttcccgggtttctgctgcctgcctccatggcagcaggagcctatttcctgtaatacatctctactcacatgtgtgcctgcacacatttcacacagatatgtgccttaacgtctcagacacggatggctttgctgcctctcccagctccctggagacagtggagagagataagcctggtcgagagcacagccggcctctcgggaccgtcatgagccgctggcaccaggagcttggagcccacaacattcccttcccctgcagcagtgcaaaggatgagattctcatcagcttgggaaaccgagataaagcagggagctctggggagcaatgccaggggcttcagtgtcattttgagcctatctcgccttcagcatgggcaggagctgcctgtgagagtcccagcccactggtctgtctctgccccccagggcctgcactcggaaggggctcaggaaagcttgaggaattgatgggacccatgtgagcagcatccttgggtggccaaaccacccaggagggacccaactggggacacggacccgaaggtgtggccccttcatggcaccccaactcccgggcccagcctcacgtctccacaaagaacaggaatggtggaggctcagccctccctctgcctccacagccagcccagggggagacagtgccggtgggagctgtggttctttaacaggacaagtgcacagcctcctgggcacagcagccgccccgggctgcaccgtgatgtctcccggccatgacaccccgttttattcacttctactttgcagctccgtgttcagccctgtgcaggtggcactgataggactaacagcactggaagatttagctcacagatcagtgtcattgcgttccatcatctctccatgttgttcactttcctacaacgctctttccagctgatatcattctatagcttacggattgagaattcttatactcttactttagacaacgggatactatgttgtccaggagaaattccggtgaaaatgcagagagttccaggcaaaagggattttgtggtttttgtttgtttgttttggggttttcttggccaaaaccattatggactaattaaaggaaatgcgcttttatggtgtgggaactctcttttctgtaacggtcgcaattcttcccttttcttttaggtgatggaggccctgaaaggcctggttttgggagagaaatgtgagtttttctttttattttctcctcggacttgatcacattgaagcataatgcttgggtggtgccggccccttcccaggaagtcactgagctcctcgcaactccgtccccacccctggaggttactgagctttgcacgacaccagccccttcccaggaggtgaccagagcttctcgcaacaccggccccttcccaggaggtcactgagctttgcacgatgctggccccttcccaggaggtcactgagcttctcgcgactccagctccttccgaggaggtcactgagctttgcacgatgccggctccttctcaggaggtcaccagagcttctcgtgactccagccccttcccaggaggtcactgagcttcacacgacgctagctctgtccaagtcggggtccctgtgcccctaggtttccggtcaccgggagagctgtctgtcgcgccataagctggaggtgcgcaggaggatagaaatagaaactcctcatccagccgggccagggcactgacagccacagcgatgtccacggtgtaatggtcacggactccgtccccaaattagcccattttttacaaagacgataatggggggcggttctctgtgaaatggagccctccatttcggccgctcccgcgtcaggcccaaaataggtgcctgctggtcatcacttctgcgatcatgctttcatctccactcaattacgtcgcctccgcgtacttctgggctgctggtttatcatgtaagaatataatttaaaagtgatccgcccctcactttccatatttagaaaaaaattaagtaaaaagtaatgaatgccacccatctctcgacaatcacacgtaaaaacctttcaattcttcatggaagacgcagagatgagcctggaagtcagggcggctgtagctgacatcaggtctgtactcacattagccagcaaacccaccgtcaggaggccagctcggcttgttaagtggagctggggtgatattgccctgatccacgataatgaattcatattttaaatgcattttcaatttaggatgtattttaaagcaatttgcaatttgtagacaactgtaaatcagagcattaaattaatcacgtaatgaatatggtggagccatttttgtaaggcaaagcagtttatctacctttgtctttatggggtgagcagaccctgcactttggaaatgaataaaaagctctgtatttaaaacacagtagctccgagtcagactccactgacctgtccatttataattcacatcgaaggcatctctccccagggaagaaggaaactgtagctacacagctgctagttccgcacccactgggtttaggtctccatcggttgtgggggcagtcatagcccaggaaggcatgactcagctgccagcccaagccaagttactttgtatgaaggtctctttcatgtcaagctgtgtcctcacttttggttacacagcatcagtgggagtccatctcccctgggctgtgaggtgccagaaacaggggctctctgtcctccactctctctccactgtctccacagtgactctccactgtcactgtggcctggcacatgactgggccaatggcattaaatgaatggatggatggatggatggatggatggatggatggatggatgagcaggtgtgtagatggatggatggatggatggatggatggatggatggatggatggatggatgggcgggtgtgtagatggatggatggatggatggatggatggatggatggatggatagatggatggatggataaatggatggaaggaaggaaggatggatggatggatggatggatggatggatggatggatggatggatggatggatggatggatggatggatggatggatggatggatggatggatggacacatggatggatggacggatggatggatggatggatggatggatggatggatggatggatgggtgggtgtgtagatgaatggatggatgagtgggtgtgtagatgaatggatggacgaatgaatgaatggatggatagatagatggatggagggataaatggatggaaggaaggatggatggatggatggacagatggatggatggacggatggatggatggatggacagatggatggttggatggatggatggatggatggataaataaatgaatggatgaatacttgagtagccacataaacgcagcactcagtgccccagcccatgctgttcactgtgtcttgagtacacctcgctcaggcctggtccagagctgctgtccctgagtgcagtgttcatgattcaacaacatattttccaatgaggtgtctacagcagaagcacacaaaaccaggccatgggctggtttattgatgcaaatgcgaccagaggctctaaggaacctccggtccatgccccctgggagttcagcattcacccactcagtgtctgcagccacttcagaacagctcctgcaaatgatgagcatggactgtgctggtcacagtgattttctcttcctcagacccctccctgccattcgtgtctatgcccagactgcccagaccaacgagaacaaagagctctgtccttgcacacacccagagtcccaagtggtcctgagccctgtgcacctaccaggtgggcaccagggggtggctgggctggatagacagggcccaagtcagggtcctgctggagaccaacccctcgctccccagtcctggcctcaggactactgcttatgctagggaagagagccataggaagcttgctgcaccatccaccaaaatcttcctgaaaacccacagccccatccacagtgacccaaccctgggcctgggtcaaacagggacaaaccggccagcccccagaggccaggcttcccccaggcctctgaccactcccctgtgatgcattgggctttaagacccgatgagcagagccagccggagcctgggccccgagcaggaccctgcacagggttcttcttgcaggtctctgggctgcctcagtgggggtcagcaccttcggaaccccccactgtgcatggagtgtttgtttgctgcagacggaagccatgaaaccaccctccctgggcaggagctgcgcctcgagggagagcagagcccaggaggactgaggtgtgcttcattatgaatcttgtttaatggatattcattattttcatttatctcctcatcctgcagctatgtaaataaatgcagtgtgacactagccctacagcagaatgaattaggaactaatttcccaaggagtgaacatagcatcctgaggtggccactggccaaaggggtcccaggactggcactgacccaagattgatagagcctcagacccctcggtcctccagcagggcctgggggcagtgactggagcagggcaggaggcgtgtccccatcccagagctgccacacccaggacactgaggggcacctctctgcacccttcgccaggtggtaatggctgggagagagcagcaaaggtgagaagccctgtcctgtgagaattcatgattcctgagaacccagtcagactgcagggcccctcagcctccaaattacgcctgcctgcggactgtcttatggctgccttttgtgtgcctcacacctgggctcacctggctgggctctcctgtagacagctgtggtttcctgggatcagaagctgttatgtgttgctgggatttcggcgtctaatgcaggatgtgccacatcgtgtggattttgagttggatttggtaaccggaagcacttgctgcagggttggggttgatggaggggggattccttggcttcctgtcttgtggggaaagaccccatagttgctcaaggtcacagacacagggagcagccaatgatgatggtgcgccccagaggaggtggccggcaccccagccccgcacaccttgctcccttcgttcataatctatgggtgcatctggcattggctctgtgagccgggcatcagccaggcccaggagaccagctcagcccccatctcaggggaacaagggctcccatgaggatgctcagatgaaaacctacacacagcatgggagaatgcgggtgacctgaatgtccactcgctgcccaggttaccttccactcacctcagtagtcttacctgtgaaaggggatgataataataaaccctaccccacaggcatgctgtgaagatcaaacaacatgtcccatgtaaaccactttgcataagacaacccctgtgcattaccagtgcagagcatggtgcaccatgtttaaagtaaatatcatccagcccctcaccatgttagcctgcctgggctgccataacaaaagctcaacagactgggaggcctaaacaacaggaattaatttcctcacgttctggaggccagaagtccgagatcaaagtgtcagcagggtgggtacctggtgagggctctccatttggtttgcagacggccaccttctggctgtgtcctcacatggtggatagagggggagctctcttgtgtctcttgttgggacactaatcctgttaaatcagggctttgccgttacaatctcatttaacctaaatacatgtttgaaggccccttctccaaatacagtcaaactggggattaggctttaacatgtgaactttgggcagtaacaacatttcgtccataacacccaccaggaatatcaaacatcctgaagctctgtgatagagcacatgaacatatgaacttgggggagtgatgttgttactcccctaagttcacacgtgaaagcctttgaacagaaaggcaggaggatactgtacaagttcagagacagagagaggatggtaggtggtcagtagcaagtgatgaattcatgaaaatgagaatctgcctctaggaggagagtttaaaaggaataccaaattcatgaaaatgagactctatctccaggagaggagtttcaaagtaataccaagtggccaaagagcctcagcagagatatgaacgtgaccgtgtgccagaagaaggaagggcccagctggccagatgttacgtccaatccatgccaagttgtgagctgcagagaatggctccagcatcagggctgtactggctggatgggaatggcctggaagaaaaatatttcattttcatccactgtgagttttttcttggagagccttctaatggcagcaagctctggtggcacaaagctattccccgctgacattggcagttgagtcacatcccagatgagctgacaaaaggtttccttcccatttctgggcagccaccaatgcttggggtttgttataattttatgggtaatagatcatatcacacatgagaagaattcataatatggagattaagaaaaacaatttattaatgttaataaatcctccaataaaacttccaggaggacctatagtgataaattgaataattatgagtataattatgactaactagaagtataatttcatgctaatgcaataataatgacacaaaagtgtagatcatgaattttaactgcttagttatttcacatttccacaagtatggacaaaaaaaaaaaccctctctgaaatctgatcaaattatggttgactgagaaagagaaagtgttcttggtttaaacagacatcgttttgattatctttactgaactgcaaaaagtcttatgttaattaggaacttgaagatactaaattcaagaaatagatactcaggagtgcaacgtttttctgagtcaaaaaacccccatgaactcatcgttttatcacctttgagcaccatgtgaaagagaggatggaagataatttgcatttaagtttgcgttttatgttgataaatgtttcaagaagggataaactagtgcagacagatgtgattgcctcaactcaacaaagcattttatgcattgagatgagcccgaattaactgcctctgaaaaggagtttgctggggaataggaaagatggttcctggaggcgtttccttcactctggactcagttcccaggtgacaaggcttcagactctggagggttttcctagagcatctcattccacaggattcgtgtaggctgtgagattgtccttgggccatgagagagccccaccaggtgggcatatttctcaagtcagagttacacaggaaaaagtgcaacaccagagttgaccaaaagggctccaggaggccaggttgggggacagccccctcctgtgctctccggccacttggtgttattgttgcgaatatcttcccgtggatgcccaaggatccaactgaactttgttgacgaactcttttccgctcatgtcgagcctggaagaagagagttgctcctaatacaagaggatttcagtagatgctttgggattatagactccattaacctattttgagaaatggccacacagtactgtaacggggttccactccgccagggctccactccttccggctgcccccgttcctggatatgggtgggcgccgtctttctcagccgttctgattgaggtgtagtggtatctcgtgtggtttaatctgcattgccctcgtggccaatgatgttgaacatcttttcatgcacttatttgctatccatgtgtgttttacggtgcatggtttatttaaatattttgcccattttttaatgggttgttattttcttactgagctttgtgagagttccttttaaattctggatacaatttcttcatcaaatttatgcttgaaaaatactttctttctatctacgacttgtcttttcactctattaataatcttttgaaccagaagtttttaattttaatgaagttcaatttatgaattttttctttgatggattttactttttggtagcgtatctatgaattacttgcttaaaccaaggtcacaaaaattttttttcctatgtaagcttccagaagtttgagaatttagattttctatttaggactatgacccattttgaattaaattttgcatatagtgagtgatatggatcgaagttcatttttttttgcatatgtatatccaaatgttccagcaccatatgttgaaagactatcttttttttttctgaattgcttttgcaactttgtcaaaatcagctgttcatacaagtatggatctatttctggaccttctattccatcccattcatgtatttgtccgtttccaaaccaaatcaccctgtctcgattgctgtatcttatcagtcatgaagcaggtagtgtaagtcttccaactttgttcttttgttcaaagctgtatgagttattctaggtcctttgtatttttatataaattttagaatcagcttgtcagttgcaacaaaaatgcacgtgattttcattgagattgtcttgaatctatagatcaatttaggaaatttgacatcctcagttgtgagttgtctgatccacaaactcattctcttccttccgttcttctatttctccgagcaacactttatagttttcagtgtattggtcttatacatctgctgtcaatttttcccatgatacttcattatttgatactattgtaaacagtattttttcatattttctggatttttgttgcaattacataaaaatataattgatctttgtatattaatcttgtgtcggcaataatgctaaacttgctattacttccagcgagttttatgtaggttttaatggatttttaaaatagactatcatgtcctctgaataatgatggtgttacttctttttttcaaatctagatagatcctgtgtgtgtgtgtgtgtgtgtgtgtgtgtgtgtgtgtgtgtgtactcttgccttattgtagtggttgggaccaccaggtcaatgttgatgataaatgatgagagcagcattcttgtctcgtttttaggagaaaatcattcagtctttccccccactgagtttgatgtgaattttaaggttgtcatagataccctttattagtctgaggaagttccaatctatttctggtttgttttttatcatggagataggtttaattttgtcaatggcttttttgtgcgtcaattgagatgattgtacactttgaatcttctagattgctaatatggtcaattatattaattgattttcagatgttaaacaaaccttgtgctcctgggataaatcctagttggcaatactattacttcatttgttacactttgttgaattctatttattgaagttttatttagaatttttgcctctatattgataagaggaataggctagctgttgttttttcttgaatgtctctcttttgtttttgtttttctatcacagtaatgctggccttaaagaatgagaagagaagtatccccctccctccagctcagagatagagtgtgtggacttggtgctctcacctccataaatgtttggtggaattcaccagtgaagcatctagacctggagttttctttatgggagattaatcatttttaaaaatcttctcaaaaaaataaattttggctttgttgatttttttctattgtttgtttcaccttttattgccttctgctcctagtttatgatttgttttctcctgctttctttaggtttaattctgtcttcttcttatagatccctagtggtcattgattaaggtttttcttcttttctaatagagacattcattgctgtaagtttccccttcaagactgctttggcagcatgatgcaaattttgatccgcagtgctttaattttgtttcagttcaaaatgtattttaaatttcctttttgattttttctttgacctataagttattttgaaatgtgttacttggtttccaaatatttcagaatttttcaaggttctttctcatattggtttctactataattctactgcatccagaaacagcctttgtttgacttaaatcttttaaatttattaaattttttaaaaaattgtgatgggtgcatagcaggcacatatgtttatgggttgaatgtgatattttgatacaggcatataatgtgtaataatcacatcaggataaataggacatccatcccctcaagacttttaaatttattgtgactttttcatgacccataacacggtgtatgtcttggtaagtgtttcctgtgcactggaaagtaatgtaagttttgctgttgtcaggtggagtgttttataaacatcaatgatatcaagtttagatttccatatcattacttcttttctgtctacttactctatcaattattgagagagcagttttgaaatctcaggctataaacgtagattttctttaacttatctttatcgtatcagtttttgccttatatactttgaagctttcttattagagatacagaagtttagatggttatgagatcttggtgaatgtacccatttaccattataaaatgtacggtaatactctttgctctaaggtgtactttctatgatattaacatagtcactaatttaacattagtgctagcatagaatatatgtatttaatacttttatttaaatctatgtgtctttttatttaacatgtgtttattgtagacagcatatatttgagtcttgctttcttgactaatctgacatctcttcatcttaattggggcatttaaataatttatagttaatgtgaatattgctattctttatatccaccatcttgcaaatttgtcttatgtgttttttgttccctttttactctttttctgacttgtttttgattaattatttttgtaattccatattttctcctttgttggtttacttaagtcattattgttgtagttcccatggctgtttcaggtgtcagagtaaatatctttaactcctcacagtgtgccttccaatgagactacaccaactcccaaagggtagaagagatccgcagtatatctccacttattccttgtgctaaggttataaaatatacctttatttattctataaacagacaaaaggtaatgtgatgagcatctctatgccaataaacaaattgaaattaacaccttcattgaaatggacaaattatcactttctgtttctccttagacaatcttggttggattgaaaagtcaggagagtcctatatttgttgaatttcatgtcatacccatcaagagtattctccatgtgccttacaaagaacttggcacacgtcctctgaccggacacaggcatgagggagccaagtgcctatggcaggaggacagcagggcctgactcagatacagcctcactcctggtctttgtcagggcaggactgtgggtgtggtccccacggagcagacagacatggggaggaggaggagcggctgtgaggtcatcctgaggaccacctggaaagatgctctgctcagggtcctggaaccgcagaggattctctcagcctgcccatgtgggaggaaccacaaaaacgtccatgagaagagagcaagatacatacatctgtaaggctggaagaatgagagcagtttctaggcatcctgaccatgtaagaccctcttgcctacacctccccccattccaacattggtgggtcagacactggctggcaaactggagatagagactgggggagaaaagtataagacaagtaaacagggactatccaatcacacccatctttctctctgtagacctctagcctaaaggagtgtgagctgagggaaggaggaaaatgtgacataaaatcaggtttggggaatgaacattccattttctgaccaaagactgtatttgcagctgaaagtgaccaaatcactttccgttatccaagagtcaggaaaaccctctggacccaccggggtttcatctatggctagggaaagaatcagcctgctgcagatttatgaggaggcagtgagaaaaatcaatccctgcaatacccagtatccaaccatatcatgggtcagccttcttcaccctaccataaacacgccttgaattcacagaaaacaaggggcaagtgctctgcatcttggtacacttcaaatcactctactttttcatcctttatatgttttcctattctctactccataccatttttgcagtttctagatcatgcatatcacccaagtatccagagctcttcaatgtaggttgctcaaaaacaagagagaaaaagaaagtcatacatctcatagtgcttgttaacataaagacatgatacatgcagtgtaatgttaaggcataatcaagtgtcaaaacaggtattatcatgcaaatgcatgatttctatccaatgagtcagtcacaatgagacttcaagatgagtgaattgagcagactatagcaacagctacctgccacaaaggccagtttttgccacactgcattgagggatgaaggcagctgactgcccgatgtgccattagcaatggactgaaaccaaagtgttgatgagtaaggagagtaggggcaggatggagtccagagattggcctctctacttgcctgcatttttgagatagtccataataaagaatgtagaaagggagcgagggaaagacagagcatgcacgcccagaagacactgagttctctgcaggcttttgccacagctgtgcctctgcagcccacactcggacccactcggggtcacatggagggcagcaagacacatgagcatctggccatgtttccaatgagcaggacaaagtctaattctgctgggatgtgttaaaatgtaaacatgcctttttccctagcatctccttcactaaacacctgccaggaacagttatcaactcatccctgtctcctcagtgatcagttaggaataagcaagactagaccaggaagacctccaggccctgtgacacgaggctcccactccagagtgggcattgctactcatggatccacaatcagggaggaaatagttgcatattcctccatggcagtggccctggagaggagctaagaatcactggtttacgatcttatcccagggatgagttaactgggacccaaagagatgaagtgaccattccaaggtcagacagtagattagctgaagaagaggaatttattcaactggaaagtaaccattcttcttcctcttcttcttttttcttatttttttaagatggagtatcactctgtcacccaggctggagtgcagtggtgtgatctcagctcactgcaacctccacttcccaggttcaaggcattctcctgcctcagcctcctgagtagctgggattacaggcacacacaccaccacacaccaccatgcctggctaattttttttttttttttttagtagagatgaagtttcaccatgtttgtcaggctggtctcaaactcctgacctcaggtgatccactgtctcagcttcccaaagtgttgggattacaggcatgagccaccacgcccagcagaatgtaaccattcctatgcagctcctcttcccaggcactgaacctgagaagaacagccacagcttccagtgatcttggccctcggcacagatgagggagcaggaaactgcaggaaagtgcagtgggacccctccctcacaccaaagactaacatcagaaatgtgctggtaaatcgtgaagccactggaatgtccgtacactgctggtggggcgtaaatgcaaatggtgaggggtctctggcggcacccattccaactgcccttgtgctcccagtggccagcactcccaccaaggcagtgtgaacattcaccaatgacatgcaggggaagggtgtcccagatgctctttctggtgtgagagccagaaactagaaatgaccagtgatgattaatgttacgtttcacttgtcctggccagggggtgcccagatagctgattagaccttatttctgtgtgtgtctgtgaggctgtttcctggcatggttagcgtgtgaatgggtgtgctgtgtaaagcaatggccctccccagtgtgcgtgggcctcacccaacaccgccagagctcaaataggacaaaaagatgaggtgatggagaattcactctttctacctgactccatgagctgggacatccatctgccccaatctcagactgagactcacaatgtctgcttttctgggtctccagcttgcagacagcagactacaggacttctcagcctctacaatcacatggaccaattccttagaataaatctctctgtgtatatatggaggatacacacacacacacacacacacacacacacacataaaggacctcctgctactgtgcatccacacagggttctcacagtcacaaagatgagcaaagctccctggacagccacagactgaaggcactaaatgaccattcgaaggacatctgagaacaaacagaagtaacccttcgtgactcaggtcagagttctggtaacgttgggggtcactgttgggggcaggaggcagtgagggcagggctggaactgtcccatcagatctgcctgctggtcactctggcagaagcacatctgaatcgctgtcccccagagtcctgcccttagagtagcaagacttgcatacatgaccctgcctagctgtgcctttaccatgaaaaggtaaaagccaattagcaaacagtggggaaaaaaaaaagccaaaaacacacagtacggtgcccccttggctgggggtgtgacatgcgtaagaggaggtggccacaacctggggagggacgaggatgggcctgcgatcttccaggcccacggagcaccgctcacaccgccacagcacaaaacagtccacagagaagaaatcactaacgttcaacctacacttgtggacttaagtggcctctctgtaacacatgattataggatttaaaggaagaaaacggcggcacacacagctttgctttgctctaatagtactttgcccagcgatggctcaactcaactcatacttttcctccgtacttgatgggaatgtctccgtcctcttttcaaaccacagtggcaggcgtgccctgcgtcccgctccatccccttgggcccttcctgctctgccagctggagggaccgctctatggggtgctcctatcacagcccctcttatacccagccaggctcagcctcgggggggcagtagggaagtgagtgtgggaagagagagccccgggggcccctccctgccctgggctgaccactgtgctgttctccggcagcagacccccagcgaagcccctccaggtctagtggacaccactgggagcctccacctcccttgtcagatgcccccaccctgtgggcccccagcaagcaggccctttgtggagccccaaaaccatagtctcctgtaggctgccccgccacccgctcctgcctgagcctccccttgaaactgttggcaggtggattttggacctcagggttcttctgtggggacttttctttctttttttccccatctttcttaataagccctgcagtccactcgtatcaacagccgcatctccatagtcctgtgagaaatctctttgcctgcacccccgggaggattcacggatgattcccattaacacagcctgtgagtgggattcgccacagtcacagagagaagctcagggccgcctgctgaagaggagtgggtaaaactcagcccgatttgccggcgcctcctcaatcccacaaaggatgtgttctcaaggcacctggaggaagccattggcatgagtaggacgtggaccctgctctcaggctcggcggtgcccaccacccatggccactgctgtcacctaggggacctccttctgaggacctttaatcagaaaagaagatggggagattgaagacgctgaccccttcctgttccgcacgcaggggcctcccaggctatgggcagattaaccatctcacacacctctgacgtcatcatagaaccatccccatgaggcagaggaggatctgagatatggggctgtgtagtctcagcctagtaatggtgatggcagtggggtggagaccaggatgcagaggctgtacccttgagctgcacggccaacgcagacaggcacacaaagacatgagcaggcacgagggagagaatggtcactgcgtggaaacaatatgttagctgtgcagaaaattcaagagaaaatttgaagaattactagaaatgatcagagaattcagcaattggactgaatcaacataggtaatcaaagctccctgtaaggaaagcaaaaaacacgttagaacatgtaatgtagtgattttcattgatggtagtcacaggaaggttaagtgtagatcaataagttgaataagaagttactaagagttatataaagaagaggataaatgggccaggcatggtgactcacgcctgtaatcccagcactgtgggaggccgaggtgggcggatcatctgaggtcaggagttcaagatcagcctggccaatatggtaaaaccccatctctactaaaaaatacaaaattatccaggtgtggtggcacacgcctgtactcccagctactcgggaggctgaggcaggagaatcgcttgaactcgggaggcagaggttgtggtgagccgagatcctgccactgcactctaacctgggcaacaagagcaaaactccatctcaaaaaaaaaaaaaaaagaagaagaagaagaggataaacgtcacagaaggggaagtcaaggaaaggagtggggggcataaatggcttccggagataaggagtgttggtgctggaaccctcccaccagatgccagcacagctgggccactgattctgtgtctcctgagttcccaggacctaggatggtagtgacagctgagaagtctaccttcagcaaagcagggcaggagctgccccttgacccagttctcaaaaggaattttcctggaactcgacatgttcatttgaaacttacctagaaggaaaaagaaagtctcaccatgaaagtattataacaaggagaattttaccctaaaagattaaaactaatgaaataaaactattacaacaaaataaaataatacaattattttcatttatattattatattaataatatattatctaaaatatattatattaataatatattatctaaaatatattatattaataatatattatcataaatacattattaataatatattgtcataaaatatattatattttaatactatagtattaaatatagtattacatatgctatattaaaatacattaaatatagtattaaatatattattgtacatattataaaatataatatatattataatatatttatctgtttaacaaaaataacaacaaaagtgcagaggtcactgttttagacaacatgatgctgtcacaggcaagacgctgcagacccaccggctagaccagggttcccatccgtgtgtgcctggcctgcgagcctgcatcccgcctgccatgggcgtaactgcctgggggcagccccaggaccggtccgtggaagccctaaccccctatgtcactgtgtctggagacatggcctacagcgaagtgactcaggttaaatgaggtcctgaggtaagcctgaatcccctaagcctggcattctgataagaagcagaagagaccccagaactgtctctccctgcatgtggggatggtggccgtctgtgaaccaggaagcgggccctggccaggaatggaactggctggcaccttgatcatggattcccaggctccagaacggtgagaaatcaatgtctggtgtttcagccgcccagcctgtgctattttgtgatagcagcctggccgcactgatataccagtgctgttcaaggtacggtgttccagcaatttgttatctattttgggggaaaagagtccattaaaagtaatgccctaaaacccctccaaaaatgttcaataggttttaattaaaaatgcagaaatttctgtgttgtgctttcctttgttcacaaaattcaaaaagatgttgatgggggtatctgaagaaaggcggtggtctcagaagtgcctgccccgggctggctcaggccgggactctgggtcaggtgcagcctcatggaaagacctctacaggagggccctgcctgcttcccacccggccacagcccccagtgggagggtctccctccccggccggggtgcccataacacataacacgtaacacgtctgctgcttttagctctcaacagggctggttgtttcatttcctgagtcctcacaggtattctgccagatcctattttaaactgaaagtcctcgttgaattcacactcaatcccaacattctgcttcctcctcgaaggtgtcagacacattggctccgcttctgcacaccacaaacatatttccataactgactgctttgcgcgtgaagccgtgccatcctttctgagtaaggattcacatgttttcaaggatttctgacaggtttcgagaaaagagccgtcgtctccttttccgttagccatctcagcgttgcgcgctgttccgaagcaccaccttcctggcacaggtcactcgtggcttccagatggcacagttaaggaagaggaggcagcagggagcacataaatcctgacactcactaatagactttattaatagttcacgcatggtgatcggccggccccaaacacgctccccgtagttacggatgacccgcttctatattctggcactgctggaaaagacttcatcggactcattttaattattttccagaagtgatccattttccatgaaaatgcatgtagggtttatctcattcctggaagtcattactttgtcatgaaaaattccaagtatcctggagcaggattagcctcgactttaatcatagagcagagggtaattttacctacattcttggacacagtcatttgagcgattggcctatgaagagctattgtctaattctccctaaggatgagatctcagagtcgggggtctgctttgagaaatttggggcacagctggctgctctctgaaagacttaagactccagagagtgctgaggaactggctgcgtgtcaggcttccaggcaatgatgctttgagagaatcctcccaggcagttgagctgcatgatgcccagacacaaggagagactcaggagttcgagcaccaggcttcgagtcctgattctgcagcttgttctgtgcatgaggtgatctttatttcaggtgatatttttccagcatatgtcaggtgctaggcaccatgctgtgtgacgcagatacaacaaagaccaagacaggcatggtttctgttctcttgctcggtaccaacatcctatgaatattttacatgtcactaaaaaatctgtaatttttttctattttcctaaatagatcctaccagttaatcatgcacaattccacatctctctataatgcaatttaagtatccataattaccaagagggcctcagattttctattgcatgttaacgctcttgaagaccctggaagcagagggctcgtcctaacaagggcacttctcccaagtcatctcgtgggatgcaaaaaagaatcattgtgaaaagagtttttcacttcttaacaactcactctataaagacaatgtcaggcttaatcagagctggagatgcggggtgttaaacggaatgaataggaaacctccctgaatccccaagtgccactctgagaacaacaatgctggttccaggaaaaagaaaatggcaagaaaagcccaggcacaaagtgacatttacaagaattgatgacagacctcggagacacccaatttcaattacccagcactggttacacacatggggcccgagaagcctccaggcccagcctccccacctgactcgctgcttgccagcaacccctgctgtgactttgcgggggacagatgggagctacttggaagccgatggtctcaccaccagcacatcagactcggggggcagcataacagagggcactgagggctggagtcatccacctatccacccatccatccatccattcacccatgcatccacccatccatccattcacccattcatccacccatccatctatccattcatccatctatctatccattcatttatccatccatccatccattcatccaaacatccatccatccatccattcatccattcatccaaacatccatccatccatctattaacccgtccatccatccatccattcatccatccatccgtccattcaccaatccatccatcatccatccattcatccatccatctatccatttatccatccatccatccatcatccattcatccatccatccatctatccatccatccattcactcactcactccatactcatggtgccaacacatctccagctttcttctatgggcagaggttgcaggaaacaaaccaaacaaaaccaatgttcaccttcgttggaccagcagtctttgctggggaggggataataaaccaaactgcatggaccatgtcagatggtaacgaggacactgaagggaggcagggtggctgctgagagcagcagtgcacagcgatgggtgggtggagctgttcacacctggcagccaggaggaccctttggaggcggtgccagtgcacagagataggaaggtggagcccgttcacgcctgacggccaggaggactcctcagaggtggtggcagtgcacacagataggaaggtggagcccattcacacctggtggccgggaggacccctcaaaggtggcggcagtgcacagagataggagggtggagactgttcacacctgacagccaggaggaaccctcagaggtggcagcagtgcacagagatgggagggtggagactgttcacacttggtggccaggagggcccttggttgtgtcacagtgcagcagaggccacagtgaaatagaagcagactccatgatgtacagagatggcagaggggacatcaggagggcctcagagagggaaccccctcgagggcagaggacgcaggagtgcctgctatgggtaaacagcccccaaagctgctccagtgagcataggtgttaggggcatggtgatgggcgtggaagcccagctaggaggcgggtgactgggcttgagtacaggtggagctgataagaagggttcagagtctgggtgtttcaagggtggacccccccaggtttcccaacccactgaatgtgagccctgagaaagaggggccacaaggaccccagttttgtgcctttgccggggatggtcaggagccctttagacgtccaggagtcacaccagaagcacgtgaggcctggaagccaccatgcaggaagaaatgtcatttaggaagggggagcagggcaggtgcgggaggacggctttacttagagaagacaaaagagccgaggactggacaaattcctcaaaagaggcctgctgggcatcgtggtagagaaccagcagacatgggcccagagtcaggggagttggggctcaggagacaacctgagggacctccggtagggtacccccacgggcttcagcttccccttttgtgaagctgggctgaggagcctcccttgccaagaggttctgcttatcccagcctggactgacaggatgggaaagtcaaggagacagacgcgaacctcgcaggcgcacgaggcccaggggaagcgccgggaaccctctcggtttgtgcaggagccaccctgtgactttgccaggactacctgtcgggcgccaggcagctgagccagacgaaccgccgggccacactcacaccgacctcagcttgtttcaggaacaagcttaggcatgcaagtaggaattagcttgtgctaaacagcaggacaatgcagttattctcatgattgtaatttaaatttgaattctacactttttaatccccgttatttactagagaatgaggacgtctactctgcgtggacttctgacaccgctctctctggccgtctgttctcctgtgtgctccggtacaggctggaggaagcgccacataagtgtaaccatcattagtatttcggcctccaccatctcctctctgcctcacatggtggccttggccctgaggacacagaacagctcaagtaagggactatgaacccccgacagcggccctggggacatcgctttcattcacttcttccctccccctgggtaccgcaggggccctggcctctggatgagagctgctcctgcaggggaccccaaagccctgtgatggaacaatctggaaaccttgctcctcacactgggccatctctggaggcaatttcccggcttcctcctgtgaggtccaggtcgagggatcaggctgcctacgatgctgccactgagggccgttgcttcctacgtgatggacttctcacctcttccttctcttgttgagccttaacaatgagagtaagaaaaagtaggctgggtgcagtggctcatgcctgtaatcccagcactttgggaggccaaggtgggtggatcacgaggtcaggagatcaagaccaacctggctaacatggtgaaaccccatctctactaaaaatacaaaaaaatagctggacatggtggcgtgcacctgtaatcccagctactcaggaggctgaggcaggagaatcgcttgaacctgggaggcagaggttgcagtgaggtgaggctgcaccactgcactccagcctcgtgatacagcgagactccatctcaaaaaaaaaaaaaaaaagggaaaaagtaagagtattcttcaatcactctgccagagtctgctctgtgtcacggaggaggagactgaggtctggatcaggggtgccactgactcacaagaacaaagcaatgtggggccacagcaggaataagacccagtgattccagatcctgccagattattccagatcattgtcatcagcctcttccatggaagaattctctctggtccacacggcatttcccaacgccatctgggaggcctccaaggcctgggatatggcggcttgagatgctccaagagggatcgtctcggtcactgctctgcagctgctcattgatttgagtacacgtcttagtttgaggtcattgtagagccctgtgtgggtataagaaatgacacagagggatcctgttcacgctgcgtccggtttcgcccaggggtggcatcttgtaggacaatagcacgatgtaacctccaggatgtcaacagtgatgcagtcaagaccctggatgcccatcatgcagggtcctctcctggtccccccagagccgcaccgccgccctcccaccccgtcccctccaccacccctggcaacctctcatctctcctccatttccaaaatgtcatcattctcatgtctctatcaaggacctgggaaaaatggggggagtgtaagtgaagctcagggcgtaactgcctggaggtactgccctgcacagacatgtcttccaggcaggacccccagggcaacagtcaaggacgggaagggaggacacgtgagcagttgatgtgaaacctggacgtcctacgcactgtgttcactctgaggaaggctctgacatagaaacagaagccctcagaactaccagcaattcacgaggtttactgtccatagtcgtagctaatttcctcattgatctggtgaaacgtatgcttggccctggttttttgttttttttcttttcttttctttttgagatggagtctcactgttgtcagccagggctggagtgcaatggcgcgatctcagctcactgcaacctctgcctcccgggttccagcaattctcctgtctcagcctcctgagtagctgagattacaggtgcccaccactgtgcctggctaatttttgtatttttagtagagatggagttttgccatgttggccaggctgttcttgaactcctgacctcaggtgatccacccacctcggcctcccaaagtgctgggattacaggcgtgagccccagcacccggcctgtgtggccctggcttttcactgagacactattttgtccagcatccctcctgctaagagtttccatcgtgtcccgtggaaggcggtggctgggaagtggctgcctggctattggatctgcagggctgtggccttattttggattgtttcttcgtctttctccctcaaccctccctcaccaaattctctcaaaatattctgctgagtgatgtagttcaaccacagagttcccttcctgttctaatttctggttttaaattagatcgactgtttcaggtttcattttattaacagaatgaggtaaaagagtcaccttgtttaagtctttaatttgtgggaaaatgtgttcacgtctaccccaaaaatctcagatggttgctgcttttctatttgtgtaactgaatcatggcttaattgattgttactggaaacgttttgggttatgacttttatgtgtctttgtcctgcatttgggttttttatcgtgtgtgtgttgttttggctgttgacactctggtttattgtgggaagaggatcctaggaatcgttttctggctcagtccagtctacgtttgctctccaggatctgaaggaggttctgaccattgcatgtacaagtccatacaagtcgggaaagcctgtgctgcgtgcaaccccccaaaatctgcactatgggcagctgctggccttgcctgggcttggagacattcttcactatagctgtccactcaggtccaggattcgagttccacgattgcctgcgtcctggctcacgggaggagtgggtcttaggggcacctggcatctggggtcccaggtgagtcacggcaaaagggaagtgtccggcaatggggaagaggaaggaggagtggagagaggcacggggacagtggggagctgggtgggggaggggacatggagcccctgaggacccaggaggagggtcccagtgaagagtccaccctgctgttgctgaagtttgtccaactgctgattagttttggccagataatttttttctagtgaatcaagattttaaatcagatttcctttggaggcctccgaataccaatcaaaaatggctgtcccctgggcctgatcaaccctattcccttggtaaagttagggcgtttagaaagacaggtgcaagaattaggattgtaaggaaagtgcctctgagaagaaggggtgtttcccattggaggagagtggggaggccgagagcttcccggtggaggagaggagggaggcccagagcttcccggtggaggagaggagggaggcccagagcttcccggtggaggagagcggggaggcccagagcttcccggtggaggagagcggggaggcccagagcttcccggtggaggagagcggggaggcccagagcttcccggtggaggagagcggggaggcccagagcttcccggtggaggagagcggggaggcccagagcttcccggtggaggagagcggggaggcccagagcttcccggtggaggagaggggggaggcccagagcttcccggtggaggagaggagggaggcccagagcttcccggtggaggagagcggggaggcccagagcttcccggtggaggagaggagggaggcccagagcttcccggtggaggagagcggggaggcccagagcttcccggtggaggagagcggggaggcccagagcttcccggtggaggagaggggggaggcccagagcttcccggtggaggagagcggggaggcccagagcttcccggtggaggagaggggggaggcccagagcttcccggtggaggagaggggggaggcccagagcttcccggtggaggagagcggggaggcccagagcttcccggtggaggagagcggggaggcccagagcttcccggtggaggagaggagggaggcccagagcttcccggtggaggagaggggggaggcccagagcttcccggtggaggagagcggggaggcccagagcttcccggtggaggagaggggggaggcccagagcttcccggtggaggagagcggggaggcccagagcttcccggtggaggagaggggggaggcccagagcttcccggtggaggagagcggggaggcccagagcttcccggtggaggagaggggggaggcccagagcttcccggtggaggagagcggggaggcccagagcttcccggtggaggagaggggggaggcccagagcttcccggtggaggagagcggggaggcccagagcttcccggtggaggagaggggggaggccaagcccacctagtgaggcctctgctcctcctgtcctgatggtcgcaggctccaaatacagaccctcactctgtgaccccagcaggcggaaaaccagaggagacgctctccctggatcacagccaagctctcaggacgcgaaattgagacagaaggagacgctcaaccactcccatctgtgaccccaacgtggagagtccgcgtgcgcgcccgcggtgagcactgcagacgcgctgtgtgtgagaccaggacgagcaggtgtggagggcaggagcctgtgtatctcagcctctcctgcggcaaacagcactttcaggcagcacaacacaaaacgcttgccacagacgacaagcaccaggggaacagaaggaggggcctgaatcggcagaggacgccaaacaagcgggacccaagctcagaacccagcctcaaaccaggactgaacagcggagggccccaggcagcctgagtcctgacctggtgcggactctgccccagctcagacacccgggtgcaggggcctttgcgggctcagggcgagccaagtggctgggtctgccgggaggggcagcacagtcgctgtccagcaagacctccctggggacagagaaacgaagcccacccacaagagaacaagcagaggcgtttactcagtgcttcctacagcagggagtcctccatcgtccctctgccccgctgaggcctaacgacaggcagcggaggggacgcttcaccatgggacagggacggctcccggctcccctgatcagaggtcaaggcctggggaagctggggcactccctagaagggggcatcctacgcgatcggccaggggccacattgggggttctctggctggctctgagttgaaagtggagacagaggttaaggaagctgggggtctctggacccgcgggcaggtagcagcagaggctgtggtcgccctcccgggctgcggtgtgcagtgtggtttgtgcgtcagcgtccggccatcacgtgcgggcatcgtccgttcctgtctcctgtccctgttccccggacttcaccctccactttctccctcctccctagtaacgatttaaaacgttgctgtaatttcaagcagaaactttattgccctcattagctctatttattatatattgttttgtaaattgttttccgtctttatgagtgtgcatactttccattttatgggacatccttccgcaacatcatttttatagaggcacaatattccattttatgaatatggggtttatgaatgagtcagatataatacttaggttgtttctaatttccattattataaacaacactgcaatgaacattcgtataactgtatctttgcataatccattagcggatctatcaatattccctcagaataaagtttcttgagcataatataatgaaaactgctaatggtttgagactttttaaggctttcattgcatattttcaaatctcctcctggaaaaaaaaattggaaatctcagccgcactacatgactctgccacttttctaagagccatactagtatcgggtttaaaagaaagtggaagaaaaagagtgggcattgctgtttactgctcaccaggactggcgaaatccagtccctccctgctgtctctgatcccttccgtccataacgcagcagcgaaggaggacgagcccttctgaggcttctcagccaagcacagtaaacccacatgctccttccgtgccccaggccctgtgtgccgcccacccacccctgcctggctctcctctcttcccccagcatcttgttcattctgtcccagcctcattggctgctactggacagcccaagctcagccctggttctttacactgagtcctggtgccctggagtctctccccacctcccctgccctcctccctcccttcatctgcccaaatgtgaggtctgcatgagcacaggtctggcagagaactctgctcactcgccacccagtattttggttcactttttctttcttagcatcttccaccaacaaattattgttggattagtttatttccgcgtctgttgtctgactctctcccagcctgcatggaacgtcagctccatggagcagcgcagtgtccatctggcatctggagccatgctgggctggaggaggtaccaggtccaagactcggaagatgagtgaaggaatgaatgaatgaatgaatgaatgaacgaaggggacttttgcccattgttctattagagtgttttccctttcttttgattttaagggccctctacttcaataataaactttttctggctgtgtgtcagagtcttttcttgtctgttatttgtcatgttattttggtaatttttatttgttatgccagagtcaagttcaccagaaatatttgctgttttctgcctttgatttaattcctaacacaaagtgaccacaacaggtgcatgtcactcatcatatcattttttctgattcctttgtttgtaatgaaaatcacgattccttctccctaggactacagagtgagggtgcactcggccttctgtggtttaattttatctgatattaatgtacctgatgtgtctctgggtctctcctgtgcacttgctggagcaaagcagattctatccacaaatacccctggggccccatctcatctccctcccggggaaggtcctctggcttctcctgtcttcagctcccactccctctcctgaggcaggtgcctccgcatgtccagggctgctatctgtgaccccatcctgtgtctgcaggtggcagccccctctttttttttaattaatttattttttttagtattgttatactttaagttttagggtacatgtgcacaatgtgcaggttagttacatatgtatacatgtgccatgctggtgcgctgcacccactaactcgtcatctagcattaggtatatctcccagtgctatccctcccccctgccccaccccacaacagtccccagagtgtgatgttccccttcctgtgtccatgtgttctcattgttcaattcccacctatgagtgagaataaggcatcctgtgtctccccggtgcctgcatcattctggagacccaaagccacagctccctggctgccccccgtagagctctttcctcttaatttacaaatcaaacagtcaacttaaaacacaatagctgacctgaagccaaagaatctgcccaccccaacgacaggagctctcagagcgatcctgtcccacctcacctcccaccatcccccacccccgctcccccccaacatcaggctcaaacactctcggggccacagacatggctgatttctattttccaggccctgcttgactcttttctcatgtccgtgacaactcttcatccctttcaaagatgtcccagccgctctgctctgtttaattaaacatcttgaaattaagtgttagcattttcaacacaaactacgtggtggtttccatgcaaactccgcaccgctttcccggggaagcttccagggggatctcccacagacaggttgtccaagagctccatttagctttgcacatggccaagggtgaatgcgtgctgcagggtcacagggcctggctgtgctgggtcagtgagtgcatgtggcggtggggggacgcaggggtgtgggggctgggctcacagctgtgctggggtcagagagtgcacggggtggggcgcaggagtgcaggggtgttggggctgggctgggctcacagctgtgctgaggtccacgagtgcacggagtgaggtgcagggtgtcggggctggcctcacagctgtgctggggttgggaagtgcacgggggtgggtggtgggcgcagggctgccagggctgggctcacagctgtgctggggtcagcaagtgcatggggggggcgggggggtgcacagtggggggtgcaggagtgcaggagtgtcggggctgggctcactggaacacacgagatgcttgctggtgaacaaaagctgcagagtcacagccccaatcaaggcttcatcccctaatttctcctggccaagctttctgtgaaccccgtgatggaatcccttgcaggaagctcctcaaatgcttttgacaaggcttcttaggaagggcggaaggacagccttggccccgtctacaagaccggttcgttttccataaaaaggaactcagagataatgctaaatatttccaaacaggcaaatttgggggcattcttcatccatctgtccaacaaattaatgaacaaatgactcccatttgaagcattttgtgtgtcttcaagtgaaattactagaacactctaagtcagaaatgctcaccaacagcatgcgtcacccagctcccgcccaggtttaaccaaatatggcagcgtgagcctagtcaatggcaacagatctcagtcagtaacgaacttgctggatgacagagaaggtaagaggaatagaagtcacaaccaactccctgcaacagcacggacaccccagcaccagagatgccggcgcctgtctgggtgcttggagcagcagccgacaccatccaagggcccaggacccaggacccaggacccagacagcacgctgtggctctcgttctgcatgtggtcactaattgtgatgatttctcacatctcacaaagcgatgacctacgtaaggaactcttgagcctacattaaatgaagtccttcacagaccagccaacagcaggcaagatttggagtccaagtttgggagtcaggccaaggctctcaccctatggggcctggaagacttgcagagacccaacgatggggtgtgcaggcacctggaaagggggttcagtgtcccgtcatcaagggttcccacgcagggcgcagggtccaggttcacccccaatcgggtccccttcctgcagaagaaagaccctcacctggctctgctgcccccaggagaggcacttcctgttctgtggatgtgaagaagttggcttgggcaaagccactggctttttgaactgccccaagtttcagcatcaggaccatgagcttgagggaggtgtgaggttggttgaggttccaccctgcagagcagagaggcatgttcatgtcccattcacaactgcaccctcaaagggagcacagactcagcaggtgagtctccagggacccagagtcctgaaagcaagagtcaagacttgaaggttgcttgttgctgcagcaaagctgagtggtgtcaacattaaccctaacctccaaccccaaccctaaccagaacccctaatcctaacctctaaccccagccctaaccctaaccctaatcctaacctctaaccctaacttttaccctaacccctgatcctaacctgtaatcctagccctaaccctaacccctaatcctaaccccaacacttaccctaacccctaatcctaacctctaaccccaacttgtaccctaaccactaatcctaacctctaaccccagccctaaccctaacccctaatcctaacctctaaccccagccataaccctaatccaaaccccaaggtcaagtctgtggtggagccagcgtccccggggaggggacaagccaagtacctcccatgccttcagcagggacagaagacttcaggaaagtccccgggcaaacaggggccccacaggcacctttgtcacatggccagctgggtgtccttggaactggcctcttgtgtgcaccatgcagggcaggtgtgcggctcattcaggcttcttcagcgactatagacaggtctcagacccccactactagctttgaaaacctgtaagaaaaacggtagaccaagacagaaactaccaggctagatgcaatttagctttccttcttgctctaaaattctgtctttacaaagaaaagtacctacattcatggtttccactcttaagtttcttattttcttccagcgctttctgaggtctcaggtgaatatattctaacaaatgcattatttgaggagatcacagtgaagtccacctatataacgtttattttaaattcaataaatgttggatcttgggtaaactttttacttgtgcacagcttccacattctcgtcatggttctgacgaggccaacgtgtaatccatcagtccagtgttactacgatggagctggggaaaacactatccccaggcccgctagttttctatgaggagtgttcattctcactctcacaaacctgcagggcggctgcagttctgctcctccagctctgggcttttctgggcagctcggttgcaaagctgaaagctgaactggagtctggactgtgaggtgtgatgggaagtccaggctgaagggcggcagctgtccaggccagatcatggcgcgtgtgtccagatccaggatctacggggctacggctcacaccacgccctctagcactcgactagcagatgcatgaccagacccagatttcccaagagggaaaatgtatcccatgcagcagaaggaggaggggctcgatacttgctgagtgacaattacatctactgtttggatcacgcatctacacaccaaagaatcaggtccaaaaacacctgccatggaagctaatgtgaaggaagccgtcggctgctgggaacccaccctacatcaaaccccacctgtgcctaatggtacctgactctccatggaggtgaaggcaccgacgttttagaacttgcccaaatgtgtggacgtcaccaggagttaacccacaccaaagctgtgatgctttgtcacagacacagggttattaaaaataaaatgtctatgaaaattgaaaaatccataaaaatattaaacttaaaaaattttgggttagaagtaaaatatacatatgtgatttaccatctaaaaatgtgaaacttttatcattgtcagtgataatcaaatacttccattttccaccatgcatagtaattttgagatcgttattaaaaattgtttaagtttggccaggcgcagtggctcacacctgtaatcccagcactttgggaagccaaggcgggctgatcacctaaggtcaggagttcgagaccagcctggccaacatggcgaaacccccatgtctactaaaaatacaaaaattagccaggcgtggtggcacatgcctataatcctagctactcaggaggctgagacagaagaatcacttgaacccaggaggcaggggttgcagtgagccaagatcatgccactgcactccagcctgggcaatagagggagactccgtctcaaaaaaataataataaaaataaaaactgtttaagttctattggtagtgtca

SEQ ID NO: 61430 - DNA, 534 bp, Homo Sapiens
  misc_feature (190)..(190): n is a, c, g, or t
  misc_feature (274)..(274): n is a, c, g, or t
  misc_feature (378)..(378): n is a, c, g, or t
  misc_feature (381)..(381): n is a, c, g, or t
  misc_feature (398)..(398): n is a, c, g, or t
  misc_feature (405)..(405): n is a, c, g, or t
  misc_feature (448)..(448): n is a, c, g, or t
  misc_feature (486)..(486): n is a, c, g, or t
  misc_feature (498)..(498): n is a, c, g, or t
  misc_feature (516)..(517): n is a, c, g, or t
cacagacaaggttttgcccaagctggtctcaaactcctggactcaagcaatcttcttgcctcagcatcccaaaatgctgggattacaggagtgaagccaccgcacccggcttgccaaatcatttctatcagcactctcaccatagcttccctgctcaatggcctatggtatttcccatggtctgacacanaaacttccaattctgcctgataagactgatccaaccatatttttgacatcaatctaccacacaccctgtgttctcactgggcanagaacatcaatatgtataagagaacccatacaaatataatttgttgtttttaagttatagaaatgtcatgttgttttcttttctcttttctttattttcagacngantcttgctctgtccccangctggantgcaatggcgcaatcttgggtcactgcaacctcccgcccccangttcaagccattctcccgcctcaaaaccccaattggtnggaataaaagcnccggtccttataaagggnnaattttgtttttttgtt

SEQ ID NO: 61431 - DNA, 361 bp, Homo Sapiens
ttttttttttttttttttttccaattaagagggtaactcatggtttttatttggtaatcagaagaacatacaggtacttatgcattactagatgctgggggaaaattatacattgaaggactgccaggctcatctgtgcaataaagatttacaaaaaacacatcattaatttttctgagaacagctcagaatactctgttttacatgaatccttatgatttaatcttgtatttggagatatgatgctatggcatttggataacattggttaagcagcatcttagagaacagaacactcttcctcagaatggatggccattcttttaccctgtgatgtacaaatgcaaattacaacctgcat

SEQ ID NO: 61432 - DNA, 474 bp, Homo Sapiens
tttaactccagttacaaaaattacagctttaaaagtttcactgaaattcccataaaactgcaggaattcaactgccaactggatttgctgctgcaggagataatccactttggttcagaggtggccccttttgcttgaaaggaaaccaggaccttcctgaaactgtcatgggctatctaaaccacaccagcccttagaactcacactcccaatttctaaattcccaagtgtctcccttcaaaaacgagaaaggggttacctccatgtatttaaagaggtcgattaattttatctcccgaggtctaagtaaacaaacaaacaaacaaacaaaaaccctggcaatttgctttaaaacatacagagtactttcccaaggagttgacaatgtggtgagaaacaatcagaagccagaactcaaaagaacagaggggcaagttgttgcgttactagagtaggttggtagccaagttttcg

SEQ ID NO: 61433 - DNA, 3404 bp, Homo Sapiens
ggttttttctaaaggaccaaggctctcaataagcttccctagcccctggcaagccggctaattgcatgagggagttgacttgtacttcccagccaccaataataccgtcaattgaggagcccatggtcagctgtgacggctggggagctacggtggctccggaggcatccggaaagggcagaaatccacctgtagctctgggacctcgagggaactctctgcttgatgctgtgccgtggcatccccaaaccccatatgttgtcatctctggtccacaggtgtcacaggtggcctcccacacgccccctcctatgccttcaggcaaatggagaagctgtggcaatcgtccccgttctgtggcagatatatcgtgaggaacgcaggcgccacgctcactcgtgggagagaccaggccccaccgtggatctacacatccagactccctggcacctcgacgctacccaaatgctttcctcatcaaggcctcctcgctcctgagacctggccctgccacacgctccaagaccaccgacccctctgcccccgtcctcccttcctgggcacacggccaccccgacatccctgagcaggcaaggagctcttgcatttgctgtctcctctgctcaccaggatggcagacactgcttcttctcagggaggccctggcgcggggtcccctccccaccttctctggagctggtcctcatcccgatgggaaactgttttgcctggcgctgctgccccactgcacagagcgcacaaggtgtggggggaggggtgggcacagacactcacagccccacctagcccaaggaaggtgcatgtcaacctgtcagatgacagatggccactttgacctggggctggacgtcgctggagcccccagccagatgtggcctcagtcacaggcctggggcttgtgtggctcagggctgccggggagaccccaagaggacatgggcagctggagctcaggactagcggagcggccagacgtcctgcccatgcaggctgcatctgtgccctggctgcccacccaccaacgtcctgcccacgctcaccagggccttgcttggccagatgtccagtaggctttgggcggggccatccagccttggcaaggcccatggactgtcacagccctccccaccccacatccaggacaaggtcatctagcgccacaccaggtggatggttcagaaaggctgggttctccaagctgcacaccagaggctgcacagagctgaagtccggcgagtcccaaggctcccagggcggcccgctgccccacaccctccggcaaacacgaaggcgccaccctcggcacccagcagcatctgcctcagcccctgcagagggcggcgctggtgtgggctgcagagagtatggcccgcaggcagccgccatgggcctgcccgagctgagtggctttcagcagaccaggcggccactcaggcctgcgtggactggatgtgtccccagaatccacatgctgaaaccctcactccagtgtgatggtgttaggagagggggcctttgggggtgactgggtcaggagggtggagccctcggaagaggaccagcaccctcaggggaagagacacgggcgctgggttcccttctctgcttcgtgccatgtggggacatgggaaggcatcgtctgcaagccaggaagccggccctcacagaaccgagtctgcccgctccttgatcttgacctctggcttccagaactgtgagaaataaatttctgttgtttaaggcaccaagtcaaagttactctgttgtagttgcccaagtgagacagaacctcatgctacccagacaagtggagagagtcagcccccaccccacgggagggtggggatgggagcgagacagcgagagccttattctgagagggcgtcaggaggagggcaggaaggtgcccaggtgagtcaatttcccggcttggacacgcccctcttccctggtctcacacaggaaggtgcccaggtgagtccagttcccggctcggacacgcccctcttccctggtctctctcgggaaggtgcccaggtgagtccagttcccggctcggacacgcccctcttccctggtctcgcacgggaagtcgcccaggtgagtccagttcccggctcggacacgcccctcttccctggtctcgcacgggaagtcgcccaggtgagtccagttcccggctcggacacgcccctcttccctggtctcgtgcgggaagttgcccaggtgagtccagttcctggctcggacacgcccctcttccctggtctctcacagatcctcccactggttgaattgaagagagcatgatgtgtccatccctgcggctcggacgagctggccccatcctggagaccagccttttgcttaatcacacttcctggcatcccacctacagagatgaaatccatttaggtcaattgctctcacccaggggttttgttcccaagggagcatctagagagtctggagacagttttggtcgtcacagcagaggggcagatggtatggcatccagtgggtggaggccaggggggtgggggggcaccaagcaccctgcagggcacagggcagcccccacagagcacagcgtcatccagccccaatgccagtcatgctgacattaagaaaacatggtgtaaggccagtcacggtggctcacacctgtaatcccagcactttgggaggctgaggtgggcgaatcacaaggtcaggagttcgagaccagcctggccaacataatgaaaccccatctctactaaaaatacaataaattagctgggcatggtggtgggcgcctgtaatcccagctactcgggagactgaggcagaagaatcgcttgaacccagaaggcggaagttgcagtgagccgagatcgcgccactgcacagccagggcgacggtgcaagactccgtctcaaaaaaaaaagaaaacatggtgtaagttaacaatgtcctttcttaaaatgcaaataggacgggtgaggtagctcacacctgtaatcccagcacttcgggaggtcaaggtaggtggatcacctaaggtcaggagttgaagaccagcctggccaacatggcaaaaacctgtctctactaaaaatacaaaaattagccgggcgtggtggtgggcacctattatcccagctactcgggaggccaaggcaggaagatggcttgaaccctgggagcggagattgcagtgagctgagatcgtgccattgcactccagcctggcgacaagagcgagactccgtctcaaaaaaaataaaaataaaaaaaaataaaagcaaatagttctggtatgttagccattcacattttagcatgaaacagcataaataaatggacttcctcccaaaaaaaaaaaaaaaaaaaaaaaaaa

SEQ ID NO: 61434 - DNA, 462 bp, Homo Sapiens
tttgtccttatatcctttattcaacttctctaaatcttacatggccaccataaccaagaatagtatcggtaatctacagatattcaaacctcaccaatataaccaatgtcctttttctggtacaggagccggttgagtgtcatatattacattcagttgtcaagtatctttagtctcctttaatctgtgacagttccttagtctctttgtctttcatgaccttaacagtttcgagaatatctgactccttaaaatacacgcggtgataggtgactacgggagctccagctcaccgtggatttagcaaaataccaagtgatgacaagaagttgcttttaaatgacccatcttgtatttcatcgtcaataaaaccacacttagttacccaaagactgagaagggaaaaattctatgtaaattattgatcatctttttttgtggagagaaaaaaaactgacaaaa

SEQ ID NO: 61435 - DNA, 590 bp, Homo Sapiens
ctttatctttgatatttcctatttttaaaaaaacttatctgtgaattgatttaatgattgtgtatataaatctgccaaaattatttcaatggatgaaacaatgaatcagtacctatttatatgctgccaaggcacacctataattttttaaatgatgataagagtagcctaaagcagtgagcagacatctcagaaatttcagtgtaagtggttttaacttgcaacatgatgccaaaaaacttagaacagggagctgccatcttgcatccccgtgtgtgtgcacctaatctcagctggttccccccagaccccctgagcaccaaccctagtcccccgcgcagccccttatccgctgcgacaagatgaaagaaacaatcatgaaccaggaaaaactcgccaaactgcaggcaaaagtgcccattggtggaactgctcacagaaagaaggtggttcacagaacagccacagcaaatgataaaaaacgtcagttctccttaaagaagttagaaatctctggcattgaagaggtgaatatgtttacaaaccaagcaacagtgatccgttgacctgcaggtgacctcgaggggggg

SEQ ID NO: 61436 - DNA, 128978 bp, Homo Sapiens
gatcctacttcgcactcacaaatatggccataataaaaaaggaaaaaaatcaacaacatccttgttggcaaggatgtggaaaaattagaatcctcatacattgctggtgggatgtaaactggtacagccaccagtacctgactacagccataccaccacgaacatgtccaatcttgtctaaactttgatgtggaaaaactgatacggaaagtagtttgatcagccgggcacagtggctcacgtctgcaatctcagaactttggggagctgaggggggtggatcacctgaggttgggagatgaagaccagcctggccaacatggcaaaacctgtctctactaaaaatacaaatttttgtatttttagtagagccgggtgtggtggctcacacctgtaatcgcagctgctcgtgaggctgaggcaggagagtcatttgaacccaggaggcggagattgcagtgaaccaagatcacatcactgcactccagcctgggtgacagagcgagactccatctcaaaaaaaaaaaaaaaaagaaaaagaaaagaaaatagtttgatggttcctcgaaaagttaaacacagaataaccagcaatgccactcctaggtatatactcaaaagaaatgaaaacaggtatcaaacaaaaacctgtacatgaatattcatagtagcattattcataatagccaaaaggtggaaacaactcaaatgtccaccaactgatgactagataaacaaaatatggtacatccatacacaggaatattattcagccataaaaagaaatgctgatacatgctacaacttagatgaaccttcaaaacatcatgcttagtagaagaagccagacacaaaaggttgcatatagtatgattccatttacataaaatgtctggaataggcatatccatagaaatacaaagagatcagtatttacttggaacacttgggacaataacaaataaaataataaaaattttaaaaaagagtccaggcgcagtggctcacgcctgtaatcccagcactttgggaggccaaggtgggtggatcataaggtcaggagatcgagaccgtggtgaaaccccgtctctactaaaaatacaaaaaattagccgggcacgctggcgggcgcctgtagtcccagctactcgggaggctgaggcaggagaatggcgtgaacctgggaggcggagcttgcagtgagccgagatcatgccactgcactccagcctggctgacagagcgagactccgtctcaaaataataataacaataataataataataataataataattattattattattatttaaaaaagaaggagatcagaggttgccagagggtgaggagaaaggaaaatgaagagtggctgccaacaggtactaggtttctcccatctgagtactaaccagactcaaccctgcttagcttctgagatcagacaagattgcacatgttcagggtggtatggctgtagacaggtaccagcgtttctttttggggtgatgaagtgttctggaattagatagcggtgatggttacacaaccttgtgaatatacagacatgagccacataatgatgtttcagtcaacagaccgcatatatgacagtggtcctataacacagtggtccccaacctttttggcaccagggactggtttcatggaagacaatttttccatggactgggggtgatggggggatggtttcaggatgaaactgttccacctcagatcatcaggcattagttagattcttggaaggagtgcgcaacctagatccctagcatgtgcagttcacaatagggttcacactcctattagaatctaatgtcaccactgatctgacaagaggcagagctcagatggtaatgtttgctcacctgctgctcacctcctgctgtgctactgggttcctaactggccacagccctggggtttggggatccccgctataagattataataccatatttttactgtaccttttctatgtttagatacactaatacttatcattgtgttaaagttgcctatagtatttagtacagttagatgctgtacaggtttgtagcctgagatcagtaggttacaccatatagcctagatatgtagtaggctgtcccgtctaggtttgtgtaattatactctatgatgtttgcatgacgcatttctcagaacctatccttgttgttaagtgacgcacaggtactaacaactactgaactgtatgctgtaaaatgatgaatttcatgatatgtgaattgtatctcaatagaaaagagcatttataaagtttttgttgctaaatttatttactttcggtaaattttcttttaaaagatgtctatgttttactgtcttcgtggtgctgggacataactgacatctgaagccttgaatgcctctctttgcaaactcatttgttactactcagttaccatctcacctccaatacccaactgcataccaaacctctagccattactagaacacatactctgagctctgccatactttagcgcctgcacacatgctgtttcttctgctcagaaacttttgtgccttctgtccatcccatccaagcctgtttttcaatgcccaacacaaatgtcactggtaccctgaaacttcaactcctccttgccccatctcagaaaatgtaactttctgtattcttctctctgtatattcctctaaagtggtatttcttatactataccataatgacctggtcccatatttgtcctcttcttccctcttcatcccagactgggaccacaaggaggtagaactttttctgtttttttttttttttgagacagagtcttgctctgtcgccaggctggagtgcaatggcacgatctcggctcactgcaacctctgcctcccgggttcaagtgattctcctacctcagcctccccagtagctgggatttcaggcgcacatcaccatgcccagctaatttttgtatttttagtagagacgggatttcaccatgttgaccgggatggtctcgatctcttgtcctcgtgatccgcccgtctcagcctcccaaagtgttgggattacggccatgagccactgcgcccggccggaggtacaactttcttagtcaatcttgagcaccagtgtagtgcttagaatcgggtagtgagagaagctaacatttactgaatgcctaagaagtccagggcacataacagtcttcacaaccatcctgtgaagtacgtattaccctatccattttacagataaagaaacttgagtttcaagaaaggtatacctaaggtcattcaacttgttaaatgatggaatggaggagttgagaccagattggacttctgcctcttttttttttttttttttttttgagacaggctggagtgcagtggtgtgatctcagctcactgcaagctctgcctcccaggttcacgccattctcctgcctcagcctcccaagtagctgggactacaggcgcctgccaccacgcccggctaattttttctacttttagtagagacggggtttcaccgtgttagccaggatggtctcaatctcctgacctcgtgatctgcccacctcggcctcccaaagtgctgggattacaggcgtgagcgaccgcgcccagccgaacttctgcctcttaaatccagggttctccctgtcagtacagtgaggtggtaactagcaaaagctatgagatatgactgcctgggtacatatcccagctctttcacttatctttgtggctttacgcaaattacttaacctctttatgattgtttcttcatttgtaaaaggaagataataacagtgcctatatatagggtttttatgaagaataaatgagatagtatatataaagcacttagaacagtatctggcacatactaggtgctcaataaatgttagcgatgacatttattactgtcccacattgagctggtgtttgttaaacactggatgactggataaaatgtacatctttcatgcagagattgctcgattatccatttcactgattcaggatcagagtctcttaagaatccagagaggggatgttgaagccctaagaagtaaaaacactaaaatgataacattttgaccttttgaaaactctttgaagtggcaatggccacaaaattgagcggaaaccaaacatattcagccccatttccagataaattggatttgctaaaccactcagaataacaagagcaagaattagatgttcagctaagctctagcttctgatcctagatggtggcaataacaacgatagtattaatgataatagcagaaactcttaatatgtgtgaggcattcttctaaatgctttacatatattaatttaatgttcatcggagcagattctcctactgtatccaagagatcagaaattcagagcaaaaagcagattgctgcctgatagcagatccactctaggaatggggagattttctcataaatctaatgactggtgaaagtgacaagaggttagtccactcagtgttggaaaggacaagatcctagaaagtggaaatgctccactattgctttagggggaacagcctggctacaactgggcagactttctattactaacatcaggataatagggaagctcctgccaatgctgcatagaactaagaacacttagcagtgatggctgacttccaactgagccattaaggtaagtgtagaagaaagctccaggtagaaatatctttgggaactcagagaacacactgagtgtttgaagctggtacttaatctattattgaactcagagtttgccattctggggccaatttgagtccacttatgacacctcccacagcactgctcatttctgttaactgggcttcacagagggtgagaagggcagcaatcagatcatataattgggcctcattgtaataaaatgttgatttctgttgtccttggacttccttccagccacaatcactctatgatcttgtctgagattctttttcctttctctctccattttgctgactgtaatggaataatagcagaagctctcaatctgtatgaggaatatatatgaagaatgtgtaacattcactgtgtttcctaatagatgaattatctaaaggacacctcttaagaagagatgagatggagccaactgtcagaaaaaaaaatgggtgaagaaagtttcaaggagaagactccacagagcagaatgggaaagatggccaggagaaaagtgagataataaaaggaaaagcagtccctgacacagaaggtactcaacagctatttgctgactgaaagaataaacactaataagagaatgaaataccaggattataaagagggaacaaagatattttcccatctactttgttgttaccccacccaggatatatttaggttggtgcaaaagtaattgcggtttttgaatcgttaatagattaacatctaatttatgtattgtttacatacatacaaatacaaactacaaccatatatgatacatttaaagtaatacgctaggcacagtggtgcatatctatagtcccagctgaggtgggaagactgcttgagcataggagttcaagtccccttgggcaacatagcaagaccctgtctctaaacaaagaaaacaaaaaaagtgaagtaattaatgccaaacattgcaatcagggtttggtgcacttgaaatacacaaatgagtgtttttacatgctgaagacacagcaaccaacaactggggctaaagtgctgcattcctaaagttaacccacagagcctatcatgccatgccaaagttcactgctccggctccaaaccggggactttcctttcctatttcctctccctaacagcttagagctactggactccatccttgaactcctctgtttactaaaaatgttctttataagctatgaaatctggatttgaggtctggtttcttacttcaactttgcaactcatttcccaccccgagttcacacaatctcaaaatgttcatgaattttatggctagacctaaagcttctttgtgccttcctgccagcctgcctttgttttggtaccttctagcctatcctcactcacttgagtttttactctaattttctgtccagtcttcccaccactagtcccctatcaaattgcttgctggacatttctatatacatagcttgcttgtccttacgtcaaattcaaaactaccaagagcaaatccaatgtgtgttcccacatcagctcccctttctcacctccctggtatggttactgaccaattagaatgaatgtccaaccactcagaatgccacaggcaataggccaaatcagtgtactgggtccaatgtcagccctgtccataatccttctacccagctaaacttggaggaattgtctgttctcacagtctcccttcttcatctcttattccttccataatccatacatttttagccctccttccttatcataaaaattcctcctgacaaggtcaccaatggccttcttgttgctaaaaccaattaattctttttagcttttatttcacttgatcatccttggtaacatttaacaatgctgaccattccctcctccctgaaacactctccttagcttctctgacattatactcttctggttgcaatccagtcacctctggtggtgccttctcagcctcccccaaacctgcttttcctcaggtttcttatctcagtgaaagtcaccaccatcccctaagctcctaaaccagaaaccgaattccttattcttcttatttgcttctaaccttccttcagtcatggaatcctgcttattcttagtttgcttctcttcactgcctacattttttttttttttttttgagatggagtctcgctctgtcgcccaggctggagtgcagtggcatgatctcagctcacggcaacctccgcctccctggttcaagtgattcgtctgtctcagcctcccgagtagctgggactacaggcacgtgccaccaggcccggctaatttttgtatttttagtagagacagggtttcaccatattggccaggctggtctcaaactcctgacctcgtgatccgcccgcctcggcctcccaaagtgctgggattacagacgtgagccactgtgaccagccttcactgcctacatttttaaagcacttaaatatgtgctaggcaggtgtgttctaagtgatttatcctcacaataagcccataaggtaaattttattatctccaattttcagattaggtaacagaggcaaagagtggttaaataacttgcataaagtcacataactactaagtggcagagcaggattcaaacccaggtggcctgactcaattctggatccaggtcactatcctatctcactgaaatctctgcaacagcctccttggtttccagccttccatcatggatggcttccctgtagccacagtgatctttgttaaaacagaagtctgactcttgctactcttttgcatgaaaatctttactggctctttattgccttcagaataaagtctacactcaatatgacattcagggacctccataacctagccagaaagtgtatacttctttggcttcatgtttttggtttttggccccattttaaccacgaccctaaaagctccactagcacaatgatagcctatacttccaggtttctgcactgtttgatgtgccaagaacactctttcccaccttcacattcgacgacttctgataagccttttctgatttcctaagaccagggtatatgcctctcctgtgagctcccacagctcccagttctaattctcactgtagcatttatttcactgtgttatatgattctactacccatctactaatattaatatctgctttatcacaagattgtgagcttcctgagaatgggaactgtgtaggattcactgttgtatcctcagtactcactgctgcctacctggtgcacggtaggcaatattcatttaatgaataaaactttattgtctatatcacactctttaacacttacttatataatgccctatattgattttattttcatatgtgttagcctgatctttataaccagaatgtcagtttcttgaaagatagcaattatacccagtacttcttttataaatttatttactcttaggctgggtgcagtggctcacgcctataatcgccaaattttgggaggctgaggcaggaggatcacttgagtcgaggagtttgaggtcagcctgggtatagtgagacctcatctctataaaaaataagcaagattagctgggcatggtggcatgcacctgtggtcccagctattcaggagagctgaggtgggacggcttgagctccagagcctgaggctacagtaagccatgatcatgccactccagcctcggtgacaaagcgagatcctgtctcataaaagaaaaaaaaattatctttagagatggggtctcactctgtcccccaggatggagtgcagtgtcatgatcatagctcactgcagccttgaactcttgggctcaagagatcctcccacctcagcctcccaagtagcggggactacaggtctgtgctgccatgcccagctgattcttttatttgcagagatgggggtctcactatgttgcccaggctggtcttgaacttctgacctcaagcaatactcctgcctcagcctcccaaaatgttggaattataggcaaaacccaccatgcctggcctatacctagtacttacaagttaggaggtactcacaaaaattcctgataacagctaacatttattcagggatcaatgaatgtcaacaatccaatgattttggtaatttttctctctctctctgcctccctccatatgaggaaactgagccatagtttagtagcttgcctaagatgacatagctaggaagcaacagagctgggatttgaatcctcatgttggtgcctgcattcttaaccactatgataacaggctaagaaagcttaaaattatagatgctaagtaacttacctaagatctttttaaacatttaaaaagttttttttttcctttgttagtaggcaaggaactaagatcatagtgcagtgctaagactagaacccaagtattttcaaaggctacgctcggctgggcgtggtggctcatgcctataataccagcactttgggaggctgaggtgggtggatcacgaggtcaggagtttgagatcagcctggccaacatggtgaaaccccatctctactaaaaatacaaaaaatagctgggcgtggtggcgggtgcctgtaatcccagttattcgggaggctgaggcaagagaatctcgcttgaacctgggaggcggaggttgcagtgagccaagatcgcaccactgcactccagtctgggcgacagagcgagactctgtctcaaaaacaaaaacaaaaacaaaaaaaaaccccaaagcctacgctcataaattatttggtatactgcttctcctactttaaaagtcagtactaagctcatactgggtgttaatacattttaaaactgcaaatccagtttactgaaattggagaatatcagatccccttccaagagaggcataattgtagcttactgggtgaattcaccttttatattgacagtctagccttatgaaccaattaagtttgtagtttctgcattcttcctgtgacactgaagactgttttcatcaatgtgaaaaccatgttatctaagctaaatcaaaatccactctcattcagaatttattcttccttttatttctcaacaccagtgacatgttcccaagttctctgcctttgtggctccttagtttccagtgtggaatgtcttatttctgaaagcaacctgtgattgacaagccttcttggctattctgtagtttaccctaaaaaaaatctgttctctctgtcggctcattagactgcttttccttacatggtactctgcttttcccctttatttcaagcatttattaaaactaaactatgtaccaagcatacacaaaatggatataacctaactctttgaaggctacacttcaaagaaacagccttggtgtttacatattttgactagaatattatttccctaacaagctgcataaaaccattcctgctcagtttgtaattatacaccaaaatattgagcacaatttcagtagctacttctacagcacatcatataaagtgaattgctggagccaactcattaggtcttattccaaagatttttaccaacactttggccctcttttgctgacaaaaaaggattcttaagccttttaacagctttataacttccttattagagttcactcactaacatatcctgttaacaaaatgaagtgcccatccttcttgggaaacactctggagaatatttcctgatttcatcgcacagctttgtctctggattagtaatcatctaatacgaaactgaggatatgagtattatgtttcacaatgttgtcttcaaggatataaacaactcaaaatttaagtatttgagtagcactgtatcacattattattgccgtgatattttcagaagaaatctgaagtctgcgctaactacaggccataaaatatggccatcttgccccaataaatggagcaaagttcaaatctggatcatcagaaaaagacaagaggcacatttctaaaccaaatctgattgccttgaggaaggaaggtactgaacctgttagagtacatctctgaaggactgagaatcaagtccttcattccctcgccccctaaaaaaatccaatcaatcatgctgataaatgtcttagttacaggggagaaaaaatagacatgactaagctgaaaaaaatcttctggctttgtatcttttctaggcagtgctgttcctgataagacacatgacacaaaatatggttttgctgagtatcaaggtaagttagggaaaatagtattttttaaataggaaaattagatgacaacagcaacaggtaaagaagccttgggcttctgaggtagaaatactagcatccctacataggcatggtagataatctgaaactagtacaagtgctggcctgttatagcctgtctctaccgtaatcagagggaaaagtattacaatccagcaaaagtagcccttcaaaatctaaggaggagcatttcatcagatatcaataaatgaaccctcgctgcatacaaaggcaatacattacgtgctgagtgaccaacttcaaagaaccttctgctgttctgaaatttaaaactactctcatttcctcaagcctgtattttatgtaatgaaacaaaatgcacatcatatgtctcctgctgcactgtaagagtaaacataggacccctcccaccaaaaattgtgcaaagagcccttccccttcagctttttgctatagaaatatcctactacttccctgaaaatagtatatgctttctttggcaagtggaatatcaccctgttactctctcccttactctgcttcactttttttcgcataacgcttaagattacctaatattttacatgtttatcatgtctctcccaattagaatataagcttcatgagggcagagatttcaaatattttgttcacagatgtattcccagtatctacaactatatttagcatgtagcagattctcaaaaatatttgtaaaattaataaaatttaaaaatccctattatattggaattgttaaattaaaaaaaaattttggccaggcgcagtggctcacacctataatcccagcaccttaggaggccaagacaggcggattacgaggtcaggagatcgagaccatcctggctaacacagtgaaaccccgtctctactaaacaaaatacaaaaaattagccgggcgtggtggcgggcgcctgtagtcccagctactcgggaggctgaggcagaatggcgtgaacccaggaggcggagcttgcagcgagccgagatggcgccactgcattccagcctgggcaacagagcaagactctgtctcaaaaaaaataaattttttttttaagacagggtctctctttgttgcccaagctggagtgcagtggcatgatcacaggtcactgcagcctccaactcctgaactcaaatgatcctcccacctcagtaggtgggactacagatgagtgccaccacacctacctatttttttttttttgtagagatgagggtcttattatgttgcccaggctggtctcaaactcctgggctcatcctcccaccttggcctcccaagtgctgggatttacaagtgtgagccactatacctggccaaattttaaaatgctaccgtatctgtgtatgaatatgtgtgaataaatttacagactctagggtgtaattcacagggtagaccaagtcaagagtcagaggatcagaagcttgggtggggagataggagagtgattgcaaaaacaaagcaatctatcttattaaatggacgaaagggatcaaacattatcagtaaactattttaaagagtgaattaaatgtatctctctatcctttctatgagtgtagtgaattcagattcacctcagattagttgaattgacactagttttcttccctgataaagcttttaaaatttatttagtaaagtggccaggcatggtggctcacacctgtaatcccagaactttgggaggccaaggtgggtggatcacctgaggtcaggagtttgagaccagcctggccaacatggtgaaaccccatctctactaaaaaaatacaaaaaaaaatttagccaggcgtggtggcgcacacctttaatcccagctacttgggaggctgaggcaggagaattgcttgaacctgggaggtggaggttgcagtaagccgagatggtgccactgcactccagcctgggagacagagactctgtcccccccacccaaaaaaaaattagttgttttcctccttaaattacagcctgcaagattgaaacagagtttccccatttctattttgggatctgactgagtcacaaggtagtcttgacgaatcactctgctctatctctcagtttactgaggctgcctgggaacttgagctgtcagccaaacaggaagaagggcccttctgcctactccaaaaggcctcagtcaaatggatatggtgagatttaatgatggatataaattacagcaaatggatttcctatagggtgagggaaaaaaaaaaaagcaaacattttacttaaattcctctatacaatttagggctggcagaaagggtagactattacaatgtagctgagcaaatttttccatgtttgcataacatgtgttttcaactaaagatactccttctatagtcctactatatacaacaccccaaaaaacctcaaatgtaagaaaaagcaatgtgacagatttgaccctggccaagttacactgtttttttttttttttttttttttttttttttttaagtgtcagtgttcataaaggccctttttctttttcaaggatgggtataaagtgttactcggccgaacgcggtggctcacacctgtaattccaacactttgggaggccgaggcaggtggattacgaggtcaggagttcaagaccagtctggccaacacagtgaaacccccgtctctattaaaaatacaaaaaattagctgggttgtggtggtgtgcccctgtcacaaggtagtcttgacgaatcactctgctctctctctcagtttactgaggctgcctgggagctgtcagccaaacaggaagaagggcccttctgcctaactccaaaaggcctaagtcaaatggatatggtgagatttaatgatggatataaattacagcaaatggatttcctatagagtgagggaaaaaaaaaatccagctactccggagactgaggcagaattgcgagaacccggcaggtggttgcagtgagccgagattgtgccattgcactccagcccgggcgacagtgtgaaactctgtctcaaaaagaaaagaaaagaaaaaaaaaaaaactattactccactccccaccagaaactcttattttttcccccctatgtggtcatgaattcctcctgggtgcatagctccctaagttgttctgtgttttagtgcttataatttcccacatcccatgatgccccttgatagaattattttttctgtactcacacaaatggaaacagaagagatgaaaaaccctggggatgcggcctcgcaggtctcaaactgatcggctgctaagcacaacctgcatatctcttggctgagttcctttcttggctcagttagattttgcatgacctaggaggcttaggacccagggggcgcctttcagctgaaaaacagctcgcgctgcagcaagctagctgggaagctcccagttctaaagagaggctgtttaccagaacagcataacaagggcaggtctgactgcaaggctgggactgggaggcagagccgccgccaagggggcctcggttaaacactggtcgttcaatcacctgcaagacgaaggaggcaaggatgctgttggcctgggtacaagcattcctcgtcagcaacatgctcctagcagaagcctatggatctggaggtgagattacaatctttcctttccgcagcaacttcatgaaacagaaggggtaaagccccctatttcccaaacagggccaggatgacaggaaacgaagcgtttagccggtttctgttgtcccgtgaaagcttttccacccctcctttccttgtcaggggcttgcagctccatctttgccattaagaacaaaggcaagaagccactttctctctgcctttccttgctcatgagtggatggagcttgggggttcatctcccctactccccaagtcctgttctttctaagccctttgcatggtgtggtcctccttccccagcctccttctgtggttctcctgcagaggggagtgggagcttggagtctcatccagtcagcgatgaggccggtttcctccgtttgaggctgtcttgaatcttttgcctgacggagtcaaggctcctggagaattctcctgggagggagtatttgccttttaaacgggcagaaggtggccgtatccgtgaaggaggaaacaccggagtttatgtaacgtggccattacaacacagggacaaatgtcacgtctgggcgccccccgtcccaaaactcccagctcctcaaagggaccctaagccaggcctcctcctctccatctcctcctccaaagtggtcacaagttcaagagtaacaacgctttgcacttctgcagcgctttccaggtttcaaaaataaataaaacctaacagtctctgagcgttgactgggggacaggcacaggctgggggcttcacaccctgaggtgtgcgtggagttggggggggggggtgcgtggggcgtgggggtgttgccacgagaggagagggaggcccagcagggcccggggtcccctaaccaggctgaggttcagcccgggtggtcccggctcccctgtccgccacgctgggcgtcttccgttcgctgcccgctattctgtgtccgggggcttcttttcctcacaggctgtttctgggacaacggccacctgtaccgggaggaccagacctcccccgcgccgggcctccgctgcctcaactggctggacgcgcagagcgggctggcctcggcccccgtgtcgggtaagtgtcctccgggggacggccccggggctggcgggcggcggccgcgttcccggtgccagccccggcacacatttccttctctcctctcttaggggccggcaatcacagttactgccgaaacccggacgaggacccgcgcgggccctggtgctacgtcagtggcgaggccggcgtccctgagaaacggccttgcgaggacctgcgctgtccaggtacctgcccgggaccccgggaatccccgctcctggcgctgacaggaagcggctgagacactcgtggcgcacgtgcggccgcgcgatgccggccggccccgctccgcctccgcgccgtccgattggccagggctgtctccaggccgcggggctcaaagcctattggccgccgccgccactcgtatgagctcatccgccgcgagcgcttgtaaacaactgcgcggggcgaggctggggtgaggctaggtctctccgccgcgcgtcctgaggagtggcttttggcccctcagcgtttattgaccgtttgcggagcgtctgcagtgtgctagacccacactgctcacaaccccagctccccaacctcccctgacacacaccgcgggaagaagtcgtttgaggcatctgagcttcagagaagttaagcgatttaccaaaggcaatggcaggggacagatttgaattcacgtttcttagattccagagcgcaggctttttgctcccaaagcagcaagagagttttctaggtttaaatgggataatcaaaataaagcatttattttttattttttattttttgagacggagtctcgttctgtcacccaggctggagtgcagtggcgcaatttcggctcactgcaacttccgccttccgcgttacagtgattctcctgcctcagccgcttgagtagctgggataacaggcgtgcaccaccacgcccagctaatttttgtatttttagtagagacggggtttcaccatgttggccgggctgctctctaactcctgacctcaggtgatccgaccgtctggcctcccaaagtgctgggattacaggcgtgagccaccgctcccggcacaaagtaaaacattttacctaaggactggcacagagcgtacgcttagatgtgagctgctcaaaggaagcatgggttgtttcctgaagtagaagtggggggaatcccctgcagaagaacgcaaccgagaggggccttgggaaatagcaaggatttggacagataaagacgtgggaggtaggagagaagcccttccctacggccttcctctctcatttgccttgtccctgagatggttcagccctctcaggcctgatcttacctctggggcagaatttgactttgggttgtgtgtggggggaaattcttaggtgacccaccttcatctaccctaacactcaggccaggttcagctgtggaattcactcagggcagtccctgatgagagctgtttcccacctcatctccagagaccacctcccaggccctgccagccttcacgacagaaatccaggaagcgtctgaagggccaggtgcagatgaggtgcaggtgttcgctcctgccaacgccctgcccgctcggagtgaggcggcagctgtgcagccagtgattgggatcagccagcgggtgcggatgaactccaaggagaaaaaggacctgggaactctgggtatgacggtcccccacccctgccctcgttgggattcatcaagagatgtcatttgctgattgtctagggtgtggctaatgggaccttgtgtcctatccttggcaggctacgtgctgggcattaccatgatggtgatcatcattgccatcggagctggcatcatcttgggctactcctacaagaggtcagtagcttctcttctgggccctcttaggaggaggggaggaaggtacacaaagtcaaactttgtggctttcttacccaaaaggaagcaagatgttgaaaatcagctcaagatgtagagacttggtcctagtctttatctgctgaccttggacaaaccctttcctttggtgcctttacacctcacttaaaagccttgtgagggatgttcttgttccgcattttacaaatgaagaagcctctgtcagagacttgctcaaagtcacatagcctaggagtggcagaacctggattcagacccagctcttttgatagcaaattccctgctgtctgatcccacatgcctggcattgaagtgagtggcactgcagaaatcaggcttgacactgattgcagggaccttaagaccaaattctttctgtgagttataaaattctgctactagaaaaggtttccagccactgttgcagttgaggcttaaatttcctgagctataagcagtgggatctcctctgctagggaagaaaaaagtgagttggagaacagaaagtctgtttgccactcttcaccacgtgtgagaaagccaaagaggctacttgtgaaactcaaggacatgacctgtggctgggacagcaggagaagaatgcttattttgaaaggtcccacgagatgtccgtcagtgactggtgcatgatggtaagccagactggcattcatctttacagcactggctgattgtggaaaattatttgccattcttgggcaaaatcgggggatttgacttctagccctgggtgtctgtaatattctcctctgtggtctgagaaaacttcctgtgaggaaagtgacacagtagcctgcatttttccttcctttcctccctccctccctcccttccttccttcccctttctttccttcctttctttgatttttttttttcagggtctcgctctattgcctaggcttgagtgcagtggtgcgatcacggctcactgcagcctcaacctcccagggcgcaagtaattacccccacccacccccactgagtagctgggactacaggcatgtcccaccatgcctggctgatttttaatttttttatagagacagggtctcactgtgttgcccaggctagtctcaaactcctgggctcaagcagtcctcctacctcagcctcccaaagtgtataggcatgaaccaccatgcctggcatgcagcctgcattttccagtgatgagggccatgtctgagcccacagcctcagtggatcacccagcagggcatctttaaaggccttgtagtcaacctcctcattacagatgaaaaaggggaagtttgggtataataataacagcagtagcaaacatgtaccgtatgccagacactgcttgaagcacatgctttaactcataatcacccttatgaggtaaatgctgtcatctccaatttacagatgaggaaactgaggcaagaggggattatatacgttacctgaggttacacacctagcatttggtggagagaagtcctttaactagctatctctgtgaccctgggcaaattgcttcaatttcctactccacatcatggtgtggagctatggcttttgactacttagctcagggtgtggcacatagtaggtggtcagtaaatgatggctgtttttcttttctataaaatgtgtggctgggcgtggtggctcacacctgtaatcctagcactttgggaggccgaggcgggcagatcatgaggtcaggagttcgagaccagcctggccaacatagtgaaatcctgtctctactaaaaatacaaaaaattagccaggcgtggtggcgggcacttgtaatcccggctacttgggaggctgaggcaggagaatcgcttgaacctgggaggctgaggttgcagtgagccgagattgtgccactgcactccagcctgggcgacagagccatactccgtctcaaaaaaaaaaaaaaaaaaatgtaggtaatggaccaggcgtagtggctcacacctgtaatcctagcactttgggaggcagaggtgggtggatcgcttgagcccaagagttcgagaccagcatgggcaacatggcaaaaccctgtctctacaaaaaaatacaaaaattagccaggcatggtggtgggcgcctgtagtcctagttactaaggaggctgagatgggaggatcacctgagcctgggaagtcgctatggtgagccatgattgtgccactgcactccagcctgggtgacagagtgagatgctgtctcaaaaaaaaaaaaaaaaaaaaaaaagtgggtaatggactagtactctctgatttcttatgatgcaggaagcagaggtccagagagggaaagtattgacttgagaggacatcctgacgcccagtctgaggttgtttcccacaatgggatgcttgacatgcaggtccagggacacctgcttgttcatttcagagttaatgacatagtggccctggccttacaattcataagcagacctaagccacattggctgagtttagtccttgaactatctcctttttcctcagccacccaacagcatttggctgtcctgcaatcctgtgacagtttccaggccttccaggtgcttgaactgactaaacattcttaattctgagctcagttctggtgtccagtggaagtcttttttcttctagatttgttcctctaggctgtcacgagactgccctgaggcctaaaatttattttcctgtaaactcagggcaaggcacccagtcatcagactccccgtcactaacgaccagatcacccctttcttcagcagaactgctctgagaacagactgtacaacaggaaaccgcatgtgggcttaaaaacaagcttgcagccttcatctcttcctaaagtcagagagcagagtgtcctgaaaagagctgtaggttgagtgtgggttcaggtgccctctgagccttggtatcttgtctgttaaatggggatatatcctccctccacatctacccatctaagattataagtattaaatgtaaacagaaacaatagcacaccaatcaggtaataatcacaatagcagccaacatttatttcatgctttcttaataagtaaggccctactgtatgctcttccctgattatctttttttcttaatttttttttttttgagacagagtctcgctgtgtcggctcactgcaaccgccgcctcctgggttcaagtgattctcctgcctcagcctcccgagtagctgggattagaggcacccgccaccatgtcctgctaatttttgtatttttagtagagacggggtttcaccatgttggccaggctggtcttgaacttctaacctcaggcaatccacccgcctcggcctcccaaagtgttgggattataggcatgagccactgcacccagcctcctgattaccttgactaagcctcacaaccacactaggagcactgttagattttacagtgaggagctgagacctagcagagttaagtacaatggccaggctacacagctagtaatgtatgtctgaggagtattagtatctccagcaagtccagtgaggccaagtagcctcatgtaaatttgctttgaattgcaaaggaaagtaggaaaaatagaaatttaaaaaaaggctgggtttaaagtcagaagaaacaagatctagttctggaactttcacctattctggatgtgacactggacaagttatttaccttctctggacctcaatttcttcatctgtactgtaagggggttagatatggtgatactcccaactctatttcctaaaaagacaatattgccggtgctaagactgggttcaaatcccagctctgccatttgcttgaacaaatagtgtaacttctctgcatctgccttcctatctatgaaacagatcaaaatagataccacataggttgtgaggatgaaattggacagtatagtttaggcatacaattggtgttctatagcctgggagaggaagttggaggcagcatacagtagggccttacttattaagaaagcaggaaataaatgttggctgctcttgtgattattacctgtagctgccttgggaacttttcctgagcagcagtgtggcacagcactgcctctgactgggaaaatagcagcggctcagagtaataattgaagacgacctgtgtagtctgaatgaggtctgtggtgcttccatactctgggagaggaagttggaggtaggcagcagcttcctctacacctgctctctctggccagctcagctcccagtcccaccctggccttggagcaagcagtcagggtaggtactgtaagccttgagctctgccaaaggccatgaggcttgcctaatgggatggagcttttccctggctgggatgggtgggcaggcaccaggcttcctcttagggagggagggctgtaaatgggggtgggtgggagctcagcctggccgggtctttgtcctggtagtctaggccacgaggttcaaatggccagtctgtgactgaggagctaagtgtactgtctgcactagcttcagagggaggtcttattttctgataaaaaggggagggaaaaactgtaagtcaacaccactccactcccttaggagaggaactaagtcagtgaacaagccttttgttctttcttggctgccacacaacacccaggctaaccaccccctacccccaagcagtgagaaggggctaggctgcctgatggtcagtgtagcaggcctagtggcctctcaaaggtcacccaagggagctgggagcagccactgcatctctaggactcacaggcaccattaacagcaggcacatgggattgagtgtgcttccaggcttccaaatggatgagactaatccagactagtgccagcatctgctttctttacccttgactgctcttccagccctgctctgcctcattaatacaaattgatttttttcccctaaagacttgtatatgatgcagcctggccattagcagcagctcagctggccacaggtaaaggaggttgctgaggaaagcaaggcgcggaagttaaactcaaaagcctcagtttcttcatctataaaacagggattaggctgggtgtggtggctcacgcctgtaatcccagcactttgggatgctgaggcgggtggatcacctgagatcgggagttcgagaccagcctgaccaccatggagaaaccccatctctactaaaaatacaaaatactctgggcgtggtggcgcatgcctgtaatcctggctacttgggaggctgaggcaggagaatcgcttgaacctgagaggcagaggttgcagtgagccgagattgtgccattgtactccagcctgggcaaaaagcacgaaactccatctccaaaaaaaaaagcctgtagctgacatttagtagatgcttattaaaagtaataagcatctctgggaggctgtctcacagcaggatgatcaggtcagttttctggacaactttatgggttaggtccgaagttcagatagttctctgggtctctggggctgaaagaacaaaactgtgtcttgctttaagagtctctatctggccaggtgcagtggctcacgcctgtaatcccagtactttggggggtgggaggatcgcttgagcccagtagtttgagaccagcctaggcaacatgttgagaccctgtctcaaccataaaaaaaaaaaaaaagtctctgtcctttactttattttcattgagccccggtgaagctgtatgaagtccatactgctgtcaccctattttacagatggagaacctaagaccagaggtgcaggagcttcttgttgagtttaacgccgtcttgcagaatggatatcctagaatcctggacctgagtttgggtcctggctcagccactgatttgttgtgacaatggcaagctgctgctcttgctgagcctcagggatgctatctaatgagcaaagctatgcaggaggcatagcctgaatgtttgtttgtttttttcctgccagggggaaggatttgaaagaacagcatgatcagaaagtatgtgagagggagatgcagcgaatcactctgcccttgtctgccttcaccaaccccacctgtgagattgtggatgagaagactgtcgtggtccacaccagccagactccagttgaccctcaggagggcaccaccccccttatgggccaggccgggactcctggggcctgagcccccccagtgggcaggagcccatgcagacactggtgcaggacagcccaccctcctacagctaggaggaactaccactttgtgttctggttaaaaccctaccactcccccgcttttttggcgaatcctagtaagagtgacagaagcaggtggccctgtgggctgagggtaaggctgggtagggtcctaacagtgctccttgtccatcccttggagcagattttgtctgtggatggagacagtggcagctcccacagtgatgctgctgctaagggcttccaaacattgcctgcacccctggaactgaaccagggatagacggggagctcccccaggctcctctgtgctttactaagatggcctcagtctccactgtgggcttgagtggcatacactgttattcatggttaaggtaaagcaggtcaagggatggcattgaaaaaatatatttagtttttaaaatatttgggatggaactccctactgacctctgagaactggaaacgagtttgtacagaagtcagaactttgggttgggaatgagatctaggttgtggctgctggtatgcttcagcttgctggcaatgatgtgccttgacaaccgtgggccaggcctgggcccagggactcttcctgtttcataaggaaaggaagaattgcactgagcattccacttaggaagaggatagagaaggatctgctccgcctttggccacaggagcagaggcagacctgggatgccccagtttctcttcagggatggatagtgacctgtcttcattttgcacaggtaagagagtagttagctaacctatgggaattatactgtggggccttgtgagctgcttctaagaggctaacctggaaactaagctcagaggcaaggtaataaagcacttcagggcttgctccccaagtgggcctgatttagcaggtggtcctgcgggcgtccaggtcagcaccttcctgtagggcactggggctagggtcacagcccctaactcataaagcaatcaaagaaccattagaaagggctcattaagccttttggacacaggaccccagagaggaaaaagtgacttgcccaaggtcgtaagcaagctactggcatggcaagagcccagcttcctgacggagcgcaacatttctccactgcactgtgctagcagctcagcagggcctctaacctgtgatgtcacactcaagaggccttggcagctcctagccatagagcttcctttccagaacccttccactgcccaatgtggagacgggttagtggggctttctatggagccatctgctttggggacctagacctcaggtggtctcttggtgttagtgatgctggagaagagaatattactggtttctacttttctataaaggcatttctctatatacatgttttatatacctcattctgacacctgcatatagtgtgggaaattgctctgcatttgacttaattaaaaaaaaaaaaagactccacattgccaagtttttgaggggtaacaggaaccctccgtgtaagttgagaagctttgggttaccttgtcaacacctatgtggcaagctctgggccttttcttcattcatcctcgccctgttactggaaagtgacaactgcagcctgtgtccagatttttttttttgagatggagtttggctcttgttgcacaggctggagtgcaatggcatgatctcgcctcactgcaacctctgccttgtgggttcaagcgattctcctgcctcagcctccagagtagctgggattacaggtatgtgccaccacacctggctaatttttgtatttttagtagagacggggtttcaccatgttggtcaggctgttctcaaactcttgatctcaggtgatccacctgctgaggcctcccaaagtgctgagattacaggctagagccaccgtgcccggcttgtgtgtccagattatcatcatcaggaatctttcaggttgaagcaggaaagacaggtgtgcaggcgtcccaacaaggtggttggtcattgcaaatcctctccccttcagcaattgtttccaaggtggaggtagttaaaatgaatatctagacagcccttgttaaaggctggagtgcggcaggggttgggtggtgggtgacgggggtggtgctgcagcagccaaagggggaataactgcagaggaggaagggtcactgggctgcctgcagcagccctgggctgaggaagttccctgcaaggtgactactatgactccagaagaaaagataccaacaggagtgtctcctggacttttagcaagggatttcagccacaggttatcagcctcaggaacacccagatgacctctgcccatgcccagccattgctctgtggttctgccagcaatgcgtactccagatcatcagtttttttcgggaaccatattctgtccttaagttggattcttcaagctttgagagtgcctgggagaaaacacctttgggtttacagatttatattgtgcccaaggccccactaaccagatagcattgtccttcccaatggtcactcttctacgacatcccccacatgcagaagcaagaagaaactggtcttctcctctcaagcacttgtaaagaaacacaaggggtggggtgacttgcattcatttcttcccattgcaaaggtggcacccagcactgaggaaagcaagccaggatacccaggctatggaagtattcatatagagaggatgaaagggtagggctcctaaggaatgactcagctggcatgtgagagccaggccaggaaaaggtcatagtcagtcacacctgctgcaaggaaggggctgcctcaggtgggatgtacatattctctagagcagatgggtgtctgcttgagggttttagacttgggtgcatgaaaactctctgctatggggagtttgtgtgggctaggccagaaggtggctagcagaccctctacatttatgtccctgagccaatcatgttttcactctccatattgccagttatgttaactgcttaatttatttagtctgatcaatggcccagttcaggcccaccactcctacacttgctggggacagccaggaaacaaccagccacacaatgctgaactgtgctgctgctgggagtccagggctcagccctaaagcaagcttgcaaacttcacacataagtacagtctatatagcaagtaaactctgaccagagatgacatctggtcccacaactcatcaggtctatgtacaatatttcacataccacccaatagataagataatattaacagcaaccactctcctttatcaattccccctgctccaatacaaccaccacacattgcattaataccccaaacccattcccaatttattaaatatggtgcaagctcatagacacttagaagaggcaaatctagttgtgatgaagagttcctagagctctgggagccaagatggaggttttccagtacctgcacatgtggctcaggaggatgctgcccaggagctaatgagttgggagagcaaacatgggaggtagaagtcagatggcccagctcagggagctatctctctcagcatctcagctttgagactctgccaccacctcttcccagcccaagctgctgcctaaaccaggcatgttgaagggtgagcagtggttgccatgaagccaagaccaagagattgctgagactcccactcccctccctcagactctaggcctgtgacaagccacactgtcctccagaacccatcgagctttaggcaaaatgttttaggcatctgactaaggagcccacccgagtatgagtaacagaagccaagatctgagctttctagagggcagggcctctttctagtcccccagcctcttcctttgcttgtgactgtttgtttcagacagaaaggatgttgtccgtaagttctcagccagtctccagtattaagtttgaaaacatgaggtggaggcttcctctcacattgatgtggtccctgggctggctagagccagtgagcaggtaaacagaagccagccctttctctaactcctggcctgttccaccacatattaagggactcttcaaaacctactccctcaaccttgctccaggaaggacaggatctggagtagaaagggggagcatcactgactttttcacaccctttgagccatcagtctttctttcgtccacacacttgaagtcctcctgcacccagctggactagtgacttcagagttcacaggcaggttcaccctgggatcctgcccagcaggtccaggtcacgctgattagtgtaagcaagagcctcccacaatccactgccagggagttcctgggtggattcgagtaacagattcctcctggcccaaaggccaggggtttttttcttcttcacagctttcaggcaagtattggatttacagacagtaactaggccccagaacctgtggagatacatttccctggtgctgcgcccacttgcctcctggggaggtaataggaatggcttgttctgcttctaaacattccgccaatccacaggaagcccggacggccctgctcacagcaggaatggggcacagaggggcaatgctggctgtagaacacccccctgcagggggctgggccagggctagggaggtgagtcccgggtcaggccgtactgcatgctcacagtgtggtccaactcctccagctctgcaggcagcgggatgcccagctcccccaggtacagggagagggcctcaaaggagtcctccaatttcgagaatgctggtctagaaggaaaagaggtaaattagaggcaggtggaacatgagcagggccatggggtgggtggaagggatctaggctcagctacttcctggttgtataacgtcaggcaaactccttcacctagtagtgcctctgtgagaaatgggcataatgttaccggtacctcatatatttgctataaagattaggtaacactataacaaggctggactagctggagttaatacttaaaaacaataggagaaaaacttccctcccatatcttagagaaaatgcagttatcaaaggtggaatcggaaacaccaggctcctagtgccacggaaatggcttggctgccccggaagcctaagacagctcaggcttactcctcctcctccatgtttatgcttaaatgtcatgtcacctcagtgaggcctgctctgacgaccatatttaaaattgcaactggtaccctgaacaatcgtctttacttgtcttgactctttttccatagcatctgccacattctaatattcaatatagtttacttattgtatctactgtatgatacagtagataccatgctagaatctatgttctatgagggtaagcacctttattttgttcgctgctgtaacccaagtgtttagaactgtacctagcacacagtaggcattcaatactgtatatatatattttttaataaattaaagatatttagaatgacaagaggtattagaaaacaaatactgtgtagcttcacaatttctcctcaagcttttacactggtgttactgaaggactgcggtccttggcctataaaggaacaaggtatagattctcccaccagaaaatttcaactctaatgtggaccgctggaaatcatttttttttttttttttgagctgcaccaaaggcgtaccctacctcgctttattaaagggcccgtgccgcagagtcaatataaaaacacaaagtcccatcagtttaataacaataaaaaaatccaaaagtggaaaactgagggggcaggggaagagacccctgggccaggggcacgaggagccctgctcatggaaccaggcctggccgcagggtcccccggtattgctgttgctacgaggtcggggggtagcgattgtcctatgggagccaccgttcgcctgggtcggggaccctcacttcttctggggtgtgctcagcttctgcatggcccggatcttgtccagcaggccagagatgaaggcctctgtgggtttgtaacagtcaaccagcagctccttgaccctggaagcccaggcatcgtcactctccatgtccaggagctcatccacgtcaatctctagttctgagatctcctcttcctggcagtcgtagaggcgcgtgagctgctccaggatccactcctctaggttgaggtgcttccgtagctccttggggtcatacttgatggtgaccttcccttggcgcctcactgggccctcatcatccgcgcagcccgggccctctcctgcggccccggggggggctctgaaagtagatgcgtggtccttggccgccactgcctggcctgggggccggggccggggccgccaacgccgcgccccccgcggtgccgctgtccgccacggcggcctccggggccacgtgcgcgcgtggggcccctccttgtgccgccgcctccgtgacgcccgccggctggctcaggttagctcgccggctccgcggcgagggcggcggcgggggcgcccgggggcagctgcagcatgcggagcccccgggcctggcctggtcgcgccccgccccctccccgccgatccgcccgccctttgtcccctgcggccgccgccggggctgccgccgccgaagcgctttctctatccggaaaccatttttaaataaagattatgtcccaactggttatcctgggagggtggagttgggggtgaggagaatgttgagggatatattggttaagggagattacagaagacgtatttcctgtgctataaactttggtaatgtttgaacttgtttttaaaagaaacatgatttttgatggcaggaaaagaaccccatttttgagacagagtttcactcttgttgccgaggctggagtgcaatggcgtgatatcggctcactgcaacctccgcccctgggttcaagcaattctcctgcctcagcctcccaagtagctggggttacaggcacctgccaccatgcctggctaagttttgtatttttagtagagatggggtttcaccatgttggccaggctggtctcgaactccagacctcaggtgatccaccagcctcagcctcccaaagtgctgggattacaggtgtgagccatcgcgcccagccagattctcgttttttaaccacacacttgaaaagacctagggtaactttggtaataatgaaattattacctgagaagaataaaggtaattttgaaaatacttcctcaaaggagaaattagctaaatgcataaaactgctcactgtagttaaatacctattgtaaagagaaactggaaaaacctgaacatctacattacaatatgttcagacagtctctcaatagaatttcatgttgtcgacaaaaatgataaacaggaagactggatagtaaacacaagggaaatgcagggcaaaatacagaactatttactataaaaaaaagtatatgtgtagatatggacaggggaatatcgaaagatgaatacacttactgtattcaaatggtttgggtgaatttccttcttttaaactttcttttaatggctgtgtttctgtgtcctatccagattacttgctgctatgtctttacctctctcttctccaacctgtacatatgtgttgtcagatggctcaggggttgacagccacattcttgacctcaaggcttctctcacccctgtgcttgcagagggctcaggggtggccttagacagaggcaaacgtcccaggaccctgtgagctgggagaaaaaggcaggataccaacctgctctcaggctccagtctgcagcagatggcggccagcgggaagaaggccgggggacaatctgtgggaacaaacttctcccagaaaagcttcacgttgaggccaaagtccagtgttcggggaaggcagtcaggatctgcatacacctgcccaatgatctgtagggtaagaagacagctgtttacaaaggactacagaggccacagatacttggcaagggaaagggatgctgggatgtggacaggaagaatggcagaagaggaggtggtaaaataggttagagagctctccccaatccccaatcatctctccaaatcttactaatccagacctgtatccactgagagctgggttactgaagaggactaagaaggggcttcactgcagaagccaagtgttccaaatcagcatctgctcctagcttccactcatcctaccctgccttgtctgtgtctccttgtggctgtgtgtgtgtgccagagttaaggctctatgaggtgctggatctgattcatgtctgaaaccctctggcaccagcccagtgctctgaacagaggtgttcaattaatattaaagaaaacaattttttaaaacaaatcttccttcatggccaggcacggtagctcatgcctgtaatctcagcactttgggaggctgaagcgggtggatcacctgaggtcaggcatttgagaccagcctggccaatatggcgaaaccctgtctctactgaaaatacaaaaattagccaggcgtggtggcgcacacctgtagtcccagctacttgggaggctgaggcaggaggattgcttgaacctgggaggcggaggctgcagtgagccaagattgcacctctgcactccagcctgggtgacagagtgaaactccatctcaaaaacaaaaacaaaaacaaaacattccttcattatcctaaccatcccttgtctctcctctcctctacccctcacaactttgtaggaattacagaaggctttgaatgtgtgtgtgtttgagtcgctgagatatgctgtcacctgactaaactcctaaaggtaggaatctttccaagattcctcactctgtccacgtggtacctggcacagggctgacacttcctagagtggctacttctacttgaagggaactgagaagggctacatttggcccaagagctagctagacagccacatgaacagtctcttgcccttccttctggaattctgagtctcatctgccccttatcgaccatgtgcaagccactgccctcttccaagcctcagtttcctcaactaaaaaaaaaaaaaaaaaaacctggccgggcgaggtagctcacgcctattaattccagcacttttagaggctgaggcaggcggatcacctgaggtccggagttcaagaccagcctggccaacatggtgaaaccctgtctctactaaaaatacaaaaattagccgggcatggtggtgtgtgccggtagtcccagctacttgggaggctgaggcaggagaatcacttgaacccagaaggcagaggttgcagtgagcccagattgtgccactgcactccagcctgggcaacgaagtgaggctccatctaaaacaaaaaaaccctgccagtccttctcttaagaccaatgaaacacgaacgtggcaaagatgtgcagatgcgttataaaccataaaaccctacacccatgttgattttagtcaagctagtcatccctaggaggagatgccccagttccgagggaaggcagagctgctaggcctgctgcctcgggcatggccttggtgccagagctcacctcacagagaacgatcccaaaggagaagatatccaccgtctcatcatagctctttccttggggaacacaggagagcacactgttaagtttacatcccttacctgctctgcactgggtctagggtcaatctaagccacagctaagaactagggctagaacaggttctgtagggacaccccacaggctgtcctgcgcagacaccacctgaaaatagtccttcctcagctgtaggtgaactgccttggagagcccttataacataacactgcctaggatgaaactgcacgttaaagtggaaaagaaccagactagggttcatctagcctctgccattaggcagctgtatgctcctaggcaattcactgaacttctctgggcctcagactccaaaatggattgtattcagaccatttctgaggcctcacaaccctgatttcaagaatcccaaccagcatctctggttggtttgagcattatccaccagagggcaccacacttcagttctcaccatggagagagaaggctaaagctgggacaatagcctgagctcttagcgatccctgaggcacaaatgccacagtcagaactcaccttatcccccatgatgggacactgatcagttcccagccccctgagctcaggagctaaatcgtgaggccccacctggcaagggaaaaatatcctcagctctgggtatccggtcctacgcttcacaggcctcccctggaattcccagggctctgatgcaagggcagcatctgtcctccctctgcgggtgtcccctccagggcttcaggactcaccgttcagcatctcaggggccatccagtaggggtttcccaccaccgtgtagcgcttcttgcggtcgttcttgcgcaaggtgcgtttcttggtggtggccttctccatgggggcccttttcctctcttccactatgagccgtgacagcccaaagtctgccaccaccacagtcttgtcctggtaggataaaagacaggtcaggacttcatggggatgttctcaaacctggccctggggaggaagcataggcaagagaagccactgagaaggggagaaaaggtgtatagcaagggagaatcagagcagaaagctctatcaaatagacacactcaggccaggcacggtggcttccacctgtaatcccagaactttgggaggccaaggcgggtgaatcacctgaggtcaggagttcaagaccagcctggccaacatggcaaaaccccgtctctactaaaaatacaaaaaaaaaaaaaaaaaaattagctgggcgtggtggcacacgcctgtagtcctagctacttgggaggctgaagcagaagaatcactagaacccgggaggtagaggctgcagtaagccaagattgcaccactgcactccagcctgggaaacagaatgagactccatctaaaaaacaaaacaaaacaaaacaaaaaaacagacacacttggcatttgtgtttctgagggtctggtatctgtgcacagcagactcccagcccacagtgggttcatggcagagccactggagccctggaggtgaggctcagggacttggagagtggaactcagaggtgggacagggggttgcttttgtttttccctgtcctgtcttattcctaaaatgatttcaggcagtggctagaaccaggataagacagaaaaaggcaaggtggaggcagtagatggggagacttgggggagacaagctctttgaatagctacagggcagtcatgtgggaaaggaatgaagattgcgtggtgtgggtctagagggcagagccagggccagccggtagacacccaggaagccagatagcaagtcagtaagacaaacaacattgtaaccaccacagctgaggggcagtgggaggaatgctggtctcaaactggtccctgtaaatttactagctcggtggcctcaggctgaggcttcaggtgccaccactgtaaaatggggtcagcaatgaactgttttacaagactactatggggcaaaagcaggtaaaatgacagggttttctacatatagtcaacaaacttctgaagtcccttctaatcaaattatttcaaaggttgctaatgagagaaggtgaaattatgtctgtgtgtgtctcggagctcccagaggacagagaagggcattggaagaagcaggaagggaaagataggagctcctaggcaacacctctgccctctagccagaggggacaagtcagcctcctttgtgacaaggaagccaggaaggataggaccctggaggccaggcccagagcagtgggacataccaacttgatgaggcagttgtgcgagttcagatcccggtggatgatgcacatagagtgcaaataggcctggaacagaagcatgagctgaggctacagggccagcaaatcaactagaccctgaatctggaattgggcgccatagatgctctcctaccaggccatgcccacccagcttcagaacccaacctggacaacagggccagggcctcctatggcctctcccttgtcccaataccaacaggaagcctggacttcctctgcttccctgctgccatctcctgcccatcctttggttcaccaatcactagcacagtggctggccaaagccctcacagctctctcctaatgtccccaacttcagaaaaccctggccgttgcagcaccccctccacctctacccattttacttagatccaggctgctccctcctccccactctcccaatctctggcttgagccactttggatccttcctgcctgcaacagagaagtgacttcttgctccagctagctctgtctttcagacattcacctcctctaagactccaccttccccactgtctaaactttaagctctcccccttcctaccaaaatgtttgtcaacaaatttgtttgttatgtctcctctccaggcctccaccactgactcttaccactctcaggagcaacttcctttctccttcccttgcaaatgtagaaggagccactccttgctctccagccccctgcaatactactttcatcccttaggctcctggagctgctcacacacccagggagctcttcctgaatcgctatagctcatgacctgcctgcctgcctgcctgagggagtgctcctcaaagactgtccacaactttcctatgctacctgatcctgagactcttgtgtgtctgtttttttcttccagccttttcagtgtcagccctgctcaaagccatctcctcttcacaagctgagacacccccaccagctacatggatgcctcttctgtcccacagctccagctgccccttctctgcagattaggtgactagcagcctctccctaagccagtctcatggagccagtttcctgcccagaagatgctgataggttctgctagcacagaacagcagggatcaatgctagctcttcccaaaccagttgctcaacaatcatggctatcccccatcccccaaatgtctggtaagtgacacctcaagccactcgtaactcctcctcctcctcctcctgttccctcattgccaaccagtctctccattctgactccacccggcctcccaggctcctgtccccacagccactaccttaattcagaaatttgaaatgtttcattagccccctatgcagggctccattccctggaccctccgcattccaccccaatgtactaaccatatcagtctctctttttttttttttttgagatgaagtctcactctgtcacccaggctggaatgcagtggtgtgatcttggctcactgcaacttctgcctcccaggttcaagctattctcctgcctcggcctcctgagtagctgggactacaggcgtgcaccaccacgcccagctaatttttgcatttttttctttagtagaaacagggtttcaccagttggccaggctggtctcaaactcctgacctcaagtgatccactcacctcggcctcccaaaaaagtgctgggattacaggcatgagccactgtgccagcccagactcattttggaaaaaccacagctcttaagctttcttgcttaaaaatcttttcctgccgggcatggtggctcacaactgtaatcccaacactttgggagggcgaggcaggaggaatgcttgagcccaggagtttgagatcagcctgggcaacaaagtgagaacctgtctctaccaaaaaaaaaaaaaaaaaaaaagaaaaaaaaattcaaaaaattaggtgtggtggtacacacctgtagtccagctacttgggaggctaaggcaggaggattgcttgagcccaggaggtcgaagctgtagtgagccatgatcgtgccactgcactccagtctgggcaacagagcaatatcctttctcaaaacaacaacaacaaaaaaacctccttcctgattcaagccccagaaacaggaaaaaaaaacaaaaaaacaaacaaacaaacaaacaaaaaaaccaaaaagccagtcaaccaaaaaactcttttacatttgtctcctatagtccagactccatagcttaaaacacagcgaccttgatgtacccccaaactgttccagactactactattttcatggacccccatgtgaagggcagtggctaaagtctcaggcttggcgaccagactgattagcccaggatcccagctctgtccctttccagtccagcttatctggaaaccaaggttgtcatgaggaataaacatgcacatgcatgttaatccctcagcccagtgcctagcatatagagggcactcagtacttgtcagctgttattatttctatgcttggaatcatttgtttccaggtgaaatagatgattttctcctctttcctcccaggtctttgctcctgtcacttcaatcctggtgcctctctgccaataagaactttatccaattctgatccttcagggctccgctagaactcatttccccttcattgatttcctaggcagtgaggtgctctagttggtctaagggccctcagcacctgaatacctgtgatggcaagcccaggccatctcaggctacagtttgcctctccagtttgccttgtccgtgccctgtttgcctttagagatgtgtaattctttgaaaacagggctgtgaactgagaacagttggctggggtcagtttcagtgacacagacaaactcaatgaatagctgctgacccagcccacacaagttgcataggaaggggtctctaccttccagtgaagcccacaattctcacacctctccctactctcgccctgctggcaggtttgttggtgggactcaccattccggaggcgattcctttggcaaacctgaccttctgctgccaggggaacggatcctgcagaatggggaatgattttcagaggctgttgagccctgtcccactcgtggtccaggccccatgggtcaatgtggtctcccagtgaagcctccctgtgtatgctcagtcccacccagcatggtcctttggaggcaaagcagggcccctctgccctttaagctcctagggtagtgatagcataggtgtctgacaacccaccaaggctcctggagactatggggtggtgtgctcaccatactgcgcagaaagtccttcagtgtgcccccctcaatgtactctgtcaggaggttcagcttcttatccttgtacagcacaccaatgaacttgagcacattggggtggtccaggctgcgcatcactttcacctgggggtgggggaagccaaggaaagctggtggttaacttctcactgtcttccttacctcttccctccaaggaatcagcttgacaagtgttaccacctgtatctcctacctcctatcttgtgatatgacagggcactaagatcaggatgagggaagaccaccaccatatagatggagatggcttcataggccttacccttggaactgcattgggagaactggggtgggagtggccaagtggcttggagggcaatacccagaccacaggtgtccccaacttaagttactccatgaagtaacttgggaggggtagtgaaaactgtaaatgcccaaggagtgtgagtgctcagggagctcccctccaggctcccttagcagggcgttcaggtgaggattataacattgagttgtactaaattggagtgttttcatgtccatcatcctcataacctgagagctcttctgaaccctgtatcttttgttactgcatcccttgtaccctgtttgtgttgcttttagtaagtgttcattgaacaaataattacgctgtaatttagagggagtgggatattcctctagggctcttttctgcttagtctttaagacagtaattccaaactgtattttctcttgaagccattatttgtaaggtcttctctcttccaatggtgacaccaacctcccgggccccctccatcttcttacctcagtcagaaaagttttctgggtctcctcatcacatcgaattaactctttcatgaccatcactttgcccgtggctttgtgtgtcacctacagggagggtgactgttaatggtgctgagaccagaggaagttctggagaactgtttgagaaaatctatgcagctggccatcccatcccttggagggcacactgagccgggtcagaatgacagagttcatgtgtggaagatgcagcgtggagcaacatgggactcacacggaagcaaaccctctttcctggagagctgggcatgcacagaggacaggcaagaacccagaaaagggaagtggggaagaaggcaggaggggatgctgccaagccaagcaggggctctggtcatttggcatagaagtgagtctcctgagtgaacagaagtctgggggcaggaaggtcagtgccaaagacatgcaccagggagctgggtggatcgggggtgagctctccagccctgctgcccccaagctgagacacacgtcttacctgaccccccctcccagttctcagcagaagaggaggaggaggagagaaagagagaggttagtccctgagactgttcaccagggaggcaggagccattcccctgtgtgctccttgtagcatgcccggtactgaggtctgcaggcacctaacaaacacccactgactggaggcaggagggccacaggcacagctcaacccaacctggatctccaggtccacaagctcactgtaacagcaacattgaccttaggtggcctgggtgggggtgaaggatacctctcacaccaacacccaaagccaggaaggaggcctggcatcctgcatggtgtggggtggggccaagtgatgagaaatccccgaaagacagtgacagagggactgggggcagaagagcaaagcaattgttgcctgcgctcaccttgatagcctgcccaaagaagcccttccccaggacctccccatggattaggtcacagggccggaagatctgctgtgaatagctgctggaacaacgaagggattctgagcggctgatgtcacggctgaacagcaggggctcctttggggagctggggccaggggacttggagatactgttactgcgcctgaagatgaggaaagacgggagtagggatgtgtagtcctcagagaccggccaagaaaccctggagggaggaaacttaggggcacctgttcattccaatgtctatagtttagatgttattattggggaacaggggctcttacatcagatgtatcattttggggttgctgacatcagtcatttatttaagcatagtaaaaacacattcaaaatgggaactctgcatacatcacacatagaacaattaactagattctactagctgataatgctcagtatgtgacatatatgacaacactgtagatggtaattcaccatctcccatatctgcttgatttaagtactaactggtttagagtgatagttatactagtatccaaaaaatgagcaaatgggattttttttttttgagacagagtctcgctctgtcaaccaggctggagtgcagtggtgtgatcttggctcactgcaacctctgtctccctagttcacctgagtctcatgcctccgcctcctgagtaactgggactacaggcatgtgccaccaggcccggctagttattgttattattattatttttgagacagagtctcgctctgtcgcccaggctgaagtgcaatggcacgatctcggctcactgcgacctccgccttccaggttcaagcgattctcctgcctcagcctcccaagtagctgggagtataggtgcacgccaccacgcccggctaatttttttttttttttttttttttttgatggagtctcactctgtcgcccaggctggagtgcaacggcgggatctccactcactgcaacctctgcctcccaggttcaagagattctcctgcctcagcctcccaagtagctgggattacaggcgtgtgccaccacaaccgaataatttttgtatttttttagtagagatggggtttcaccatgttggctaggttggtctcgaactcctgatctcgcgatccatctgtctcggcctccctaagtgctgggattacaggcgtgagccaccacacccggccctaatttttgtatttttagtagagatggggtttcaccatattggccaggctagtctcaaactcctgaccttgtgattcgcccacctcggcctcccaaagtgctgggattataggcgtgagccactgcgcccagcctaattattgtatttttagtagagatagggtttcaccatgttggccaggctggtctcaaactcctgacctcaagtgatttgcccgcctcggcctcccaatgtgctgggattacaggcgtgagccaccgtgcctggccagcaaatgggattttggatgatattttgcacatctttgtacctgtccatgtttcctgaattttaagatgataaacacgtatgatttttacagcaataaagtcactatgtttacattttcaaaagcggtcgataatagtcatggtcaatgactgttattttcacttactgaagaaggaacaagaaggttgaagtccacagcactgcaggtgaacagccctgcgaactttctctctggggtatgctcctgctttacttgggctacccagagaggactgacgctggatggctcttggcttgtcccgacctacaggtttacttacccttgtccttttgctctgcctcctgctgaccatgcccaccagagcacacaaggctagctgcccccctcctctgcatggtggctctacagatacctggccactcccaaatcttcccttttccaggccatggatttctagctcttccctgccctctgttgccctgcctcccactaatttcatcatactgaccaaggccaagaggcaatgggagtgagggcagcactttaatgagagggcactgtttccaacacatgccagctgagagggctctaacttactcagtttgtttggtgaggagagtggataaaaaaaaacaaacttttttttttggagacaaggtctcactctgttgcccaagctgtagtacagtggtgtgatcaaggctcactgcagtcttgaactcctgggctcaggcaatcctcctcctcagcctcttgagtagctgggattacaggcatgtgccaccatgcccagttaagttttttattctttgtagagacaggaatgtggcccaggctgctcctgaactcctggcctcaagcaatcctccggccttggcctcccaaagtgctgggattacaggtgtgagccacagtgccctgcccatctaattaaaaacaattattattattattttttttttgtagagacagtgtctcactatgttgctcaggctggtctcaaactcctgtgttcaagccatcctccgacctaggcctcccagagtgttgggattacaggcatgagccacggtgcctggccaagaacctgattcttagtgatactaagaatgtgtcacgtttactgaacactgtccctatggcagcactatacaactttatgtccttttccacatttaatccttacataattggtgagacagccacctttatcttaccatcttatgtcacagatgcagaaacaggctcagagagatgaagtgatttgtgaagggaggagctcagcctgaagccccagtagggtatcagtatttctgcctgggagccagtgctcttgacttcttttctgtaagtctccctacttggggcttccactcaaggcaacttctccttccccatggacctggcagaatctggggtttgggggttgttggtccctcaagtctaaaaaaaacgttcattcatcttttgctttattgttttcaaagtctttctacacaatttattcaatcctatctgtgcccctactccaggctctgagctccatgctttctccataggccatgttgcccttcagggtttagcatcactgcctcctgtccagcttaggagttcagtggacagagactgactctcaggtttctaaggaaacctggcagacagctgggtccgcacaggctctggctgtaaactgtgatccccacaggggcagctgggtcagcacaatcctcatagtctgtccctggccagctggttcctttcctaactctgcaggcttctgaaagccagctcagcttcatccgagagacagacataggacagaacagagccagggtgggaggtggcaccttagggaacgtctcctcagtgtcccctccagattctccttggtgtccagggtgctgagggcgtgggggtgtccggcattctgcatgtgaggagcgagccgggcctccagccgcagctggtccaggcgttgggagacggggtcatgttcaatcaacagctgaagtgtctggctcgtctggctaattgcatcctccacctgtggccaagagcagtataaagctcccacaggctgccccatcccaggccacccatggccaacccagatgactcaggcacagtgtggccagtgctcaacttgtctaatggtggcctttagctgccagtggcctcacagtgccctctgcctggcatcctgtcagctctcccgtccatcaaccatccctgctaccctgggaacctgttacgctgaaataggtcaccagtggtcacaggctcaatgctaagacaaagagatgggctgggggtaggaaaaggtaaaggctacagcctgatttctcagaggatctgttccatgtcccaccctcacaagacagattagacacacactctacctcctccactcgaagtgtgcggacgggggtcccattgatctccaggatgcggtccccagggtggatggcgtttcgattgttgggactgatgtgcatccggttgaccctgggccagacaagagttgaggcagggtaaagatgtcctaaaaacctgcttgaccaattctgcttgtgcagggaaggtttaccaggtcccaggccaccagtggcccctaaggggcccaggatacccacacagaaaggcaacaccttttccaggatgccccatctcagtgaagggaattgccactcaccctgtggcctaagccagaaacttgaacatcatcttcccaatctggagttccctcatctctcctactcccatctctaagaactctgccttctttccatcattgtagttattcacatctcttacctggatcacggtaatagcttctattttttttttaaactttgtttttaatttttatttgagatggcatcttactctgtcatccaggctggagtgcagtggcatgatctgggctcactgcaacctccacctcccaggctcaagcaattctcatgcctcagcctcctgagtaactgggattacaggcgcgcaccaccatacccagctaatttttttgtactttttgtagagatggggttttgccatgttggccaggctaatcccaaactcttttttttttttgagatggagtctcgctctgtcgctcaggctggagtgcagtggcgtgatctctgctcacagcaagctccgcctcctaggttcatgccattctcctgcctcagcctcccgagtagctgggactacaggcgtccgccaccatgcccggctaatttttgtacttttagtagagacggggtttcattgtgttagccaggatggtcttgatctcctgaccttgtgatccgcccacctcggcctcccaaagtgctgggattacaggcgtgagccactgcgcctggcctaatcccaaactcttgacctcaagcaatctgcccaccttggcctcccaaagtgctggcattacaggcgtgagccactatgtctacgtctggacttttcttttaattaagaaaaacagagacggggtcttgctatgttggccaggttggtcttcaactcctggcctcaagcaatcctcccacctcagcctcccaaagtgctgagattacaggcatgaaccaccatgcccagcctacaatagcttcctaactagtctctatacctttaggctttcccctctccaatccaacctccataccagtgatccttctaaaatgttaacttggtcacaacaccttgctgcttaaactctcaatggatctgctggattttcataatccaggccctctatacttaacagccccttttctggccacactcaacctacatcagacatgattaagactcctacttttggagaaatgcttctccctctgccctgaacacaattccctctcctcttcatctaataaggttgtagaacagaccttagctcctcctgacttcccaaactctagtatctttcacctgctgtgcaagcactagcctagtgtccaacacatggtagatacacaatcaatatttacatggtaagcggccagaggtacgacattactggtattagatagacacagactctttctccatctggtctctggcctgaatctaggatagggtcttaacttcttttgggccatggaccacattttctccattcattctctcgactgacaaaataataatcaatcaactcctactatatgccaggtactcttccaagccctgggcatgcagcactgaataagacagcaagtttcttctggaatttacattctagtggaggggatagaagataaacaactaatacacataatcaagccagatgatttcaaagagcaaacatgacctgaaacctgacacctgaaaggtgagtgattcttgccttaagtatcgggtaggaagtagcctgggcagagagaacagtaagtgccaaggcccaggtacggttacagcatagtggggtccaggagaaagatatgagatgagaataaagggagttctgcatgagactttggaggtctaagccctctgaggcccatttacagactctgctcaagaacccctgctgaagggttctcaaaatacttactctttcacttgcacagtggtggcgtagttggagcaggcactctccacggacacggagaagccccgcctgccttcagtggtggccggcatggagatgagcgtgacagagtagggcagctgctcctgaacagactctgtggagagtctctcaaacatgggtgccagcaccacctcattgtggcacttcccactggggagagggcacaggggggaataagatgctagagtcccacacagaagccccccagcaaccactgcaccatgtggctttaagcaacagtacccatagtctcactaccaccctctttgtcatgattctagctggctgctcagaatgaggagcctgggttctcagggtgggctgggactgggggtgctgagctagatctgcagcaagtggtatatttggaaaaacactggcctgggttggggtgagatggtctgggttctcttcactctacctttgactcacaatgagaaccttgcccttgtactattctattccatgggccccaggctgacttcttttatcaaccaaggtggttggacagggtgagctctaaggggtctttgactttaatgttctgggatcgtccttgaagagtgcctcccactgggaggattgcagggcagagtgaagacattttcaaggttggtaaggaaaaagggtagagacatgtgtaaatcattctgcttacaagttaaagagctggttaagagcactgctgtggtaagaatccaatgctctgactaccctaacactccttctgcccaactcaccctgccactgtccctccccgccagccactcttatatgggagaggatagacaaaggaccactatcttaccagtagagggtggcatgctgcaccagtgcatatgcatccccatcctcaatgatcaccttgcagctcatacaggcaaagcactctgggtggtacttgaactccccagccacctgtgagcaggtggggagaagggtgtacaaagggaggaaggaagtgagttatcactgttgctggagtgaggacaggggtgggtgaatgacctccaagcaaggcccccgtcaaaatccactctttcactctctgccctagagcttccaaaggaagtgtcagattggtacctcctgtcatttctgagactgcacaaaactgttttggtctcagttatgagaagaaatccccagaagtaatcatccccactaaaaaagatcagttcttccaatacagggttggcaagtctgtcactatgcttaaagtcgtttgtccagagcaggtataggaggtagcccctctctctgccagcctattccagagtctccttttctgattccctaaagacaacctaagtatatcctcctctcagcctgtaacactctccttggaggtccttatccaactatattgtgtctcctctctgcctgcctctcctcccactcccaacgttcaactattaagtctttgagggaaggatcttacctttcacttagtaggtgctcaattgatacctgctagttgaatgaatgaataaataaagggagatgccctggctgatggaaagactaaaagattaacaggccacagggaactggaagcactgtcaatggactctgaagaccaagaggggcagatatgaagggattcactcaccataaaaggccctgtcatcagcagggagcacccatgacagaactccccaaacttcccccagtagtccttggggcagtagagcttcccatccttctcatagtaccagttggtgagggaatcctggcattctgaacacctgaaaggcaagacaagaactgaaattctcctggatccctggaaccaggccacataagctgtccctggttcctaggtatgacaacaaaatggacagtcctctttgatccaaagccaagatggggcaaagttacagccttgtgctatctccccaagggaagctggttcagactgaacaaggccccagaaaccagctctgtgttgcctgcctcagtggacagactagtgtttcataacctctttgggtcttggggccctctgagaatttgataaaagccaagaagcctcccctagaaaaatgaatatataaagaagatgtgtatataatttaggtgggggacagggtgtatatataaaggattctctgaaacctatttatggcaccagttaaggatctctggtcttgacagatacttcaatgaacaaaagcagtttaatcatctccactcttcaaaactgacccatcaccaacagcgttaccaatgtaatgttcttgccaaaaatacgttaagtataaaaaaactaatcaggcaaatctagaatgtgggttattctataagaataaccggtcttgactcttctaaaaagtcatggggagaagaaaaggcacagattttaaaaaccctagagacacagcaaccaaatacaatgcctcaaacttggattcaaatttagattaaaaaaggaaacagccatgaacattttttggaacaactgaggaaatatggatttggactataatattatattgtaaaattgccgtgaattttcttagatgtaatgatatctgacttatataggagaattcttagcagaaacatattgaactgttcaagggtaaaatcaagatgcctttaagttactctgaaatagttcagcaaaaataaataaataaaagtatacagatagagggagagagatatatacaaagtggcataacattaacaaatcatgaatctatgtgaaaggtatgtaggtgttctttgaactacattttcaacttttctatatatttgaattttttttcaaaataaaatattggggaagaaacccaacattctattagcactgtgtaagatgtacatgttagatccatagctcgctgggcggggtggctgatgcctctaatcccagcactttgggaggctgaggtgggaggatcacttgagcccaggagttcaagaccagcctgggcaacatagtaagaccccgtctctaaaaaaaaaaaaaaaaaaaaaaaaaaaaaaaaaatctatagctcccttctcccctaatgacctggctatgaagctccacctctcaaaagtctggtgtgttctcaggacttacctgcacagacaacctcttcctcccttctgagcttcccaacacacacagctaagagctccctggcctgctgagcccatgccatctctttccttctagctccttcttttccctattcttgttgtcaaggccttgcaccttccacagtggccacattcttgcttccaagaggtttgaacattgcttggtttgaatcttgatcctgccacttactagttacatcatcttgggcaagatattttacttctctggcctagtttcctcatctataaaatgaactgctgtgaaaattaatggaaataatatgtattaaaaatatagagagcagctgggcacagtggcttatgcttataatcccagcactttgggaggccgaggcgggtggatcacttgaagtcaggagttcgagaccagcctggccaacatggtgaaacctggtctactaaaaatacaaaaaattagctgggcgtggtggcatgcacctataatcccagctactcgggaggctgaggcaggagaatcactggaacccaggaggtggaggttgcagtgagtcgagatcacgccactgcactccagcctgggtgacagagtcagactctgtctcaaaaaacattatagctagctagctagctagctagagatagcttatataaaagtcctaatataggcagggcgcggtggctcacacctgtaatcccagcactttgggaggctgaggcgggcagatcacaaggtcaggagttcaagaccagcctggccaacatggtgaaaccctgtctctactaaaaatacaaaaattagccgggcgtggtggcgtgcactggtagtcccagctactcaggaggctgaggcaggagaatcgcttgaacctgggaagcggaggttgtggtgacccaaaattgcaccactgcactccagcctggacaacagagcaagattccgtctcaaaaaaaaaaaaaaaaaaaaaaaaaaaaaaaaaaaaaagacccaatatagtagaaactcagtatgtgttaacttctattaaagatgatgacaatgtaatggcagctcactttatcagccacttactgtcactagctggacaacttctcttagtagctttctctcattgaaaataactaatagcatcctattactacaaagagccaatgtgaagaggaaataagctaatgtatgagagaaagccttttgccaggcaagtgcattattataacttgctaagcactgcagatataaaagataaatacacagggcaccctacttcacctttcatgagcttatgaagagttgaggaagagaaagtctaaataaaactcaacaatgcaaggtgagaggccacagtgagttctactacttctgagcactgcgggaggtagagaagaggggcaggaatgagttgaagcagctgagctagggaagtctagagaagcaagtccctgagaatccctttatctttctggagtgcccaattcctcctgggtgctcaacaaacactgatggctatttttaccctatagcttttcctacttgtcttatggaaggggaacttcagggtcttaagggctgggtatggcatgaagagtatggctgtgaagtgtctcaaaactgcacagtgaggttggaggcagaggggaagactgttcttggtatgtggctcacactcctctcaatataagatacatgtgggatgagctctaaatgaggaggagagagatatgggttcaagttcttgggtgctaaattgccttggacaagcccctttccctctctgggttgtttccccacctgtgaaacaagaggacaaacaataccctgggtccccttaactctgtgcatatctgtgtttttccctagatgatctgaggttctaatcttagcaccaccatttaccacctaagtgatcttgggctagccccttcacttctcatttgtgaaatggcaatgtcatcacctactttcaaggtagcagtgaggattttttcttttttctttttttttttgagatggaattttgctcttatcgcccaggctggagtgcagtggcacaatctcggctcactgcaacctctgcttcccgagttcaagtgattttcccacctcagcctcctgagtagctgggattactggcgcatgccaccacacccggctaatttttctatttttagtagagacggggtttccccatgttggtgaggctggtctcgaactcccgacctcaagtgatctgcccgccttggcctcccgaagtgctgcgattacaggtgtgagccactatgcctggcctgcagtgaggattaaatgtggttctgaagaactatggggtgcccaacagagggctggcagtaggagcaggggcttccttcttgcctcctgccttctgacttagaagttcctgggcaaccatctttcttcttcactagactgttagctccctgaggacaaaaacagcatcccacttactcttggtagactcagcaccaagcaaaggacctggaagagcaaagccttaacaaatatttccaaactgaaaatggtaggagtggcaagaaccagtagcccaggtaggggagcacaagggttccatggctcctggtcaccaggtccttcttttcttctgtgtgcagacttatttgcacccaaatgcaggcctgggctctgttacgcccttgcaatggtatgtgcgccgcagggcatgggagcaccagaacacaccctcctttccattgccaatatcctgcttttgtttgctgcaagtagctctggccaggcccaggagagggagcagggagacaaacaagtacaggcatgcaggagacagccaggccagcctgctgggaagaacacctggctggagagcaacgtcaccagtccacatatctgtgtcaaggaatgcctttaaagggcacagccagctatgtggccaaagtcactgccacacatgtctctgaagaactggaaggtgaacagctgacaggagggctgggtatggatccctaagctgtgttttgccacagaacacaactgggttctcagaccacttaagaagttgccatggtagacttcagagttctagcttagctatcaattaacagctactatttattgaatgccagccataatccaggtcctatatgaggtaccttatttatattatctctaatcctgacaaccctacggtagcaggattatccctgttttacagaagactgaaaagcagagttaaagtcaaatcattctgcaaagctgcccaatacataattgatggagctggaatgtgaagctatgtgtgcttggctgcaaagccacatccactgtactatgtcaccggagtgagacagcacatctcaacagctgagcctcaggattctcacctgtgaaaataaggaagctggagccctgacagctcaagaccctttgagtgttaacacttcgtgatgcttctcctttagcccaagtactgaatgttaaatagcacaattctcctccttcatatacttcacagtgttcaattccccagcagtctctgttcttttaaacaaagaacccagaacacactttggaactgtaaggtgctactcgaacatgtcccacctcagatgcttagaggccatggacatcatacgttcttcccaaagccaaggctgtttttctacctttcaatttttggaagtttcaagtgaaagtcaaaatctgccctggctgtaggtagaagagtacccagctgggaggtggtaaagctgaggtctgaaccagtcatcccactgtcctgaggagccagagtgaattgagctgaaatcctcaggttaggggagatcacctagaggcctacatacgctgaggctatgcctaaggacaacctccaaaactcatcttccaaaacattactgaggggttctgagggcttgggcagatacaaagtgcatggaaccctgatggtcagttcagtgggtcaacccagatccacacagagaccttttgagtcagcagagaacatatgagttttttaaaaaagataatcagttgagattttctctttcaagacctggatccatattccttctctgccatttaccatctgtgtcacccaaggccagttacttcatgactctgagcctcagtttcctcacttgtacattgctaataatatcttatggggttatgagaattaaattatgtacagatgtcttgcatgatgcctggctcacagaaggtagccagtaagtgttcatttctttccctccccaatttgagaccaccaagggcaaatgcagacagacccctttttctcctatgcctagcaatatggacctgcttctcagcccagaatgaaacagatttctgtaagtgaaaaagaaaggtcctaaaatgacctttatttatctatccaaatagaaatcaactttttttttttttttttaagagacagagtcttactctgtcacccaggctggagtgcagtggcacaatcattgctcactgtagtctgacctcccaggctcaagagatcctcctgcctcagcctcctgagtagctgggactacaggtgcacaccaccatgcctggctaattttttattttttgtagagacagggtctccctatgttgcccaggctggtcttaaactcctggactcaggtgatcctccagccttggcctcccaaagtgctgggattacaggaaggagccaccaagcccagctgaaatcaattgattctaatagatttctaataattaggaaatagttactgtgcatctaggatgtgtaagaacaagcaggcaaggtgctgtgctgagagaagccaagtgagataagatagaggcccagccctcacttacatccaaattcttcagacaaaaatgtttacaggtaaattctcaaccttatggggtaaaagaaccagtcattattgcagtggatttacacatgttaaagcataagccctcccatgtcctgaggaaggcctggctggatggtcatcccttaacctcccagtgaacagccagttgtagagaagcttctttcagcccctagcctctgaattgagtgggctgaaggagagaatgggaagctccctccaccacagcctgagggcacctggagagcaccacaactggggatgccaacttttccccagggcccagaagggcagatatgacaggggcctagagagactctgttccataagagctcagtcaaaaatccctttattactcctccttcctgcagatcctatagactgaaacagtctgccaattaagctgtaattattatggaatatgttattgttgttttaaaaaattaaccaaacacataatgaagcctacgaacagcaagaaataagtgttgctagagtgcactgattcagttccaaccaaaaaccaggaagactgtagtttcaagtattttgtgtagttgtactgcagttaaagacagggcctccattatttggcaaataatggaaaagagcttgtgtgcctctgaggagccacataagttgcagagctgggaaccattcacctgatccaagtccttcatttttcagataaggaaaagagtcccagaggacctaaggcacctgccaaaggttactgtgaagctgggcagagttatgcataattttttccctttaaacatggattgctttggaacacaaaggttcatttgttttcttcaagagataatgtgtaaacccaagctcattaaatcagtattggacattaagtgaaattctataaaaagaaaaatgctttaaagatgtccgacaaaagccactccctaatttacctcttttgtaaattccaatttgaggtattttcttacttggaagcacagtggtaattgcagctcacttctcacgctagtgtggtaggaaagacagtgcattctctgctgagtatgtatggcctgtcaggcaggggtgtatgggacacagaagttgtattcttcattcccttgctccctcttcctccctcacatgtcacgcctgatcatgtccccatggaatctggttgcgtcactttccttgcaaccacagccccagaactcccatagactttgtactcccccagaggcctagggtcaagaacttaatttgtttcacagaatccagcaaggaccctgttcaggagcccaagaagtctagcttctactttctgccaaggatgaaactgaggcccaaagaggagcccttgaggatatcctataataaaagagggaggggctaatggcagaaacagctttctgaccaggtagtgatgtggtaacggatacctgggagagcagagggtctgggtggtccctccctggggggaaagagccctgtgtggcagctatctcttcagaagtgacttcaggaatgtggcctcttatttggggaagggaagaatgtctacgaaagtcagtcagtaccccccagactctagctgggcaaacggagcttgggggtaggggcaagaagatcaggttctccagaaagcctgggacagaacaagacaaacggcaggtggacttgggtggcattagtggtctggcccttaaaggttcaggttgagagttcactatctgctctagcttctcctcttcctgagaagttgtgtcctccctggcttccctgcctctccaagggtaaaaggggtatagttcctggctcctaaaggaacaacccttctcctaagctgccttcccaggattaagagaaattaatgaggacctgaaatgtggctacttcaacacttggcatcttaattccacatgtaaaagctttctcctaaactcaagatcaatttccattggctctttagaaaacaatctcagccacaccttcaacaagtcaggcaaactatccctttttttactctctgctaggagaggaaaacaaacctgagaatttcctctccactaggagaagaaaacaaacctgcagccccctgaaggatgagagaaagtcaggaagacagaaaaagctgcccagtgaggctccatatgttaactctgttgaaactggttgcctcatctgtaaaatggggatatataatctctttaggctgttgagagattaaaggataaagtgtctagcagggcgcttggtagagtcagcattgaggaccagttcccttcccccttccccctgtccagacacttcccagcaatctaccagggtccggtcattccacaaaaccacatggtgcactgcttttctgcccagggcctggccacctgactagtatcccggcagcaagatctgggcactggacctagcttagagaagccagaagggaaaagtcgaccaggaccactggtgagggggaggcagcctttttggaacaacaggctgctcccaaagaatgaaaacaaaccccaccctagcctggaatggctccattcagaagggacccagagggccagaaaccccctggggagtttctatgggaggtggagtggggcaatgagcaaagaaagccaggttagaggtagagtttccacatctccctctgagaagccccacagagagaggctcgtggaggtacttaggcctagggactgaggaggtgtgggggctggcccagcagctcaggaacactctaaagcccattgctccagtcttagaagcactcgcccaggtctttccccagcaactacattcacctgggagctcagaagcccttcaaggccagaggcaaatgtgcctgccattaagagaacaaacgtttataaggtgcctactgtgtaccaggctacccacacccaggacttgccagtttccacagtttggcaaaacctgcccatcctgcttgttgggacaaattcctgggcaggcagcatggcccgcaggtaagacatgtgagagctggaaacagcactctatttgggctattccccccggaagcagtaacatctacaatgggcaggtcagtggcatcttttggaggctccttcaggtttgtctgggatagaaggggagctggagctccctaagaagttccttctgggtatatccctcccctcaccacttccaggacataatgggggtacctcacaaggccgattctccttgggtataacctccgctggcttctgcccggcagaaccgatggtaaaggactaagtgagaaggagatttagggagaccaccctcctctcaggaccaggggccaggagagatggagaggggaactcggagaccaactcaccgaaacaggtctctggaggtgaagtaagccgggactgacaagtaactccccatcttcttcccacaccagatagacaggctcagctgcaaatccgtctgtgactgcctcaggccggctgtagatggccaccatgacaggcccggggctcccggcacctctggctgcaggcaggctgccctgagctcacctctccctccggagcagctgcgggagcctgaggactccaggccacttggcccccagcagattcccacaggggctcatggctgggatggctcctccctagttctcagaagctcaggcggcccctctggactccgagaaaacgacctctctgtggaggctacacacacactggcattcttgagcaggggccggtgactagctaagaaagaagcgctgctgtcaagttagccttcttcttcagtcccacccctgaatgagggagggagggaggaagaggaggggctcccgcagaaccgaggtgtgtggttggagcagctgttaggaaacagaccttgcaggcaaggggtggagctgggctggatcgaggctgcaggcaggcgctgcagacaataactgggaccaattgagcgtccatcctgagctcagggaagggcaaggcaggatagagtgtgaacatatctggccccagatgtcctcaagcagaggagctgcctacaggacagtaattctgcttggaggtggaaaaaaaaaaaaagcagaggatgccaggtccaggaagagccacaccagacggggggacctctggtaggagagacaggtccagagagccatcctagctctgagctgccatctgttctgtcctggcactagggctcccattcattccctccctctgcctgtcctggggacagcctcaagagctgaccaatgggaggtgccacttccactccagggcagggctgtgttgcaaataaggaaacaaggcccagagtattaacctacacctgatgtgtctccatgtggcaaacactatatgcactcttttatttctctgagacaggaattattcccactctacagacaagaaaagtgaggtacagagagattaggtaactcactcaaggtcaaaaagggagtcagtggcagggctggaatttaaatgtaggctcatgtgactctagagctggagctctcccactaccaggcttcattctggctctttaaggagaaaaatcttttccaaagctctctgcaaataggatggagcccaggttactctcattcactcactattcactgagtgttcacatgcagaacaccatccattggcctcagtggacagtggagcttcttctacttgtcctgtgataaccatgcttttcaaactgaaaaatggggcatgagggagaaaaaggcctggggtgccaaaagggattgataagcctaggtatctggaatgggagcccacctgaacagcccccagttgtgacgatgaccaaaccagagcctaccatgtagaaagcccttgtctccctgcctgcaggattgtaaaggaaaaagcaaggctgctggaggaaaccagaacactcagatctcactactggatttggggcagtgacatcagctctcccttaccaggcacacaccgctcaccattgtaaagagccagaagtcaccgtgcagcttctatctcttactgtgaaccatggcaggaaagtctgataaagatggtagatggggttacaagggagccttttcccattccaccaactggacacagggacaacaatgcatgtgataagagcacatgggtttgaatactgttaagaagctaccatttattgagcagttaatatcttctaggccctgtgttaagtgcttagcatttattatccatcatgtttaaattgccagtaaaaggaggaaacgtcatcagcctcatttaacagattaggaaataggttctgaggggttatgtcactattctcaagacaaatagctgataagtggtgagggtgttttttttttttgtttttttttttttgagtcagggtctctctctgtcactcaggctggagtgcggtgatgccatcatggctcactacaatcttgacctcgaccttctggactcaagtgatcctctcacctcagcctccagagtagctgggactacagatgcgtgccatcacacccagctgtgaggctgagtttcaaacctggtacatatggctctagagcacaggtcaaggcactttttctgtaaagggccagagagcaaatatcttaggctctgcaggccatacagactgtcgtggccactcaattgtgtcattatagggcaaaagcagccatatataaaacataaactaagggacatggctatgttccaacagatatttacttatggaaagatttttttcttttttttttttttcttttgagattcagtctcacactgttgccctggctaaagtgcagtggtataaacatggttcattgtagtctcaaccacctaagctcaagtgatcctcctacctaagcctccagtgcatcctgggaccacacgtgctggccaccatacccagcgtgtgtgtgtgtgtgtgtgtgtgtgtgtgtgtgcgtgcgtgcgtgtgtcggagtctcgctctgttgcccaggctgcagtgtagtgtcgcgatcttggctcactgcaacctccgcctcccaggttcaagcaattctcttgtctcagcctcccaagtagctgggactacaggcgcatgccaccatgctcggctaatttttgtgtttttagtacagacagggtttcaccatattggtcaggctggtcttgaactcctgacctcaggtgatccacttgcctcggcctcccaaagtgctgagattataggtgtgagccactgcgcccggccctggcttatttttttttattttttgtagagacagggtctcactttgttgcccaggctgggacactgatatttgagtttcatgtaatttccacatgtcacaaagcattcttttgctttttttcccctaaccattaaaaatcacaggtcatataggccaggcatagtggctcatgcctataatcccagcattcgagaggccaaggagggaggactgcttgaagccagaagtttgagaccagcctgggtaacaaaccaagaccctatctctactaaaaaaatcagtcaatcaggccagtcatggtggctcacgcctgtaatcccagcactttggaaggctgaggcgggcagatcacctgaggttggaagttcgagactagcctgaccaacatggagaaaccctgtctctactaaaaatacaaaaattagccaggcgtggtggcacatgcctgtaatcccagctactcgagaggctgagacaggagaatcgcttgaacccaggaggcagaggttgcggtgagctgagttcgtgccattgcattccagcctgggcaacaagagtgaaactctgtctcaaaaagaaaaaaaaaatcaatcaatcacaggccgtattaaaataggcaatgggccatagcttgccggcctctgttctagaaccacagagctcaaccactctgtttactacctctaatagtgaagaacagctcttggtgtttgtgcagagctcagccatatctatctatctataccacgaagacaccacactctagccccagaggcagccagaagaaggaagcactgaacaggtgctcaccctgtattaaacattgcttgcagcactacttgtatgaatgaattttaacccccactattccacagtgctgtgatttttctctttacagataaagcaactgaggtacagggaggttaaatcacttgcctgaggtcactcagctgtaaatgtgagaagtgaagccaggatttgaacccagactagacattatagacaacgttctaccatgctataccaaagctcagcctgggcccagagccagactgtctgggtttgaatgcgacaatgcactgcatgtaagcccttggcacaaagtctgggacacattaaaggttgataaatgttagccattaatatcattaagactattgttacaactactgtgggctagctatgtggcctttagcaagtcactctctctgtctgggccttggttaggtctctaaatagctcccagcatcaacatttttcacccctatgaggttgcagagggctctctattttccttgggtctcaagttgagtttaaactcttgagcaggaggtcaggatcctagccgaggggacacacaagggccacagaggaggtgaggtgggctggaagtggggaaataacatacgggatactgaaagggctgcccagctggagagctgggagcaatctttctcccagccacacagacaactatttctcaccaaaaatctattatgttcccctgtaattcaatcaggcaagaagggggccccaaattaagtctgggactagcaaattatcttttaattgtaccctctgatttccatgtgatgaacacagtactaatggaagaatatgcaagccacaaagagactgaggccagggagcctatgagcataactcctcttgacatttcacacagctctgctgttccagcggcgacgggctcagtgagtcggtgtctaggaatgtgagcaggaggctgcaggcgctctcctctccccctactcctcttacaaaggacttggtgggtgggtggggaataagtgagaggacatctcaatgccatgaaaactgcctccccctggaagaggaacagccttctccccatgtcctgagttgaagcagaagcccctcccaggtggaatccatttgacctccaaaaattcagacttcaggaggaacctttgaaggattgatcaccagatgtgataagctgctggctgctcagacccaagtgtgtggttcctcagagccaacttcaaagggcccaagccacccatcactgggagatgaaatgtcacactggaggatatatttcaccctcccacccttggaaactggtcctggatagaaaactgctcttctaggtcctcagagcagctggcagaacattcatcagttatggctgccagaggcaactgcaggaatcctttgactggcaattatagtagggataaaatggcaggagaggtgttaatctccagcacatttcataagttggaaacctggcacggagctgaacaaactgactccttagaaccagctgaggcacaggtcttcaaagcgtctgtgacaggctggagaacaatagccttcataaccggcagccccaagtgaatgttcaggcaaggtgtggtaagtgaatgaatcaccccaaccttttgtcggaagaaagctctggtcaaacaattcaaaacccaagaaactgtttgtgtgaagccctctattggctgggaggactccaatcaaggaagagaatttttgaggactccgaagcctccaaatactgaaaggtaagcattaccacccccatctactaaccatctttcgtgccccactcctcccctcttccaaatcactttctacattatagcagcagtcatccttctaaaacaagggtcccgggcaggcatggtggctcatgcctgtaatcccagcactttgggaggctgaggcaggcagatcacttgaggtcaagtgttcgtgaccaacctggccaacatggagaaactccatctctgctaaaaatacaaaattagctggatgtggtggtgtgtgcccgtaatcccagctactgcggaggctgaggcaagagaatcgcttgaacccgggaggcggaggttgcggtgagccaagatcatgccattgcacaccagcctaggtgacagagccagactccgtctcaataaataaataaataaaatgtcccagcaattcccagcttcacagggttatgagcattaaatgagaacatatgtgaacaagctcacttcagtatctggctcatggaactcagtcagtgttttacagagtgagagtttagtatctgctactcctgtaatgtgatgtcatgttcacaaacaccaggtaaaagacaatatttggcatctatcttaggtatcatggaaagagaaaagaatttggcatctggatagaactttagagatttagtctaatcctttgttttacagttcatgaacttgaaactaggaatggagaattggaagcccaagacatatgaggataccaagtcacatgaaatgtgttcagattttcagactgggagaattatttcccaatatattgaaaaaagaaaatatgttggcacagtgatggaaccattgttagtaactttggagaaactggagaatgggtgcaatatctccaaagtgtaatgttccatatctactatataccaggcgctggggatgtattcatgaaataaaaatggagatagctaactggcccagttttcaaaaaggaggaaaaacatactggaaaaaggaagccttatgatccttttgctttgattccttcacataaattctaggcagatgatggaataagtggacagtaagcacttagaaaaggagctgatcatcaggagtcagcagtagtgaaatagtagtgactagttagacttgacttcatgttttcactgggttactcatcatgagaccttatcttggatttccacaggcatttgataaactctttcctgatatccagacagtaagaatgtgggcaggaaatctagaaaaatcagatacaagaactcaacatacccagcaatttgaggctctaaactgtagaggcaggattcctgaataccttgctagagctcacattgaggaaagggcatgggatttgagctcagaaaacttttcttttaatttcagtgctgcccttcccagcagcataaacttggataaattatttaacatctctgggcttcccttgtcctgcttgtgctatattcctcaagaggttgttgcaggaactgaactagatgatgagtacaaaagccctctgtaaactgaagatgcattataaacattagttattatcactgttctagtgctatagttgctcatcatgggggtcctgaatcataggtttctttactaggcatctgtggacacctggtatgggccaggcctatgctgggcactgacagtacctagtgcctgccttcacgtagtttgatctggtgatagacagatatggccacagggtccttcctgggtgtgatgtgcttggagacacattgaaggaacccttcccagaggagaatgaatgctgtgtcagagcagggcctggaaaaaggaggagaagacagcacctgcaggagatgtaggaggctgtaaaaggagttaagagagcaaaggtttgggggactcccagggagccttatgtggtgagtcatcaatggagtacagcaggaggtgaccagagccgttcctgagggaactaaggttcacagagaaggttgctgtttaaggtcacaggtctaggaactgacaaagctggagtttgacccaagtctttggactccaggtccaacatactaaaactgcctcaaataactattttattcttgccatttgatttacagtaatatttctgaaagtgtaactaaaggaatagcagcattggaccctctggtcagcttgttgaaaatcaagattcctgagtcccacttcagatatacagaatcagaatcgctgagactggggctaagaatctgcattttaaacaagccccagtgtttctgatccacactaacaattgaaaaccaatgcttttctttttcctaagtgcttttccacttgatttcattttattctcacaataaccctcagaggcaggcaggatagatcactatcattaccttgttacaaacgagaaaatgaatgtacagatagcttgttcatcttcttatcctgaacgtagcttaataaataaatgtttggtgattgacattttgttaagccttggctaagtagagactttcaccttcctggtgccactcttacccatttgtaaccccacagtagctgcctctctctttccttggtgacgcggcagtggtgctcacgttatggtataaaaaggtgattctaggccaggcgcggtgactcacacctgtaatcccagcactttgggaggctgaagcaggcagatcacaaagtcaggagatcgagaccatcctggccaacacggtgaaaccccgtctctactaaaacacataaaattagccaggagtgggggtgtgcgcctgtagtaacagctcctcgggaggctgaggcaggggaatcacttgaacccggaaggtggagattgcagtgagctgagattgtgccactgcactccagcctggcgacacagcgagactccaactcaaaaaaaaaaaaaaagtgattctagaagatagcgtcattccatgaaagtgctatctctggaactaaaacaaatttcaaacaaacaaacgtgagggatgacattagccaacttcagaaacggtgcttctgcaagagtcagtgctactgatggcagtggagcaccctctgatctcagcaaaatctctatagggcatcatcaggaagtcatgaccagaatacagctgacacacaaaagaaaacaaccttaactcaagtctggcatgagatgctgagggttttttttgtaatcgtaagcagtatggagaaagaatttgttagcacacttccagcactgcccatgggagaagggactctagcttttgggggaaaaatgaaaaacacggcaaaataagcacagcaggttgctacagttgcagaaggcatgccattccttgaggccctggttttgatggtttaagacttagggatgacatttacagactgaggtcttagtctacataagtttgagcttatcttatcacctcaaaagataagctcttgcctaaaagaatattgtagagcgaagagatggtaatggtgcatactggatggactttattcaagtgtccaaagagtcgttcaacaaatacatcattcacccagcaaacactctgagcacccactacattctaggcactttgctaagctctgggatacaaagacaaactagatacggctccacacttggagaatttcacactctaagagtgatgctagatgtgtaaacaaatactgaaatggatataactgaggtatgaagagaataacgaagagaataacaaagagagaagaagtctctgattggtggggagaggtatgggtggatttggcggggggctcctccacagaagatgggatggtattggcagactctaataggctgattgccaggcagtaacaggcattctggcctgaaggaacaacatgtgcaaatgcactgaggcataaagagtatggtatgctcatataacgctgagcaggtctgtaagctctagtgcatggcacatatgggcagcaattagacaggaggccagaatggtggaagagagtaggggcagagcactaaagaccaagtctgctaggctaaagagttgcctacaggcagtgaagagctatcagaggtatttaagcaagcagtgatttttaacagaacgcaaagctgaaatgccaaagagaatgctgatctttagttgccagtttggctctctgaatgggtataaatgcctaaagtctacagttggccgtgtatatgcccatgtgaaatttgctggccaactagtgttcactaacagcagagtatgcctttgtcctggggccacatctctactgccttgtcattttaacagctgatatttgtctatatgggctgtaagcacataagcatggaattgcaaccccttatagataatcatccactgttgctccatgatactaattagaaaattgaatgtctaacattgagtaacaaatgctgtgttgacagggacatccttctccaggctgcactgggaaaaatgcttcggatatctcaagaaatctctaggcaattcaaggaaaaaagccctcgtctggcagggaacacctgaaaaatcaccctggttaacagaaaatctgcgtgtgatcttaggcaagccattaaatctctctgggcttcaacttcttcctctgtaaaaggaaggagttaggtgagcaaaaaattccatacccattacaggtcaatgcttaaagaagcaacgaggaaggaggtgtgatcaaaggaaggttgactggtggaccacccagagaactcttcaaggctgatgttttcttggtgaatgaccctaatctaggcctagcttttggcctttcaggtttttgaccttcctaatgtccaaagaggtgtagacattctgtgatggttctgacctaaccatttatcaaaccctctgtacacttatgaattgactattaaaatcagaacactcatatcccctatacaggtactacttccagacccttcctgttattaagtatcccaggaagctgaattaggcatcagaaggttgctctgtgagcatggacttaaaataaagggaaatgagtagccactgaaagaaatttcatcctggcagtggtgagtcagccaaactagcccaggttgccacaaaggaccctattctggtgaccaaatctagattcagcatctttatctgaatacagtactagttttgcttcactaacttttcactttctgtttcattgctggccacttatttattatattggttttggttttttttttttttttttgagacagtgtctccctctgtcacccaggctgaagtgcagtggcacaaactcggctcactacaacctccacctcctgggttcaagcaattctcctgcctcggcctcccaagtagctgggattacagggacctgccatcatgcctggctaatttttgtacttttttttttttttagcagagacagggtttcaccatgttggccaggctagtctcgaactcctgacctcaaatgatctgcccacctcggcctcccaaagtgctgggattacaggtgtgagccactgcgctcggccttatattggtttttaaactaagttttaattgaaaaaaataactacttctttagatatgtgcgacaatcaccaattcacacatattattcagccctggcagacatttgcctctctagtaactaataacaaagaacaaacattcatgagtgctctgtgaatagtgttcccagtgctacacacacttttattcacagtaatactgtgagggtaggttgtaaggaggtaggtagtaagtttgtatctccatttcttctttttttttttttttgagacggaatctcactctactggagggcagtggcgcgatctcagcacactgcaacctccatctcccaggttcaagctattctcctgccttagtctcctaagtagctgggattacaggtgcctgccatcgtgcctggctaatttttgtaattttagtagagacaaggtttcaccatgttggccaggctggtctggaactcctgacctcaggtgatccgcccgcctcgacctcccaaagtgctgggattacaggcgcgagccaccgcgcccaacctccatttttttttttttttttgagacagagtcttgctctgtcgcccaggctggactgcagtggcgcgatctcagctcactgcaagctccgcctcccgggttcacgccattctcctgcctcagcctcctgagtagcagggactacaggtgcctgccaccatgcctggctaattttgtgtatttttagtagagacgcggtttcactgtgttagccaggatggtctcgatctcctgaccttgtgatccgcccccctcggcctcccaaagtgctgggattacatgcgtgagccaccgtgcctgctggcctccatatttttttattttattttattttattttattttattttatgtttatttatttattgagacagagtctcgctctgtctcccaggctggagtgcagtgacatgatgttggcccactgcaacctccgcctcctgggttcaagcgattctcgtgcctcagcctccaagtgagtagctgggactacaggagcatgccaccatgcctggctaatttttgtattttcagttgagatggggtttcaccatgttggccaggctagtctcgatctcctgacctcaagtgatccacctgccttggcctcccaaagtgctgggattactggcgtgagcaaacgcgcctggctcgtttctttttttttttttttttgagatagggtcttgctctgtcatccaggctggcatgtagtggtgcagtcatggttcactgcagcctcaacctcctgggctcaagcaatcctctcgcctcagcctcctgagtagctgggaccacaggcatgagccaccatgcctggctaaatttttgattttttgtggggatgaggtcttgctctgttacccagactgatcttgaaactcctgagttcaagcaatcctcccgcctaggcctcccaaagtgctgatattataagtgtaagccctgcacccagcctgtatctccagtttgttttttttttttttttttagactgagtctagctcttgtcacccaggctggagtgcagtggtgcaatcctggctcactacaacctctgccttccaggttcaagtgtttctcccgcctcaggctcctgggtagctgggattacaggcacccgccatcatgcctggctaatttttgtatttttgtagagacagggtttcaccatgttggccaggctggtcttgaacttctcacctcaggtgatctgcccacctcggcctcccaaagtgctgggattataggcatgagccactacgcctggcctctccattttctagatgagaaaaatgaagcacacaaagggcaagtaacttgcccaaagtacacagataataaaaggcagaaccaggatttgaaactaagcaatctggttctagagtgtgctcttaactacaacacaatactgctttcattacttgtggatctaattagttcaactcacagaggacaaacttcatttccaacttcttgggggaactgccaacctatccaccccactccccatcataaatcacctataagtaaaagatactatgcaagtattccattttttccactctatattgaatatatatctttagttaatgccatctttcaaatatacaatttaagaaaacaaaatgaaacaaaacaaacttacgattggaattgaaatttttcagatttcagggcaattcataatcagtttggtggctagagtagctgaactcattcttcctctcttgccctcctctccggaggtacctagggcttgttcctgcctggattgtagctacagagaagtgcagctcaagacctgctgctggaaagaaggactcctggggtcagcttctctggcttctactcactatgggatagctcctctgagggcaaaagacaaagctttaacttatcaccctgacacttgcaggcaattttctaaaacaacccaatgtccggaactgattccgtcttgccatttacagtaactgcagccacggtggctgctataggaaggatgtggggaaggggaaggggaagggcagggaaaagcctgacttacatcatatctcttggccacctctagcaattcattcaacaaatatccctcctatgccaacaatatgctcagtgctgacacaatgaggggcaaaaaccccacagtccatgaccaaattgttctattagaggtcttaagatatcattaaggagatgatcacatgaataaatgtgagattaaaactacttttttaaaaaaagcctcaaaggaaaggtctatgaaaacataaaacagggacctaacctatttttcagggtgaggaattacttctatatttctctgagccatccaggtaaagatctaaacgataagcaggagttaagtgaacagagtaagggggcattctaggcagagggagcagaatgaacaaagcccttgtcagaaggagggcctgtccagaagagaggtgaggctgaagtgcagggagcaggaggttgtggagatgtggagagaggccacattacggagggctctactgtaggccaaattaaggaatttttttttttttttttttttttgagatggagtcttactctgtcaccaggctggagtgcagtggcgtgatctgggctcactgcaacctctgcctcccaggttcaagtgattctcctgcctcagcctcccaagtagctgggactacaggcacacgccaccacgaccagctaatttttgtatttttagtagagatggggtttcaccatgttggccaggatggtctcaatctcttgacttcatgatctgcctgcctcggcctcccaaagtgctgagatgataggtgtgagccaccgcgcctggccaagttaaggattttggtctttatccaagaacactgggaagttgtggaagtatacaaggtaggagagacaacacagagtgacacagtcaagtttttttttgttttttttttttttaagatcactccttccagccaggtgcagtggctcacacctgtaatcccagcactttgggaggccgaggcaggtggatcacttgaggtcaggagttcgagactagcttggccaacatggcaaaaccccatctctactaaaaatataaaaattagctgggtatgggggccggtgccttaatcccagctacttgggaggctgaggcaggagaattgcttaaacccgggaggcagaagttgcagtgagccgaaattgtgccactgcactccagcctggggaacagagtgagactctgtctaaaacaaaacaaaacaaacaacaaaaatcactccttccaactgctctatagagaacagattagggggtgcagagtggctgtgggagatgaggctattgcagacatccaggtgagatgatggtagcttggagcagggtggtggtgggagaaaaggaaagaagtaaacctaccaaaatataatttagagataaaactgataggcttggatatgcaggatgagagagaacaggtatcaaggattcctaggtttctggcttaggcactgggtggatggtggtgcctctcaatgacatacatgtttcagtggaagaggagccagttttagggggaagagtgaaagtccagcaaagtctagagaagagagtctgaagtgcctggaagacattcaaatggacaagccaggttgatagtacaacatatgggtctagaactcagtggaaaggtttaggctggagatactgattttagggtcatcagtgtgtggaggacaatggaaggaagtcatgagtgtgtgtaagactgcctaaggagaaaacagcacgcctgaaggaatggtaacatcccagagctggacaaagaaggataagcaaacaggtattaccagagaggtaagagaaaaccaggagagtgtggaatgtcatgaaagccaagggaagagaacatttcaagactgacagatactaataataaatgctaacatctgttaagtcccagtcatggccagacattctgctcaggactttgaatacatgattgaatttaatgttaacaactttttgaggtgggagccatttcccttttcatagacaaggaaactgtggcaaagaatggttaagcagctgactcatggtcaggtggctggtaagtgaagctggcatttaagctcaagcagcctgactccgaactttatccacttttctctaatacaacccttagtgcagtttgggaggtcatataagatgaagcctgaagagtggtcggtagacagactgatgaagctgttattcggaatattactaaaggaatgttgtttcaggggagaaacagaatgaaagccaggctggagcccatggttaggaatgctccatgacattctctatttccagctgtcttagggaaccagttaagagaccaggccaggtgccgtggctcatacctgtaatcccaacactttgtgaggcccaggtgggaggatctcgagcccaggagtttgagaccagcctgggcaacagagcaagaccctgtctctacaaaaaattaaaaaaaaattagctgggcatggtagtgtgtgcctgtagtcccagctactcaggaggattgtttaagcctgggagattgaggctatagtaagctatcatcatgccactgcactccagcctgggcaatagagcaagacctatctcaaaaataaataagctaattaatgaattaattaagaggccaggctagtatgccaactccgtatcccccacagtgcctaatttgatgacttttatatatagcaaatgacgcttgatatatttggatagttaatataagatgcacaatgttgccatgtgctgctgctaatccttcacattaaaccattctaatgttttcagagtccttgatcatcacaactactccatgagatggatttcttttatgacattttacagataagaaactgaggctcacaggggctaaggaacttgcccacagttacacagttagcctagctcaactaagactcaaatcagattttctgtctccaagtctactgttttttttttttttttctcctgggagtcctagtggaaagcagactctcttgggagccagggagacctgagttcaaatatcatctgtgtgaccctggacaagttactccaaacctttctgggccttcctgttttagtataaaatgggggttgcactggccaggcacagtggcttacttccgtaatcccaagcactttgggaggctggggcaggaggatcgctggagttcaagaccagcctgggcaacatagtattaataagaccttgtttctacttaaaataaaaaaaaatggcaaggtgtggtggcacgcctgtagtccaagctgcttgcaaggctgaggtgggaggattgcttgagctcaggaggttgacactgcagtgaactatgattgtaccagtgcactgtagcctggacaacagagcaagaccctgtctcaaaaaaaggtgggggttgcagggttattatgaagattgaatcagataatctaagtgaggttcttaatacaacgtttaattaatatcagttatctatctctggcctcatctctctccatttttctacctctgcctcctatagaagctgtgaaacatctgtgggtccttagttctctcttctcaaagtaaagagcaggattaaggcacattcaagctcatatgctgctgctacatcctaggagtaccactctgtggtcaggctggagtctcttgtaggggcagaggaagaaccagatgtctgcccttccttcctctgtcaggcaggccccagccccctgtccaatagccagccttaatgatctacgggctggctgtttcctaaaagataaactggacaaatgagtaaacaccttctggagaaggccacagccagaatcaaaggtttaggttagtaagtgtggcagcaacatcaacagcataacagcagatggcagggttgctccactgactctacatcaggagcctgagacccagaagaaagttaacagcacttttgttgacattatagagtccatgaagcctttaaactaacacccttcaatgttatctgacactaccagtgtgtggcaggcagggtgagggctctttaccccatattatataagaggaaactgagcctcagtgaggttaagaaatatgcttgcattcaagaatgccaagagactcttgcaggcaaggagtaagaatgcctgagttcaaatctcagctatgctacctattagctctgtgactttaaacaagtaacctccatttccctattctcgaagtaggtaagactagtactacattttattaagtcattgtaaggattaaatgtgctatgcatgtcgtatgctcaggagggtgtctggcacagagtactcaataagtggtacctattactgtaattatgattctaccaggcttgcttagatggggatgaggggagagaaaatgaatgtggctttcagcatcacagaaagtaccctgctgtcagccaacatattacaacacagtctctggttgctacgtgtgttatttcttcactggccttcctggagtcactaaatttagcggaaatggtctgttgcctgatgcagtgaccacagtcttctatctgcattagccctttcccagagtataggtattagtaaccgcttttcaaaagtgaaagctcaaatagtcttatgtttgcaatcctgagaaaggaagtcctgaaagttcccaggagccttaagagcggtggattttccttctgataatgctgctaggaaccaggtcaagcaatagagacccacgctggggccatcaagactaataggggtagcttttcttccctcctcctaagccaaacacctttgatcagggtgaacggacaatcatcaaaaaagttgtcaaggtcctctggcttgctaacatgccaagaggccaggtcaccattgatagctccacactttaacctcagctacaaatgacatgctctctggctactctcctggcctctcctaaggagagagagccaggtccagagaacatcagaaaggattgccccagatacagaattaatggcactgctcaaggaaaggaaagagaggtaactcagagttttaaaaaaggcctactgggctggtccaagtacaatagtgtttacaagtaattgatcactaccagttaccgatttctttgttccttttccactcccacaatttcacttcactagcctaaaaaaaaaaaaaaaaagaaagaaagaaagaaagaaaaaaaagaaaagaaaaaaaggaaaaaaaagaggcctgttgggaaggcttgggaggactagtcagccatatgtccaggagatccaaaagattctggccagctgcctaatcgcaccagcacaattactgacagagctactttcagttttgtcactggcctccattgcacagtctgaggttccagctttaagtagcttcctgttgtcctgggcacctgagggtctgtcggaaggctaacagaggcaggattatggatgtggctgcagacagaagaatggggtaatgtaagggagagatgaggggaggagtttaggatggaccccagcaatttctccattcaatatccagccccaccctgtgactaggaaaacaaaggtactgggggaaggggagaagaaaagtcatttcctttattgtaactgtagcccagctgggtaagagcaaggctggaagggggccttgaagaatgaatttctctgagtagcacagagggagagtcctcctcccagcaggcctgcactactcaggtactctaaattcatcagagaaacactggcaagctggcgtgggagagatcttacaagaccattcaggttgatgccccatgttcctcaaaacccaggttatctctggggtcagacaaatacaatccttcctagccctgaagattttcctccaactggggcaaaagtcaaattagatccaaaagacagtcactctccccagggcaaattaccaggctctatctgagggcgccgtgacatccagtttgaatttaccaggggaaagctcagaagtcaggagatgtgctccttcagcacagctggattagagtctctgtcctcaaggtaaagctgcaactaggagacagaacctagatactctacttcctccacgggaatgatatttggcttgattgtgtcagggtagttcaaagttgcccttaatccctggggctccacatcagatcaccaatgaatgtgtaataagagaaatgtatacatataggtgtatatagacacacactcacaacataatataaagtgacagttactgattattaagggttttttttttcatttgttttgttttgagacaggggtttcactctgtcccccagctggatggagtacagtggcatgatcacagctcactacagccttgatatccctgggctcaggtaatcatcgctcctcagcttcccaagtagctgggactacaggtgtgtgccatcacgcctggctaatatttttgtattttttgtagaggtggagttttgccatgttggccaggctggtctcaaactcctgggctcatgggctcaagcgatccttctgcctcggcctcccagagtgctaggattacaggcataagccaccacgtccggccctattaagagttttctatatgtcagatgctatgctagccactttatataggttatcacatttaatcctccctaacaaccatgtggcatgagtaatattcttatcctcattttacagattggtgcctgaagctcagggaagtcacttaaggctagttaataaattgcaaagccaggatttaaaaccatagtctcattccatagcctgtactcttggtggtggttgtttttttgcgatggagtttccctcttgttgcccaggctagactgtaatggcacaatctcggctcactgcaacttctgcttcccggattcaagcgattctcctgcttcagcttcccaagtagctgggattacaggcatgtgccaccatgccaagctaatttttttctgtatttagtagagatggggtttcaccatgttggtcaggctggtctcgaattcctgacctcaggtgatccacctgccttggcctcccaaagtgctgggattacaggcgtgagccaccacgcctggcctgcctgtactcttatctaccatgctaacgtgtctacttcctctttatgtatttgtgtacatatgttatctttctgtctctatctcacacacacacacacacacacacacacacgcacgcacagagctaacaagctagcatctgactagacctacaaatgacccaagagttcagtgctagggccagctcttgtcatccatggcctgagcaagtctttttggtttcaggcctcatctgtgatatgaatgggttataccatatagtgggtggtttcttctagttctgaagttttttagctctaagagaatccagaaattccaaagattaacttgctctaccctgtcctgcttattttggatagaaaatattcatacacataggaaaacagcaagaatatgaacatatgggttacatgccaaggcgagacccaatctgtgaactcattgggttttgacgttacttattagtcccagctataaaatgaaaggaccagccaaaggctttaactataaggtcccttacagctctgacattctctgctcctgtcatactaaatggaacagaaaagacagaatcaacttccctgggagtaaaaggggcaagaaccaaggcaataagatccacagaaaagacttgagagctctgagttatagctgaaaggaaaggataataatgatggttgctttccaactcttccagaggccagacgtctccaggccaatcccctatatggttcccagggaagaggcaagtgtttaaaggtcaactcaattacttggtataagcacagggatgttttacaacaagagctatgtgcaggagctggaatctacagcacaaggtgcctgcctagtctatctcattctcaggatataggcacagccctaccacttcagaccttgggggccaggcatgcccatccagcctctggagtggactgctcttctttccaccaacaaatttcaactattttacgttgtgaagaatataaagacaagttcccacccttgagaattccaatccgatgggaggaaggaataaccattcactgggtgtctaccatgtactggatacactgcatatattatttcattcaatctcaacaagattattaccatccattttccagatgaagaaactgagcctcagacagcaggaacaaatctgatttgaagtctgtataatttttaagaaactgagctgcctacaaaaataatgtagctataggcagggcgcggtggctcatgcctgtaatcccaacattttgggaggccgaggcaggcggatcacctgaggtcaggagtttgagaccagcctggccaacaaggtgaaaccccgcctctactaaaaatacaaaaattagctgggcgtggtggcaggtgcctggagtcccacctactaggggggctgaagcaggagaattgcttgaactcggggggcagaggttgcagtgagccaagatcacatcactgtacaccagcctgggcgacagagcgagactctgtctcaataataataacaataataataataatgtagctataataaagctagtaacaaaaagtaggaacctagggaggcaacctgtggtgaggaagagctggctctgccaaccacactaaaaacaactcttggctgggcacagtggttcacgcctgtgattccagcactttgggaggtcgaggtgggtgcatcatttgaggtcaggagttcaagaccagcctgaccaacatgttgaaacccccgtctccactaaaatacaaaaattagctgcgcatggtggcaggtgcctgtcatctcagctactcaggaagctaaggcagaaaaatcacttgaacccagcaggcagagattgcagtgagccgagattgcaccactgcactccagcctgggcaacagcaagaatccctctcataaaataaaataaaataaaataaaataaaataaaataaaataagaatacaaacaactcttgaagtacctgcataatctgtagtgcagccacaggaaagtcactcttcctgggcctcagtttcctcacccataaagtgagggatatgggacaaccctggaaagggctcctctcatccccccaccctgcctccagctggcccatttatggctcttccaatttaacctgggttcaggggggccacacttgaggtttggtcatgagctcttccttggtacattcctttccccaccctaagattgaaattctcaactcagaagcttgtttctgtgttttccatcagaacatgaaatagtgcttggcccatagtacactggtaaagatgggaggataggcccacctaccggaagcaagagccgtgccaggtttcgttgacagtcctgtaccatatctggcttggagcaatgtggtccccacagcctggacacctccagacatcttcacctgcacacaaaaccaagaggttgagaggcccaaagtagcaggaggcaaagggacaggattcctaccatgtagaataagactgagttaacagcatctcatttgaaagggttaggccaatgctctgctagatgcacagtttctgcctccacaagatctctggtaagcacttgtccaacctctgctcatctctccagggacaaggaactcatggcctcaaaagtagtctcattccattttctaaaaatggttctgattatccttttttctactgaaacaaaacttgcctttttctagaactttcagcctttgcttatagctctgagaagaagaaacgaacacaatctccttcttttcagtgtcagcccttcctatgactattcccagccaacagccagaaacttctctctgggttaaacatgttactgccttttcctattcctcaaaagccctgttttttcagatttttccatcacctaatccaagagctcatttactcaaccaacattgaataaattggtcctctagatcagcagtcctcaacctttttggcaccaggggccaatttttccacggaccctaggctgggggttggggggcggggggatggttttggtatcaaactgttccaactcagatcatcagccattagtgagattctcataaggagcatgcaacccagatcccttgcatgtgcagttcacaatagggttcacactcctatgagaatctaatgccaccactgatctgacaggaggcagagctcaggcagcaatgctcactggcccgccgctcacctcctgctgtgcagcctggttcctaacaggctacagacccgtaccagttggcggtccaggggctggggacccctgttctagatacaaagctctttgtatgttggaggctgttagattacataatctctgctccttaagaagcaaatccactggaaaagaactgctctttcatgttgttgatttttcacttggatgttatttcagagatagaaccaagtattattttagttcagaaaaagaaaagtaatgggtataaaaggggaagaacaaatatttaatgaatgcctcctatatgccaagaactctgctaggtgctttcatagacctaatctcatttaattctcaaaataatcctgtgacacaggtattattatattcacttaatggataggaaaattaaaacttgaggcagggggcagggttgactagctaagtggtggatctagcattcatactcaggtctggctcattctaaagcttctgctctttccattctaccatgtcaactcttgttcactccaatgaggggaaccaggaaagtctttgtagaggaagctgacacttgagctgagccttgcaagatagggaagacttacctatcactggctgagaaaggagggtgaagggttgtgtgagctcagagaccagcatagacaaaagcacagagtcggtccatgttcctccaaaaagagaggcctcaaacaaaatacaatactcctggtatggctcagatgtcaacttcttgaaataaagaggacagctgagatcaagctgtggtacctgactcagccctagaaagcaggacaaggttgttacaagactcccttgtgcgctctgtgtatgcagctttgttctctctgggtaactacagactgccacaggcacagtgacagtcaccgaaccctgtttcacaggcacaggggccatgaatagacaaagcacagctcctggcacttcaagattgctcaacatcattctggagcagccaatgtacacagttgtccccctcgttccccagagaagagttaaacaagctggcaagaggccttaaaacaccacctcaacccacccattccactcttctcatgcctcagtaataggatatatatatgcccatcactcattcttcctgggtctaaaatcctcagactccttgtcaagaggggcctttttggttttagggtgacagtggtcacagagtatgccatctctctcacaaactccaaggcagaaagtctgagagactcactcaaaccaatcccaggttgggttacggacagtggacaagacaatgaattagtgagagattttaatgaacacaaacatccaaatgaatcttccaagttttggaaatatttttggaactcttacatgtaagagctttcagggtcagtttatgagctgccatgccccacccccagcacatctcattattttagagccacaccttgtttcttgtttttactttttaacccaaaattaagtctgtaacctgaccacccacttactcaacaattcaatctcttggctctgaatgatttctatttccaaaattcaaacaggatcaggactttccaccatgaggatattcaagataacttgttattgccataccctccagagcttgccctgctttctccagtcttgagaaacccaaagacattcaatcaacacatactttagtacctgctttgggttaagcatgaaagacccgaaatcaagaccctctactctctcctctcatatccacctggtttcactttccaaatgtctctctagcccttccctgtccttcaccccagccctacttcagatttttggcttcttttccctatctgctgtactcagctggctcatccacactgcaagctatctcagctctgggttagactccccagtgtccacggaacaaaggctgggctactcggtatgacacccctgttctggatcccattccatcttacttcttagaagaagtgcacttttagttatctttacagcacccctctccctcactggctcctccttatcttttaaataagttcaagtcactgccatcaaaaaaacctctggtactctcgcttcagcagcacatacattaaaattggactgagacacagaaggttagcatggcccctgcgcaaggatgacatgcaaactcgttaagttttaaaatctaatttagttttaaaatctaattttaaaaaaaaccaaaccactggatccttttctcctctagctaccatccttgtttctccccttcacagccacatgtatgaaaaagttgtcttgggaggccaaggtgggtggatcacttgaggtcaggagtttgagaccagcctggccaacatggtaaaaccccacctctactaaaactacaaaaattggctgggcatggtggtgcacgcctgtagtcccagctactcaggaagctgaggcaggagaatcgcttgaacccaggaggtggaggttgcagtaatctcgccactgcactcacgcctgggcaacagagcgagactctgtctcaaaaaaaaaaaaaaaaaaaaaaaaaaagaggctgggcacggtggctcatgcctgtaatcccagtactttgggaggctgaggcgggtggatcacctgaggtcgggaatttgagaccagccatgaccaacatggagaaaccacatctctaccaaaaatacaaaattagccaggcatggtggtgcatgcctgtaatcccagctactcaggaggctgaggcaggagaatggcttgaacccgggaggcagaggttgcagtgagctgagatctcgccattgcactccagcctgggcaagagtgaaactccaactcaaaaaaaaagaaaaaagaaaaaaagttgtctacacatcgctgccctcatttcctcacttcccactttctgcataatgcactgcaatctggcttccacccccaccatttctctgaaactgtctcaccaaggtcaacagtaacagtaactgcttattgctaaattcaatggacccgcttcagtcattctttcagcaaatatttattgcatgccaactatgcatctgacactgtgttggggaaagaggagcaaacaagagagagattaaacacaaagcaaatattaaacaataatataattatttattgagggccgggcgcagtggctcacgcctgtaatcccagcactttgggaggctgaggcaggtggatcacaaggtcaggagttcgagaccagcctggccaatatggtgaaaccttgtctctactacaaatacaaaaattagccaggcatggtggtgggcgcctgtagtcccagctactcaggaggctgaggcaagagaattgcttgaacctggtaggcggaggttgcagtgagccaagatcattccactgcattccagcttgggcgacagagcgagactctgtctcaaaaaataataattattattattatttatttataattggggcaagtggtacgaagatatcaagttcataactaggaaaagggcgggcggccaaagtattccttgaggaagtaatttccaagctgagctctaaaggatgaatacaaattaacggggcaaaaaaggggggaaggaaggctaacactggagaggggggacatgtgcaaaggccctggggcaggaacaaaaacttctcacacatcattaaagttggcttttgctacctccaaagggctagcaaaccatgtctggcccctggtctgctacaatccttcaataaacagttactgaaagagcaaatggtccttacaatgtggtcccaaaggacccttctctctcaccattccttacaaaagaatgctctagttacattttgacctattttctattcctgccacttttattcatgtacttgcatcctgacattcacacctccagttattctctatgtataagcttctctatcttttcccttaatcaaaaaaaaaatttttttttttgaaacagagttttgcttttgttgcccaggctggagtgcaatggcacaatctcggctcaccacaacctccgcctcccaggttcaagtgattctcctgcctcagcctcccgagtatagctgggattgtgggcatgcgccacgacgcccggctaattttgtatttttagtagagacggagtttctccatgttggtcaggctggtctcaaactcccaacctcaggtggtctgcccacctcggcctcccaaagtgctgggattacaggcgtgagccactgctcccggccccttaatcaaatttctatcctttctttaaagttccctaaaatcaggcagtgtttgtttcattttgtctatacctattttacataatttgttatttaattacagttcactgcatatgtttctctctccttcagtccctctctctccactctcctcccccacaccccattcagagaactaaggtgtaagaactgtatctttattatgttcttatctccagggcctaaccttgggcctggtgcaaaacagacattcctttgtgtggtgaacccaactgaaaatttggatccaactgccagctataaaagcaatttccaaagataagttccaaaggtcagcacagatgattccactggaataactgttctggctcccagattacctatgagtagtctcatgtggataaacctggcctcagtttacctgttatgcattcacactgcttttctgttaggaagtacctgagcaaagatattcacccaaagcacacagcctcctacgcccagaccctcttcaagagaacactcttgacttctttagctctcttacagtcttaaaaattcattgatctattctcttaccacctttattctaggaaatgtaaaagaaatgtaatactgtaatgcaaagtcttagggatttctgtgaagcctagtggaggatcaatccaaagtccagtcagcctgggaagttctttcttaagaaaatatctcattgtaccaggctgttcattctctccctctatagtgtttacctctcatatttgcagacttatcaacagtggctactgattgttaagagtccagaaaagagccgggcgtggtggctcacgcctgtaatcccagcactttgggaggccgaggcgggtggatcacgaggtcaagagatcaaggccatcctggctaacacggtgaaaccctatctctactaaaaaatacaaaaaattagccgggcatggtgatgggcgcctgtagtcccagctactcgggaggctgaagcaggagaatggcatgaacccgggaggtggagcttgcagtgagccgagatcgtgccactgcgctccagcttgggcgacagagccagactctgtctcaaaaaaataaaataaaataaaaaaaagaagagtccagaaaaggagcttgatttaagtaaatgttcacagtaccttcaaacaataaaggacccttattaggtgtttaataaacagaaaactgtgttttcagttattattggaatttgttgcttttaataagtgcaactgtgcaacgtaaggtgagcactgcaacaaatgtctcattataggggttctcacctttaagaccttttcaatcttggtataaaatacattcactttacattcactttatgaatgcttctctctcccaacttaattagcaatgtggccctcaaacaaatgtgaatccactggggcaggcgccaaaaaaaaaagaaggaaaatagacttgcctaaccaccacaaagctactgaaagatggtccaggagggattcaaacccatgctcagagactaccatgccagtcatatttttaataccctatgcagcctcagacaagttgagacttgctcaagaacacacagctattcagtggaagggttggcctggtatcccagctcagagccaatgcagtccccacaatgttcaccttaaatttggtctaagagcttggtttctgcaaatgagtcctttttaggcttcaaaatggtgagaaatcctcaagcactgagagctcatgagactctaatgcctagcttaaatcaacatcctatcctttcatttaaaaaaatctttgaagcttctcacgttccaccagacaacgagaaccaggaacaaaactcagccaattcagtgcagcataaaacaagtatggtaacccctgggccccttgggaactggcgggtcaggtgtataaatcccacttgttctgggacaaagcagaaagcagaagggcagggcagcagctgctggggaaaagccaagagaaaaagatcacattttaatgaagtgactatcaaaaagactaacagtaaggattaacatgcctctagatactctccctgtaacccaaagggttttcttcctcactagcttaccaaattttaccaaaaggagtgtctcaggaaaaaaaaagattagatgatttttaaaagagctttcgagcttctctaaaccttggattgttcttttgtaaaaggagggatcaagtgatttcttccagctctgagagactgacaccaaaccaagggcctctcctttttcaggttaaggcacagacacaggtatctcagaaagtttccttcttgctgttattctcttcttcccttctttggtttatttggaaaaatttgtgaggggtaaatgtatgtgtgtttgaaacctgaatctgtcactgtttgcctctgtgtccttgggcaaattatttgacctctctgagcttgtctcctaatctttaaaaagaggataataccacctgctttacaggattaccaagtggattaatagaaataatgtaatagatgtgaaaatatctcccatggtgccaggcacttagttggaccgatttgtgactaacttctcttccttcctgcgtgtgtatctaggaagttggctggggaaaaggttaagctgaatacagaaacttctaaaatctgaagggaaggttttcaaaacaaactcagcaaacttttttctatgtgcccatgtacaaggcacagagtaggccaggaattactggggcccttggtgtgtactcatggggtgtgaaggacatggatatacacagaaataacatgtcagagagggacaaaccaggtgctacaggcaaggcaaactcagtacattaacaaaatacactgcagtgacaaatgagacagatggttcttatgtctttcaggccacccagactgcaacttccaaccagaagttcactcaactgtgaatgagtaggcattttcttatctatggagggcctataaaaatatctttatcagagaactggttaaccaattgatatattctcatacagcagttctctgccagttgtcaatgatagaggaaaaaaactactttatgccagacaatgtcctaagcactacgcaagtatgagctaactgaatacaaagatcccatgagatcaggactagtcttaaagaactattattgttctcattttacggaagaggaaactgaaatactcagctaataaatgtttgagctgggattagaccacaggtctagtctccaaagcctgtctttttttttttttctgagacggagtctcgctctgtcacccaggctggagtgcggtggtgcaacctcggctcactgcaacctctgcctcccaggttcaagcaattctctgcctcagcctcccgagtagctgggattacaggcacctgcccccatgcccggctaatttttgtattttagtagagatggggtttcaccatcttggccagactggtttgaactcctgaccttgtgatccacccacctcagcctcccaaagtgctgggattacaggcgtgagccactgcacctggctcaaagcctgtctttaactacattttagactttctttcctggacaaaacaaattacaggcagaaagacatgataaaaaagaatcccagaaagaatgttcaaggaacactttaatgaaaccaggcattggtttcatgttctagttactattcaatgtaaattaataggtaaaatagtctaattctttctactatataaaaatagataaaggatgagaaagaaggtagacttgtaagagactgctacagtttcaggtcctctcattgaaatgagatgtgtgtgatggtgggccctatcagacccgctcaaggttacactaacaagaaggcagccctgttctgggaatcagctcagcctccagaagatgcagaaaatccaccatgaatgtggaaagcctaatacagccccttgatcatgacggatttttatttagttttgaaatcttgtggtcattttggaccctaccctgctccatcacatatccaggaccatccaagtcaccctggcctgcctatgtcaggaggcatcttttattggttggtgccttcttcattgctaccactaagacctcatctcagggcccactatacccacctccagattggtggccctgtgcccacatcatgagtcttcctttctctaaacctacggtgcctactgtagactagaaacttccaaaatcctcagcctggcattaaaccctctagtccggttgcacccacattctcagctgtaccttccacttcctatgaatcttccacctcccaatccttgcctctaccacacgtatttgctaccctttatgaagacctgaaacttgcctacttttgtctcctactcccaaagtttcttccctactaagatatcatcttccccaccttctttaagcctatttaagatttctcaagtcttacccacttcaagaagtattccctaaccaaaactgatggccaccctggataccctgctattctttaaacatgccaaacacattccctgacaactcacttcttctatccccttaccctacttcacttctcttcaatggatttatccctgaatatgatgttcatacatttacttgctgtctatctctccccaccagaacatacactacatgagggaagggatttggtctatcttgttccttgctgtatccctaggggccaaaagagtttagcacatagcaggaactcaatatatatttgtggaataaatgtttgaagagaattctccctcatctttgaaattctataatgttatcatacgcaagccttataacagcttgtcttatcaatttttttcttttttttaagagatggggatcttgctatgtagcccaggctggagtgcggtggcttttcacaggcgcaatcccactactgatcagcatggcagttttgttttttgccttaattaccttaactagacagtaagtttctcagaggcacaaactatatataactcatttccacaaatacttattaagggcttaccatgtgccagaccctgtacgtcttaagcagcctggaatactggaaagaacactgcagaagtcttaccttggttctggctctaccactagttgagtgaccctggacaactccgttttttttccctgagcctcagtttcttcataggtaaaacaaggagactatacattatctcaaaactctctcctggctctaacacctgttaaaatttataagaggtaaaacttggtcctgcccagtgccacagacatcacaggcactcagtaaatatttgatttgttatcgattctccggttacacgaggaatctgaggtgtctcagaacatggtttgaatggaataacaagtgaaagtttaagtcccacttccttctcagactccatagtcaacttcattctgctttttgtgctacagagaggaggaagcactaaacttgaagttggaaaatatgaactctgaccaccactgctcatttagctatggaaccttgtcatttctgggcctgtctcctcatctataaaaaagccatacttggctgggcatggtggctcacgcctataatcctagcattttgggagtccaaggcgggtggactgcctgagctcaggagtttgagaccagcctgggcaacatggtaagaccccgtctctaataaaaatacaaaaaattagctgggcgtggtagcacttgcctgtagtcccagctactcaggaagctgaggcagaagattcacttgaacctgggaggtggagggtacagtgagtctggatcgcgccactgtactccagcatgggcaacagagcaagactcttcctccccaccccctacaaaaaaatcaaaaaaccatattgacctcccagctccaaggctcaaaggcactacatgccttcctaccctagggcctttttatgctgtttcctctgcctggaatgctctgtgagctttttttgccaggctaacttttacttatctccaggggtcagcataaacttgcatttttaagaaaagtattcccttcaaaaaaaaaaaaagtagaggatgggcatggtggttcatgcctgtaatcccagcactttgggaggttgagacaggaggatggcttgaaaccaccgtgggcaacatagtgagaccctgtctctaccaaaacagaaaaaaaagtagagaaaaccctcacccctggtgcactcttacagcacttatctcaattgtttaccttaactattatagcatttattgcaattgttacaattatttattgtccatctctaggattattaagcaccacaaagccaagaactatgtcaccactgtactcagcatttggctaagtatatgacacagaagaatccaacaaatattctttgaatgaaagaaagaatgcataaactaatgcatctagaggctttatgcctctagactattgtactgtgaaacctttcacaattttctaagaaacagggttcaagacaggcaacctatattacacagctgttagaaaaagttactggaaatcggccgggtgcggtggctcacgcctgtaatcccagcactttgggaggccgaagcgggcggatcacaaggtcaggagttcaagaccagcctggccaatatggtgaaaccccatctctactaaatataccaaaaaaattagccgggcgtggtggcgggcccctgttgtcccagctactcgggaggctgaggtaggagaatcgcttgaacccgggaggcagaggttgcaatgagccaagattgtgccactgcaccccagcctgggcgacagagcaagactccatctaagaaaaaaaaaaaaaagttactggaaatcattcgagttgaaggactctgtaagcttaaaaaaaatcttttttaagagacaaggttttgtttttaagagatgaagtctcgctatattgcccaagctggtctcaaactcctggactcaagcgatcctcctgccctgccctcccaaagtgctgggattacaggcatgagccaccacgcccagcctaaaaaaatttgttttaggcatttccacccctagctctctccagaagtctgttatcaccagtgaagagaaaatcccatgctcccttgctgaggaagtgacccactggtagcccagtccttgcattcaagatgaaggaagtgactgtccacagacggaaagccaggaagcagggggcagatagccagcccccctccacctcaataccctcttgccgcctctccaaagcttctggacgctgaccctggtggacccagaggtgggccacccacacaggtggctgggaaacataggagacagaaggttcctactgctgggggaaaagatggggaaggcaggaagctgcagggtggtgtgtgaggtggcggggaggtgactgcaggtgcaactaacccaactctgaagctacccttcacccttagacaactcttccttccaggaggtgtttggccgaatccctctagtctttagtctagagaggccaagggagcttccacaggaggactcagaaccccaggtggcctactttcgccacctgtagcagagatctttgggccccaaaaagaatggtccgatctctccttacccttagtcctgtcctaaacctcaaggggctccatactcccttattttctgcaaagagctcccagccccgggggactcccagacaccaagatgcccgcgagaagccttgggtcttggcagggaagtcacatcctccatttccctcagaaaacccagaacccggggtaactctcctaattgtcctgaaccctagaggatcctgtactcctcaaattccacagagcttccactataagagaaccccatgcttttcaacttccttaaaaagggttaatttgggggtctgcggccgccaggtccctccaaaaagctggattcctggcagacccagaatctcttcctccccgggacctcaactcgcgggaagcctcccaacccgcctgcccctcggagccctctgtctccaggatgccctgcctccccattcccggagtcccaccctccaaatgcctggggagcgctgtgcccaccccgcctcccagcttttctgaggagctcggacccacgaggacccaaccagcccgaaacccccgagagacagccggtttccctcaggcgccatggaaccggacttcggagataacagcgggacagggcggagcagcccttccttacccgccagcgcggacatggtcccgggagcgcggaaatggggaggaggaggcgggggacacagcagctcccctcagttccctacaactcccctcagctcctgccgccgccgcctcaggcgcgggaagaccacagccccaggcgcgaacgggatgcaccgcctacggcgccctgggaggaccaaaccacacctggcacaggggactgcccgccgacgccccgccccgccgctctcaggcctcgctcccgagacgcggccccgccccctggctctggctcgggctctgcagcggccctggcgccccctagtgcgagcggcgtcccctcgaggtgctcccgccggtaaggttgattctgcgggggccggaagtctcaacacggatgacagtccgcacccatctagtcgccctcatttacagatagggaaagttaaggatcagaggctaagttcgactacattgaaatggcgtcgctcattaggaggagagccgggatgggagcccaggcctgctaactgccagttcagagctctttccagtagtgtttggaatcaggaatattacaatggaggagccaggtctatcccacaaacagctttgaggatggacttttcttagaagcttctagctcagagaaaccacttctctgcgccactatgagtaagctgacagtaaataatctctaagtcaaagacagttggaggcgaccaaccagcattccaggagcagatcctcagccaggccaattaggtttagcgcaggacgctggagcttgtgcgccgcattggaagacgagcactcccctgcaggaacatgggcctaccattcccaggtcttccaacctttcaaaacatgccaaaaatccagatatttaggtgaaatttgccacttttaaaaaatgttgatagcatcaaaaagttcttaaaatgccatgtagaccaaatgaaacacacctggccactagatttgccctgtgggctgccagtttacaatcttctatgaggaggagggattacaggactaagagttaggacagctgactgggttatggcagctgctagctggctgagtagctttgagaaccacttccgctcattaggtttggaaggagattggggtcctctgtgtgattaagatattaatacatcatcagccaggccagctggtccctgatgacccaccctcccatcagattctctcacgctgggtctttcacaattgtcatttccttacatcagatttagatcacaggaaacatgtccaaatgaccagaaagaggatggagcccagggaaatggattctgtcccctccacccccacccctgaccaaagacaaagttcaacccagctgcctctggtcccagcagttgggtaagcaaaggcaaaggcaaagacaaaggcgagcacaattctcttccttcctgctctaattcaaaccggatgccggtcagatttttctcttctgggtgtggcaggtggctcacgatgtcctgagtgtgcacaaagtgctggggaggagggctctgtcccatttccgttaattcctgggaactcttttcagtactcagttttgtagtttctgaggaaatcattatagtaaacacaagattgtgtattgaattaaagtgacaggaatccagagactctcctgacaagctgcctcatggctagcaaacaggggacagggactttccccatccttcctacagaaagatgtaacactgtattttcccaggcaacaaagcactggcatcctgggaaccaaaacctcctgggtgtcttccctctccctccgttccacaccaaggcacccaggtctatctcttctccctcctcattctctctcacattccacttcctcctacctccagcctcatggtcttcaccagcagggagctggggaatagccaagtcccccaagttcctcccagggaagttcaggcgactctgagaaacacaagttgaaaatgtaatggaagggaatagctttctatagaaatgctatagccaagagatatatttttaatatggacccaaagaacattccagaaatcacttgtgaactcaagggggacttctggagggtagagaaagcctgggcagggagtagaccaactgagtttcaatagcacccaggttacctgtccacagtttgtttcactggccatagcttggtcagtccctagggccagatcctgccagccgcctcacagtcaactctctgagcctaggatcctgaaacctggaccttgaaaaacaactcaaggttctgccctcttgaaggtactggtccactggtacccaaccagacttgcccagtgtcacttccacttgcttcaaactgagccagtctctgccctccctgaatcatcctacccaaaactgactgtgttaatcttccaaaagtatgtttctggacctgtcatctctctgttcaaaacccttcaacagcaccccactgcctacaaaataaaagccaaaccagtcctcatgagctgactacatctcaccctgcggacttgtctccctattcccttcactccaggactctgctttttcctgagcacatcctgccttgcgccacctgccattcctacaacaaccagctctccaggttctctgtaattttgtgccccactctgcccagagtgcagtcttgtttctcaactctaaatgatatagtggcatctgtaacatcacaaagtaggactaccagacattaagtgcctccaggtaagacgcaccaagtatatactatcacctatgacgtagtcttacaaaacaaaaataataagcttgaatctggtcaagcttctagatctaacaaccaacttacaggaaatacatggagaagaggagcttaataacatttccatgatgcaaatagcaaaaatgatgctgtgggaaatgcaacaggacaaataacctagtttctttaacagataaactgcagagtagaaaaaatttcatagacaggccaggcaaggtggctcacccctgtaatcctagcactttgggaggctgaggcgggtggatcatgaggtcaggagcttgagaccatcctggctgacatggtgaaaccccgtctgtactaaaaatacaaaaaaaattagccgggcgtggtggcgggcacctgtagtctcagctacttgggaggctgaggcaggagaattgtgtgaacccaggaggtggagcttgcagttagccgagatcccgccactgcacttcagcctgggcaacagagcgagactctgtcacacaaacacacacacaaaaaaacaaaaaattagccaggcatgatggcgggcgcctgtagtcccagctaccaaggaggctgaggcatgagaatcacttgaacccgggagacgggggctgtagtgagctgggatcgcatcactgcactccagtctgggcggcaagtgaaactctgtctcaaaaaaaaaaaaaaaaaaaattcagagacaaataatagcaatgtatgaaactgatttggatctcaattgaaactacacaagttatgagacaactagggaaatctgaacaatgtgattggatatgatgattttaagaaattttttaaaggtattttgctttttttttttttttgagatggagtcttgctctgtcgccccgactggagtgcactggtgcgatctcggctcactgcaacctctgcctcccgggttcaagcgattctcctgcctcagtctcccgagttgctgagactacaggcgcctaccgctacgcctggctaattttttgtattttagtagagacggggtttcactatgttgcccaggttggtctcaaactcctgagctctggcaatccgcccgcctcaccctcccaaagtgctaggatcacaggtgtgtgccatcgtgcccggcatattttgcttgtttttaaaatacttgagatgcatatcgaaatacttaataaatgacatgactggggtttgtttccgaatagttcagacagtgggagaggaacagcgtgcgggaggtatagatgcaacaagactgatctgagttgatagttactggagttgggttatggctacatggaggctttattgtcctgttctactactgtttttttttttttttccccatcgaaaacaaaaacctaaggccgggcatggtggcttaaacctgtaattccaacactttgggaggctgaggtgggagaacctactgagaccgggagttccaggctgcagtaagctgtgatcacaccactgcactctagccagggcacccgagtaagaccctgtttctaaaagggtctgttgccctggctggaatgcactagcatgatcacaactcactgcagccttgacctcccaggctcaggtgatcttcccacctcagcctccctcccgggtagctgggaccacaagcatgcaccactgtgcctggctaatattttttatttttgtagagatggagtctccctgtgttgcccaggctggtctcaaactcttggcctcaagcgatcctcccacctcagcctcacaaagtgctggggtttgtaggtgtaagccaccatgcctggcctaaaattaaaatctttcaaaaaaaaaaaaaaaacctggtcttttctcattgggcttatgagctcctgaagttccctcacctttgcattccccactgtatcttggtactattcaatttgataactgttagatcaaaatctaagaggaagaaaaaaagctcttttcagaggaattacttgtagctctggcatgttgggaaggctgaggctgggccagatttgtaacctcagcaacatcttccatctcacactacaccctgctactaaggaaccttagggagggacacaccttctgctcgagagagaggacttggctgacagcccacctgccctgttactaaacagatggagagacgctgacagtgagtaacctgattgttctaaaggctctgataagtgacaagctaagctctattgtggcagcttgtcacttacgaagctcaggaatgccatgtacttgtcaggactggggctgcctgtcagacaggttttatattgggcaaggctgtgtatgaagccaggcctccagcctacatttatcatctctaattatcaatagtcgtttaaagactttctttccttttttttaagagacagtctcgctttgtcacccaggctggagttcagtggcatgatcatagctcaatgcagccttgaaactcagggctcaagcaatcctcttgcctcagcctccagagtaactaggactacaggcataagtcatgcccagcttctttgaagactttcgttctcagtgtgacattacggaggatgcacaggagcctccaggagggcataccagtgtgactactccccacccactcgccctccacaacacagacaagaagtccaagctcatagtaatgtaaaaccatttgtttaattctaaatcaaatcactttcacaacagtgaaaattagtgactggttaaggtgtgccactgtacatatcatcattttctgactggggtcaggacctggtcctagtccacaagggtggcaggaggagggtggaggctaagaacacagaaaacacacaaaagaaaggaaagctgccttggcagaaggatgaggtggtgagcttgccgagggatggtgggaagggggctccctgttggggccgagccaggagtcccaagtcagctctcctgccttacttagctcctggcagagggtgagtggggacctacgaggttcaaaatcaaatggcatttggccagcctggctttactaacaggttcccagagtgcctctgttggctgagctctcctgggctcactccatttcattgaagagtccaaatgattcattttcctacccacaacttttcattattcttctggaaacccatttctgttgagtccatctgacttaagtcctctctccctccactagttggggccactgcactgaggggggtcccaccaattctctctagagaagagacactccagaggcccctgcaactttgcggatttccagaaggtgataaaaagagcactcttgagtgggtgcccaggaatgtttaaaatctatcaggcacactataaagctggtggtttcttcctaccaagtggattcggcatatgaaccacctactcaatactttatattttgtctgtttaaacactgaactctggtgttgacaggtacaaaggagaagagatggggactgtgaagaggggagggcttccctcatcttcctcaagatctttgtttccataaactatgcagtcataattgagaaaaagcaatagatggggcttcctaccatttgttggttattgctggggttagccaggagcagtgtggatggcaaagtaggagagaggcccagaggaaagcccatctccctccagctttggggtctccagaaagaggctggatttctgggatgaagcctagaaggcagagcaagaactgttccaccaggtgaacagtcctacctgcttggtaccatagtccctcaataagattcagaggaagaagcttatgaaactgaaaatcaaatcaaggtattgggaagaataatttcccctcgattccacaggagggaagaccacacaatatcattgtgctggggctccccaaggccctgccacctggctttacaaatcatcaggggttgcctgcttggcagtcacatgcttccctggttttagcacacatacaaggagttttcagggaactctatcaagccataccaaaatcagggtcacatgtgggtttcccctttccttgcctcttcataaaagacaacttggcttctgaggatggtggtcttttgcatgcagttgggctgacctgacaaagcccccagtttcctgtggcaggttctgggagaggatgcattcaagcttctgcagcctaggggacagggctgcttgttcagttattactgcctcggagctccaaatcccaccaaagtcctgactccaggtctttcctaatgcacagtagtcagtctcagcttcggcagtattctcggctgtatgttctctggcagagagaggcagatgaacatagttttagggagaaagctgatgggaaacctgtgagttaagccacatgtctcaccaggaataatttatgccaggaaaccaggaagtcattcaagttgttctctgaggccaaagacactgagcacagcccagagccaataaaagatctttgagtctctggtgaattcacgaagtgaccccagctttagctactgcaattatgatttttatgggacagcaatttcttgcatctctacagaggaagaagagggggagtgggaggggaaggaaagagaacagagcggcactgggatttgaaaggggaacctctctatctgaggagcccccactggcttcagaagcaacttaccaaggggtatttaaagacatgaaaatttccagaaataccatttggtgcatccctttgtttctgtaatattaaactcaggtgaaattatactctgacagtttctctctttctgcctcttccctctgcagagtcaggacctgcagaactggctgaaacaagatttcatggtgtcacccatgagagatgactcaatgccaaggcctgaagttatagagtgtttacagcggtggcgatattcaggggtcatcgccaactggtctcgagttccaaagctctgatgaagaaacaagactccttgatgtgttactgatcccactgattccaggagtcaagattagccaggaagccaaacaccaggagttggggtggcacgtcaccagtccagagccctgccacggatgtaggcaggagcccagcattaggcaatcaggagccagaacatgatcaccagggccacaaataggaagaggcgtgacaggaactgctcgtccacatactggggtgtcccagggacagctggagagacagaaaggagaaaacaggctattagaacactgcagctatgcacactgcccactcaggccagaagttgacagcatcaatctttatctctttacaacatcagaatcctacacacaaaaagatttcttttttttttttttgaaatgtagtctcgctctgttgcccaggctagagtgcagtggcacgatctcagctcactgcaacctccgcttcccaggttcaagcgattctcctgcctcagcctcctaagtagctgggattacaggtgtgcgccaccaagcctggctaatttttgtatttttagtagagacggggtttcaccatgttggtcaggctggtctcgaactcctgaccttgtgatccgcctgcctcagcctccaaaagtgctgggattacaggcatgagccaccatgcctggcctttttttttttttttctttttgaggtggagttttgctcttgttgcccaggctggagtgcaatggcacgatctcggctcactgcaacctccacctcctaggttcaagcgattctgctgcctcagcctcctgagtagctgggattacaggcacgcaccaccacacccggctaattttttttttgtatttttagtaggaacagggtttcaccatgttagccaggctggtctcaaactcctgacctcagatgatccgcccacctcagcctcccaaagcgttggcattacaggcatgagccatcgcgcccagccaaaaaaaatttctaaaccccaaataatatcaggcaaaatgaaactatgtggaacaataacaataaggacaagacacggtccaatttatcataaaaggtttggcctgcacatgcaaataaaccaggtgattaacaggaaactcttgcaggaaataatgaaagcaagcctactatttgttaagtatcttctatctgctaagtgttttgtacatgttattatttggtggatattattatttccattttgagtaggaagcagctgaaacataggtttgaggtgacctgttcaagattgaaaggctcagaaattagtggcagagctctgcagcctctccacacactgcctctcaagggccccacagggattgccttccttttccagaagagaactaggatccagacaggcaaaatgacttgtttttcaaggtagaggcagaactggggtgagaacctaagtctccactcctctctgctttaggaaaagctaccatttagagctccctgtcctgactttgggggaaggaggataaaagaatctgtgtccaggatgggcaaattgtaccaagcatgacaagggaaaactgtgactgtggcagggggataaagtaatccagagtctagcctggctgtggaactctgcttagctggggaatccaaggttagccttcgaccaggttagaaggatgcaagctatcaggcaggttcttgctggcttcacaggaatttgccctttcttcagggcagagtacaccctatcttttggggtatacttcctctgaaaaacaaatgtgaacagaggataaaccttcaaggcagataaagtaagaaagggcatccccagggccgggcgcggtggctcacgcctgtaatcccagcacattgggaggcccaggcgggcggatcacgaggtcaggagatcgagaccatcctggctaacacagtgaaaccctgtctctacaaaaaaatacaaaaaaattagccaggcgtggtggcaggcgcctgtagtcccagctactcgggaggctgaggcaggagaatggcgtaaacctgggaggtggaacttgcagtgagccgagattgtgccactgcactccagcctgggggacagagcgagactccatctcaaaaaaaaaaaaaaaaaaaaaaaggcattcccaagatatcttggtgctgagattcctcagctagatgctctgatggattcacgaagacagacaggcaggcaggcaggcagtcaagaaagacttatagatcacctgctgtgtaccaaggaccagggtggggatgagaataactgggatgacccagttaccatctttagggcataagctcttggcgtgaaccacacaatggtcacttctgtaccatatgctgtgtccagtgcacatgaagctccaacaagtgcaggcagagctcaaccgatcatggcatctctgcaggctccacagtaaggatcttggcttgggtgtcagactgtgataagagttcaaggcacccacctcatagaggtggcttgcacctatagagcaagggctctataccgaatgcggatggcactttcaagcagtaggagggagaactgcagcagcagttggtagacctaggcatggttcccacagggctgaggctgcttctgaccagcctcatgttgtgtcctgaaggaagctagacagagatgccagagaatggagatgccttcactccttatgggtcatctcacatttccaggcccccaaatggtcaaagtgggaagtaaatgtgcagaactaggcttttcctcagctgagtatcacttacagttttccattttatagacatggggtatgtcttggtaacattactgagcattttctgatctgttaaacgcagctaatcacacacctgttccatagggtggttgtgatgatcccctgagcttggaatggaaagtgctatatatatgcatgcctaatagttggtaagtgctcagcattgttaccatgtctgtaagtgatctaaaaacagcttaagatattttgaaaaggctgattatccatgtagtgacaattatctgtaacttatatactgctgaattccaaggagctttcaagcaatattactaagatatcttcctaatttctcaaggaaatagggtcttacctggaggaggccgcccatcatttatattaaatgctgtggcaaatatcccaaagggaaatgccccaattccaaaagacatctggaagccaccatctccaaatccaaatccttgaaatccctgtgtggaagaaaggcaattaagggcaggagaatcaggcaggtttctcctgtgcctgtcaaaactcaacatacctcacgttgtcttgcatgtggcacctgcctcttctccctaccttgtgccacatgtttcgaaggtgggggacagcttttcctcccatatataccctgaagtagaggaactctggcaagccctctgcccttttagccttagcttccagctaagaatctatgaatgggccaaaaaggactggctctgacccagtgtgaaacactctgctgacataagtcagcactcacagggcttgaggatattttccatagtcccacattagctagtaacaccttctacatgctttataggagcaatattgacagccacccctgtgcccaagggaacatcaaacaagctacacattatctttaatagcaaaaatgttgaaactctaattagccaacaatggaagtcatgatcaaaatcttgatacatgcattcaaagaaccattaccctgacttaagcggtaacactgaacaactcttgtgaccaagttatcagacaaaattgtttgaacactgtggtcacaactacatgacaatatgtaggtatatggacaagttacggattaaaatttcttttaatactgttacatagaatttttacattttaaaacactataatgttttctggttataaaagtaatatatacttgctataagaaactcacatattacagaaataattgacagagtcagagatcttctattcaccttcccacttcgcagccactccactttacctctgaaataaccactatcagcagtttggtatatcaccctcagttttctttccatgtgcatgttctacactgcatcatctttcacatgaaaagattcagcaggaacaatactgtgaataaataactcccttttttaaagcgtgagctctgtgctaggcaccatgttaagcactaggacatataaatcatgtttaatttttacattggcttcatctgcatttcacagatgaccaaactgaggcttggagaggtgaaataacttgaccaaggagtacagtttagatctaaaactaggtcaatttgatctgaaaacacatgcttttctttttcttttctttttttttgagacagggtctcgctctgtcaccaagcctggagtgcaatggtgcaatcatggctcactgtagactcaacctcccaggctcaagcaatgctcccatctcagcctcttgagtagctgggaccacaggtgtacccctccatgctttgctaatttttaaattttttgtacagatagggtctcactttgttgctcaggctggtctcaaactcctgggctcaagtgatcctcccacctcagcctcccaaagtgctgggattagaggccagagccactgtgcccggccttcatgctcttaattactgtgcgcatctttcaaatatttttttctcttcccctgcacccctgatgagaggtttagaacaaatgattttaaaaataataaaaagcagacagactattgggtcaaatgctcttcacaaagagctcaatggccttcatttatgagttttttgcaagtcacaaaaatagctgctctccatcacacactgatcagcctggcatctagttccaaacttcttgccagatggcatcacctataaagcctaacagctgacttaatgagagggcaaacctaaagggagggaaaacaaagagtttccatctcctcaatacaaaatgcctcctactcagttcatggttgaatctaatggctcctgggactgaggctgccttacttgggaaggtgcaattgtttcatcaggaaccacagattcattcagtgcaatcctgaggactaaccgttctgcttcccttctagcaacatctttatgatctcaccagtccatacatttggtgggattatgttcctgggccagagtatgcaaaaaaacatcgctagtagctgcaggtgcttataaatgctagaggtatgcactttggtcaacaaggccagggcctctggcttctgggggcctctgattcctgcattagttgctaatgctctgtaggaaaccaaaacctaggaatgttaaagtggtgtcacctggtggtcaagagcagagacttcaataccagccagatctgggtttcagcactgtacgtgtggccctggacagatcactttacctatctgggcctcagtttcctcctccgttaaatgagttgatgtgaggcttaaatgagatcatgcatataaagctcttaacatatagttatttccatatagtaaccattcaacaagtgttcactgctagtattattattaagggtaatccggagaagagaaccttaatttctttctttctttttttttttttttgagacagagtcttgctctgtcgccaaggctggagtgcagtggtgtgatctcagctcactgcaacctctgcctcccgagttcaagtgattctcctgtttcagcctcccgagtagctgggactacaggcacatgccaccacacccggctaatttttatgtttttaagaaagcagagacagggtttcaccatattggtcaggctggtctcgaattcctgacctcaggtgatccacccgcctcagcctcccaaagtgctgagattacaggtgtgagccaccacgcccagccgagaaccttaatttctttcaagatccctgactcaataatcctactcctggaaatcctaataaaatgccattattcaaactcaaaaaaaaaaaaaaaaaaaaaaaaaaagaaagtggcagtgcgcggtggctcacgcctgtaatcccagcactttgggaggccaaggagggcggatcatctgagcttgggagttcgagaccagcctgaccaacatggagaaacctcgtctctactaaaaatacaaaaattagctgggcatggtggcccatgcctataatcccagctactctggaggctgaggcagaagaattgtttaaacccgggaggcagaggctgtggtgagccgagatcgcactactacactccagttgggcaacaagagtgaaacttcatctcaaaaaaaaaaaaaaaaaaaaaagtgtgcaaagatggttattgtagcattatttaaacagcaaaatggggaaacaactaaaaggtccttcgatgaggaaaacccaaattacaatgaaccaaaactcaatgggttcccagcaatagcatggaaaaataaaaaataataaaaaactcaataggataaatggcagcctaaataataaagaggacacttcagagcatcatggaaaacctgccaaaattaaattttaaagcaaacagaatggtgatggctacataaaaatacatatgcacagcctacagatgaagagaacatgaggatatgagaatatacttgttctgggctcttggcaatggtgggtaaatattttgcttttaaaatttctttaacattttaacagaatttttttaagagtaacatttgatgtaaatatgcaaaaaatgtaaatgtttttgttcctagccactagaccactagagacaaatgtgcaatttttttttagccagtaatcttacttctaagaatttatcctaagccaggtacagtggttcacgcctgtaatcctaacactttgggaggctgaggtgggaggattgcttgagcccaggagttagagaccagcctgggcaacatagtgagaccttgtttctacccaaacaaaacaaaacaaaaaaaagaaagacaaaaaaaaactcaaaaaactagctgggcatggtgccgtgcacctgtggtcccagctacatgggaggctgaggtagactgagcccaggaggtcgaggctacagtgaactgtgatcacaccactgcactccagcctgggctacagagtgagaccctgtcttatcctaataaaataataatgaacatgctcacaaatttatctgtaagttcatcaggattttttttaacttggaaaaagaaagccgctaatgtctaacaaaggattgaattatgttaaatccacacaactaaatgctaaacagctagttagtaaaatattgctggcaatgtaaaatctcaagataatactaaaagactcccactcacacaaagaaggtactaagtatctgtagaacaaatgaaattttaagagagggttacaaaacaggagccacatattgtaaaaaacaaaaaacaaaaactgtaaaaagtatacacacatctgtaaaatacacgcacagatttgtaaaatttgtgtgtatatataattatagaaaaatggaaaagaaaatagaaccaaaatgtttccagtggttacctctggattggtgtggttataagtgatttttttccccctcttttcctttctgtattttacaagttttcctttacttttataatcaaggagaaaaattgtaaggctaagaaggaaacttctaaagccatcagctcatttgtagaagcttctcctagaatgttcctcacccctctattctccggctctggcctctgtccttgaggacgaggaggggtcttctctctgaaacagaaatggtgtaaaataagtctattacaaattgctttgagttgctccctgtgaggacctggagctctttaccaacagggtcagggccatagcctctttcttgtccaggacatgaacttatgccagattaattctccaaatacgaactcttcattctacctgcaactgttcttcccacgtgtatagagaaccagggagaaaatcaactcgttatgagatattcaccagattgcactacagcctactcctcttacagagatcctgactcagatcggttaggaatcatggccagatgccttccctgggcctgttacagataacagaaatcccaaatccatactggaacagagggtgggttgtcagcagtaagggctgaggttcatggtttctctgaccttcccctattaacttcagctctatctcctactattcttgggcaaatacccaatgctattatttttgagtctcaccccctcaaatcactcaacccatgaatactcaattgagggcttagttatacaataagcattatgcaggatgctgtaatactgatgacagacccaacccttgaagtgttcatggtttcaagggggataaagccagtcatatgacactgtggtgggaactgggtgagagcaactaatgtgaagaagacagaccacttcaaggaagagggaactttagggctgctcataagagatgagtagaagttagaggagcaggtgggggtagaggggtagcttgagcaggactggggagggaagaaggcagaagagagagcaaatacacaggctgataaatgtgaaagagcaagtccctttaagagaaagtctaatatgtcgggtacacagcatatgctagggtagctggataaaggtaagagattcttctggagagcttggggatgccagaccatgaagggctctcaatacttgtgtttgttgaatgctggacccatgcacatctccatttctagaaatcccaaactccacaaagtcacccagatcctgtttcccctcccgccatgctttatacatcactgatgcagcaaccctgctccctggagcctctcctgctacatatcctgcttcccaggttgcagaaatgctctttcacagggctctgcacacttgtgattgtgatgtctgttcactgctgggtcctagcaagtggcaacttggatcccctctcttccctcccctcctagctgactctcatctggatgagactgcttcgaaaccaagagatcatctagtactaagtaaagggtggggttaggggatgctgaatgggagtgaattcacatccaaggggagaagtggttgggagaggcatcctgagtcctcacctggggtcctgttgcccagtgctgccccttccatagagggggatgaccttgtctcggctgatgccagctttgcaaacaggacacacctgtctgttaggtctggtctccaaccactgcaaacaggagagaaaaatgcatgtggatggcccaagacccaccagagtgatcagccagagccaccagaacaacacaggccagaggcctcaaactgggaaacaccagcatgagcagggaacatctcaaggaacctgactcccattccttctcctaccattcagcaaatacctaccagtggtaaaatcaaaattgcctttaaatatcatcataattggccgggtgcggtgctcatgcctgtaatcccagcgctttgggaggcggaggtgggtggatcacctgaggtcaggagttcaagagaagcctggccaacaaggtgaaaccccgtctctactaaaaatacaaaaattagccagacatggtggcgcatgcctgtagttccagctactcgggaggctgagggaggagaatcgcttgaacccgggaggcggaggttgcagtgagccgagattgcaccactgcattccagcctgggcaacagagcaagactctgtctcaaaaaaaagaaaaaaaatcatcacaattaggcttcttcatgctttgtttctctctagggcctcctagcaacacagggggagggaaactgcaagtctggggctgtcaagtctgacatgcccagcctcaatttaggctgctggtgtaagtacagcaaactttaaatccccaccttcccagtaggagcaactgtattttcctgtcagtcatattcttctttctgtgatttctcatttttttttccccagacagagtcttgctctgtcacccaggctggagtgtagtggcatgatctcaggtcactgcaacccctgcctcctgggttcaagcaattctcctgtctcagccttccaagtagctgggattacaggcgcccaccactgcgcccagctaatttttgtatttttagtagagacagggtttcaccatgttggccaggctggtctcaaactcctgacctcgtgatcttcctcccttggtctgccaaagtgctgggatcacaggcatgagccaccgcgcccggccaatttctcatttttatagcattttcccaacaactgtgtatcccaggcatcagaatcaggagataagctgatcattttctggtgacttaccacatgctaaaggataggttttgctcattatctaaatttgcttaatgctttttgtgtactttcattgattttttgcattcacctatttctttcaatataaaaaaaatcccgttttgggtttctcaggccctttcactggttacattaaaattttttgtttaggccaggcgcggtggctcacgcttgtaatcccagcactttgggaagctgaggcgggtggatcacctgaggtcagcagttcaagaccagcgtggggaacatggtgaaactccgttgtctctactaaaaagacaaaaaaactagccgggtgtggtggtgtgcacctgtaatcccagctacccaggaggctgaggcacaagaatcgcttgaacccgggaggcggaggttccagtgagccgagatctcaccattgcactctagcctgggcgacagaatgagactgtctcaaaaaaaaaaaaaaattaattttcttaaaaaaacaagtgataaaaaatgtttttggtttgtttttgtttgttttttgcttgtttttgatttttttttcggttttttggttttttttctcgaaacagagtctcactatgtcacccaggctggagtgcagtggtgcaatctcagctcactgcaacctctgcctcccagattcaagcgattctcgtgcctcagcctccctagtagctcggactataggcgtgcaccaccacgcccagctaatttttatattttttgtagagacggggttttgccatattggccaggctgttctcaaactccttgcctcaagtgatccacctgccttggcctccctacgtgctggaattataggtgtgagccaccacacccggccaaaatgtgtttttatagacattctataaacatgaatctaggacttcagggctgaggagatggcagcactgaatgattttatttactactcttactgttcatagctccaaaacttaatgtgttatgtgttcttcataaactcatagtcaatatgtactaccaggtcccgctggggacagaatgtgcagccctgttcccaccttctttctcccatccagattctgaagctttagcagtctggaacttctgtcctcccccacattcccaggccacctacgagtgtggtactctactgctgacgaccagggagactttcagcaggctgtgattattcacagccacttgtgaatgccaggcccagctctgtctcaccaagtaggtgctaaagctaggaaaatagacttttctctcctcacaaaagctctttgttgacaccaaaaaaattttccccttcctaatattttcataacctttaagggctgggggactgttgatatgataggaggcactgttttaatagaagcagaatctcaaaaataaaaaggacctaactaacatactatcaatccaatccaatttataaatgagtaactgagatccaaaaaggccctctgtggcagaattaggaccatcccgatttcatcaagtgtctgtcagtggacaggtatgtaaagaaggctgtgggggtaagtaagcaaatgagcccacaagcagggcagattgcagcttctgaaagcagtctcctgagactagggctctcttgtgcaaccagagctgatgaaagacaaagtaaaatgaaatgcatcttacctgatgtaaacacggccaactgccagagtccccagggcaaccagtcatcaaggagaaggagaaaaggggaaaggaagaaaaatgttttcattagcagaaacacttgatgggtggagtggtagtagcagaatgagaaaacaggagtaaactatggagcactgcatgcccattgaggttctgtagggattactggtatcggaaattaaaaaaaaactggggtaaaaatcacagaaaataaataacgcaatggagataagaccccagcctctgcccctgagatctcagtatatgtgaaatccccagggctcagaccacacagacccagcttctctacaaatcaccctgtgagaggttacaacatctgaaggaatccaataaaagctaaggacaccctgtgcaaaaaattgatgggggcattcacatacacatgtactacacactattttacactcaatttcagtgggttcatagtctcctcgggctcacaagggatgtgtggactctcaggtagtccagatccagtttaacaaaatcttcaggctgtcctcatccttgagaactctcctagcaggaagcagcttaaaagttcaggtctactctaaaagcatctttaagtaatagaaaggatggggatgctacttgacagaaagggttaccttcagcttagagagctgctgtccaatctctctccattttcaaatgaggaaaccaaagctcagaaacataaaatgaactgcatcaggattaaaaaaaaaagtctcctgacttctagttcattgccctttctataatctaacaccacatacaaaaaaaaaatgatatctacagaattgaaagaaaagtattcaactccacttttttttttttttttttttgagacgaagttttgttcttgttgcccaagctggagtgcagctcactcagctcactgcaacctccacctcccaggttcaagcgattctcctgtctcagcctcctgagtagctgggattataggtgtgtgccaccacgcccagctaattttttgtatttttagcagaaacggggtttcaccgtgttagtcaggctggtctcaaactcctgacctcaggtgatccgcccaccttggcctcccaaagtgctgggattaaaggtgtgagccaccgtgtctggcccacatttttaatttctttctctcgtttatttagttaacacatatctactgtgtacctactatgtaggccaggacagtggaaaatgcaggcatggcttctgtacctcacataccaagtatctttagctgagtacactttgaactcaaaggatagttccttttccaattcctgaaccacagtttagcttcacaaaccaaatacacaatcttcctggccataacatctgactccaacattaatcttgcaatgtcattctaaactgagtggagaataaccccaaatcatggcagatctccactggcaagttcccttaaagactctaggggagaagtggaggtgaatgaatgaccctcaggggaaagtcaggctttataacaacgaccattcctcccatttattaagcaacgatagtcatgtatcactgaacgacagggataattctgagaaatgtgtcattaggcaatttcatcattgtgagcatcacagagtgtacttacacaaacctagctgaaatagcttactacacacctaggctacatagtatagcctattgctcctaagctacaaacctgaatagcatgtgagtatcataggtaactgtaacagagtggtaaatatttgtgtatttaaacatacctaacatagagccaaggtgtggtggctcatgcctgtaatcccagcactttgggagctgaggtgggcagattatttgaggtcaggagttcgagaccagcctggccaacatggtgaaaccccatctctattaaaaatacaaaaactagccatgtgtggtggcacatgcctgtaatcccagctacataggaggctgaagcacgagaatcacttgaacctgggaggtggaggttgcagtgagctgagatcgtgctactcaatctggagtgctactgcactccagcatgggtgacgcagtgagactccatctcaaaaaaaaccaaaaaccaggctgggcgtggtggctcacgcctgtaatcccagcactttggaaggctgaggcggttggatcacctgagatcaggagttcaagaccagcctggccaacatggtaaaaccccgtctctactaaaaatacaaaaattagtcaggtgtggtggcacgtatgtgtaatcccagcttctcgggaggctgaagcaggagaatcgtttgaacctgggaggcagaggttgcagtgagccaagatcacgccactgcactccagcctgggcaacagagtgagactcctcaaaaaaacaacaaacaaacaaacaaaaaatccaacatacctaacacagaaaaggtaacgcactgctctataacattttaaaatcactagattataggaacttttcaggtccatcatcatcttatggaaccgctgttggatatgtaatccattgttgaccaaaatgtcattatgtactgcatgactgtactgtgtgccacgctgtggctgaataccttttcatttcttaatgtcactggacggtcacattaacctatgaggcagtaccatcatctccatcttacagatgaggaaaccaaagtacagggaagctagcagatttgctcagggatgcaccatccagactggaagcatctgtttcattttagagtctgtgttctttccaatggcattctgcctttaaaaaaaaaattgatagcaggcatggtggctcacaccagtaatcccagcactatgggaggccgaggcgggcagataacgaggtcagaagatcgagaccatcctggccaacatggtgaaaacctctctctactaaaaatacaaaaattagctgggtgcacctgtaatcccagctacccgggaggctgaggcaggagaattgcttgaacttgggaggcagagattgcagtgagccgagattgtgccactgcactccagcctggtgacaaagcaagacttcgtctctaaaaaaaaaaaaaaaaatttgacacagggccaggcatggtggctcacgcctgtaatcctagcactttgggaggtcggggtgggcagatcacttgaggtgaggagtttgaaaccagcttggccagcatggcgaagccccatctctactaaaaatacaaaaagaaaattagccgggcgtggtggtgcattcctgcagtcccagctacttgggaggctgagacaggagaaccacttgagcccaggaggcagaggttgcaagtgagccaagactgcaccactgtactccagcctgggcaagagagcaaggctgtctccacaaaaaaaaaaaaaaaaaaaaaaaaaaagatatacaacagctgtacatttaaatatatgtatagttaatatatacataaaatacataatttataatcttaaaatttataattataaaatttaataaatacatacacaaacacaaacacacacacacacacacacacacacacattttttttttgagacagagtcttgctccatcacccaggctggagtgcagtggcgcgatctcagctcgctgcaagctctgcctcccgggttcacgccattctcctgcctcagcctccccagcagctgggactacaggtgcactccaccacacccggctaatttttttttttttttttttttagtagaaacgggtttcaccgtgttagccaggatggtctcgatctcctgaccttgtgatccgcccaccttggcctcccaaagtgctgggattacaggcgtgagccaccgcgcccagcccagaatatatatatatttttaagagacagggtctctctctgtcgcctagactggagtgcagtgatacaatcatagctcactgtagcctcgaattcctgggctcaagccttcctcccacctcagtctcccgagtagctaggactacaggtaccgccaccatgcctgactagttttaaacatagtggggcctcactatgttgcccagactcatcttgcactcctgggctcaagtgatcctcccaccatggcctctcaaagtgtttggattacaggtgtgagccactgagcccagccataatagctgtacacattttttatgttatatgtgataatttgatacattcacataatcaaatcaggggtatcctgtctttgaattcttaattttgtcaatcatttcaagtcctggttttacgataccctgaagtatcctgaatttctaggagaatgtggatcacaacagcttttacacaagatggtaattagggcaagagcctcaagaacaaaaatctctgctccattctatttattcaccaataaattgatgttttacgctgttgccaacttaaaatcccttaaatattgtttaaacggccttttcttcacacgatttctctgctcaaaaatattcattacctctatgtccctttagtcgaatctgggtttgataatctggctcaacactactgtaaccattatttttcctaacactcccagaccctcatccagagtgctgtgagaggtatacagtagcctcaagggtctcagatgagtccaacagtgcatgtgcctgtccctagaaactccctgccttggagtgacacacacacccttcgcctttacctagcattttttgatcgacctttcaaggttcagctcaaaatctcaagacaaaaaaaaacacacacacacacacaaaaaaccaaaatccgaccttcacctagcacctaggttctcagagccagaaagggctcctgtaaccgtcaaggctggaacagacaccgaccttgacacttcattttgatgagtgtatctatctatatataaacataaaatatagtaacaattatagtcatagctaacacatagtatttactgcaagctatgtgctcttctaagccttttacatattttgagtcatttaatgcttgcaaacgaccctgtaaaatgaggcagaatgtgtgtaagtaccttgtccaaggtcaaacaggaaggtggcagagtcaagcttcaaaaggaggaagcccagttccacagtccttgcttataaccattatgctatactgcctctaggctcagcacagcaagtagcaggtagtaagtgctcactaaatggtaagtattattactttagagatggggagaacgagcttagagtggagacaggatttgcccaaggtcatccagctcattggtagcagagctgggatgggaactcaggtctcttgtcccttgagcctgagtgtattcccaaagtgagcaggaagcattctgctccaaaccacccagggccacaggctttccaaacttggcaatgtgctctctggggtggaagtaggggtactgaccagaagaggtggccacacaggctgatgacggcatccttggctgtgtccaagcagatgttgcactcgaaagtgctgtcctgccctccgctctcgccagcgccattgctgctcccactgggcccccctgcactggagttctcaggagatgcagaggccgagggccccttgcttgccatccttggctgtcagcgaagctctgagtgaagactttccccagggaaatcctaaaaggcagagaactcttgactgtccatttctgcagccctctccccccagcttccatgccaacattcctgtcttctctaggctccagagctgattatgactgaatccctgagcagacttcccaaagcgctacagaagacaagagttgtagggcactacccaaagggcagtgacccagaaacttctcatgaatatggtccagaatatatcacacagatacgcaaactccaccaaatacagagcagcctccagatggttctccacaggaaccaggaccttgtctcacttgtctttagattcccccatgacaatcaacccaggtgacaaatacatgctacattaaatggaatgttcaggctgtccagcctctatattgatgggtgaatctgctgaggcaggaaggttgtgattgtcatatgccagaacatatatatatatttttaagagatggagtttcactctgtcgcccaggctggagtgcagtggcacaatcttggctcactgcaacctctgcctcccaggttcaagtgattctcctgcctcagcctcccgagtagctgggattacaggtgcctgccaccacacctggctaatttttgtatttttagtagagatggggtttcatcatgttggccaggctggtcttgaactcctgacctcaggtgatccacctgcctcagtttcccaaagtgctaggattacaggtgtgagccactgtgcccagcccatacgccagaatattaagaaattcctgtaactatgaaaggataggaagctaataaggaccagaaagatcatctggtccaaggtcttccatattgcaatctttttcaatcctccttctgccacattggaatactattcaccttattttatctaaatatatcaactttttagcctcagtacatttaaagaagaggtttatgtcactgtaataaatggaaaaccagtaatacttaccataagtaaaaaggttaatataaaagtaacaaatgaaaagtttaccctcataccacctgacatcacctggcacactcatactatgttttggacaatcttgatctggtccaatttctttaggaaactgcagttaccttggctagctgactaatgtggggctgagactgggactcatggacaccctgtttgcaccgtaccactacatactaaactggccactaaatgctggtataaacagaccactgttgaccaccacctccaagtcaaagaacccagccaggagttgaacaagaaagaggataaaaccaacaccaagggatacccaggaattctggatgcacattaacaatctgtcaggagccttatctggccaccctcatcacctcagaaattccaagtaggaaatgttcgctggctaccacagtcagagaagtggaggcctggatactggactcagcctctagcttgctaggtggttctgggaacctccctttccctctactgatcataattttctcatctgtaaaatgaggcactggactccctggtgtcctgggtggccccctccagctcttagactgtgcctctccaggtcatcttaacctactgttacctccaaaacaagcggccccttcacaaatttaggacttaccactggaacaccagaaggtcaccctgatgtcagcttccagagtatgagaagacaaggaccaaaaaagttacagccttctcagacccagaaagcttcctgccttcacacggtggactcagagctctggcctcatgagtatccctcaccacgataccagctcagtgacttgagcagagagaggaggccagctcaccactttttcactcagttacatcattttacataatgtcccagaagggtagctggatgctggtggcaccagtttcgtgcgctggcctcggctccaagaccttctctctgaccttcctcttcttcatattacatgtgctctcttcatcttaggataaaacccacttttgagggccacattactatctttcctcattattccagctcaacaatcaatcctaagtacccaacctatgtgtgtttctttttaaaaaaaaaaaaaaatcttaaaaaattaaaaattgctctccctccccctccccctccctctcccctttgcacggtcctcgtctcccctttgcacggtctccctctgatgccgagctgaggctggacagtactgccgccatcttggctcactgcagcctccctgcctgattctcctgcctcagcctgccgagtgcctgggattgcaggcgcgcgccgccacacctgactggttttcatattttttggtggagacggggttttgccgtgttggccgggctggtctccagctcctgaccgccagtggtctgccagcctcggcctcccgaggtgccaggattgcagacggagtctcgctcactcagtgctcaatgttgcccaggctggagtgcagtggcgtgatctcggatcgctacaacctccacctcccagccgcctgccttggcctcccaaagtgccgagattgcagcctctgcccggccgccaccccatctaggaagtgaggagcgtctctgcctggccgcccatcgtctgggatgtgaggagcccctctgcccagccgcccagtctgggaagtgaggagcgcctctccccggcggtcatcccgtctaggaagtgaggagagtctctccctggccgcccatcctctgggatgtggggagcgcctctgccccgccaccccgtctgagatgtgaggagtgcctctgccaggccgcgaccccgtctgggaactgaggagtgtctctgccccaccgccacccgtctgggaggtgaggagcgtctctgacctgccaccctgtctgagaagtgaggagcccctctgcccggcagccgccccgtccgggaagtgaggagcgtctctgcccggcagctgccccgtccaggaggtggtgggcagcccccgcccggccagccgccccgtccgggaagggaggggcagcccccgaccggccagccgccccgtccgggaggtgggggggggcagcccccgcccggccagctgccccgtccgggagctcggggcagcccccgcctggacagctgccccgtccgggaggtgggagcccctctgcccggccgccaccccgtctgggaggtgtacccaacagctcattgagaacgggccatgatgacaatagcggttttgtcgaatagaaaagggggaaatgtggggaaaagaaagagagatcagattgttattgtgtctgtgtagaaagaagtagacatagcagactccattttgttctgtactaggaaaaattcttctgccttgggatgctgttaatctataaccttacccccaacccctgctctctgaaacatgtgctgtgtccactaagggttaaatggattaagggcggtgcaagatgtgctttgttaaacagatgcttgaaggcagcatactcgttaagagtcatcaccactccctaatctcaactacccagggacacaaacactgcggaaggcggcagggccctctgcctaggaaaaccagagacctttgttcacatgtttatctgctgaccttccctccactattgtcctatgaccctgccaaatccccctctccgagaaacacccaagaatgatcaataaatactaaaattaaaaaaaaaaaaattaaaaattatgcatatagattttggaaagacaaccataaagtcagatcagtcacatcagcctcctgatgtgatgcaacagaagtacacagcaccaccaatgaaacatgtttgcgttaaaactcagacactgatcaagcatctaaaatgaattaccagccaggcatggtggctcacgcctgtaatcccagcactttgggaggccgaggcaggtggatacctgagatcaggagttcaagacaagcctggccaacatggtgaaaccctgtctctactaaaaacacaaaaattagctgggcatggtggcacacacctgtaatcccagctacttgagaagctgaggcatgagaatcgcttgaacccgggaggcggaggttgcagtgaactgagattgtgtcatcgcactccaacctgggtgacaagagagagactccatctcaaaaataataataataataataataataataaataaaataaattacctatttacagaaaatatggaggataggtgcaagtattaaacgactccatgaagatgtcatcagccaaatccagaatgtgggactttctacaggacaaacaataaagttctacaaaaaataaatagcatggacaggattggggttatagattgagatacgagatattccaaccacttgtagtatgtgggtcttattggaacaagattcaaacaaaccaactgtacaaagacacttgtgacatgattgacaaaaactgtttagcctaggtattactcgatatgaaggaattattgttggctgggcatggtggctcatgtctataattccagcactttgggaggccaaggtaggtggatcgcttgagctcaggaggtggagaccagcctgggcaacatggtgaaaccctatctctaccaaaacaaaataaaacaaaacaaaaattagctgggtgtggtggtgcatgtctatggtcccagctactccagaggctgaggcaggagaatcgcttaagcttgcgaggcggaagttgcagtgagccaagattataccactgcattccagcctgagtgacatagtgactctgtctcaaaaaaaataaataaataaaaataaaaaattagctgggtgtggtggtacacacctgtagccccagacagtcaggaggctgaggtgggaggatcacttgggcctgggaggtggaggctgcagtgagccgtgattgtgctgctgcactccagcctgggtgacagagtggaaaccctgtctcaaaaaaaaaaaaaaaaaaaggaattactgttaattttgttgggtataataatgatattgtgtttttttttttaaacaaaacctgatctgctagagacacatttttttaaatatatatatatttttattatactttaagttctagggtacatgtgcacaacgtgcaggtttgttacatatgtatacatgtgctatgttggtgtgctgcacccattaactcgtcatttacattaggtatacctcctaatgctatcccttccccctccccccaccccacaacaggcccaggtgtgtgatgttccccttcctgtgtccaagtgttctcgttgttcatttcccacctatgagtgagaacatgaggtgtttggttttttgtccttgcgatagtttgctgagaatgatggtttccagcttcatccacgtccctacaaaggacatgaactcatcattttttatggctgcatagtattccatggtgtatatgtgccacattttcttaatccagtctaccattgttggacatctggcttggttccaagtctttactattgtgagtagtcccgcaataaacatacgtgtgcatgtagagacacatatttttgaagcaatacaatgtttgggatttgctttaaaatactccaggggaaaaaaataaaaatggagagaaaagatgaaacaagaacaaggaagttggttgttgaagctgggtgatgaatggaggttcactgtaatagtctgtgtgtgtgtttgaaaattacaataaaaggtattttttttttcttttttttgagatggtctcgctctgttgcccaggctggagtgcagtggtgcaatcacagctcactgcaagctcaacctcctgggctcaagcaatcccctgcctcagcctcccaagcagctaggactacaggtgcacaccaccatgctcagctaatttttaaattattttgtagaaacaaggtctatgttgcccagggtagtctcaaactcctgggctcaagcaattctcctgcctcagcctcccagtgagccaccatgcctagccccaataaaaggtattttttaaaaagattaagttgtagaagagtatgtatataaacttatttgggtaaaaactaagtatgtatatgagtatgtatgtgtgtggatccatacacagacagacaggcagacacacacacacacacacacacacacacacacacacacacacagagagagagagaaaatgcctagaaaatacacattaaaccatcaacagttatttctgggattataagggctaggagacattgaattattatattcttaccctgtttcaatgttttataacaaataagtattactttcacaagaacatttttaaaaaggaaatcataaaatgtgaagtattttacatatgttacaataatgaatataggtattagaaaatggctttaggccaggcatggtggctcatgcctgtaaccctagtactttgggaggccaaggtaggaggattacttatgcccaggagtttgaggctgcagagagctatgaatgtaccactgcactccagcctgggcaattagagcgagactctgattgtattaaaaaaaaaaaaaaagtctttaacaatgtggaagaacatactcaactgtattacttttttttcttctttttttttgagacaagtctcagtctgtcacccaagctggaatgcagtggtgtgatctcggctcactgcaacctccacctcccgggttcaagcaattctccctgcctcagcttcctgagtagctgggcttataggtgcccaccaccacgcccagctaatttttgtactttttagtagagacagggtttcgccatgttggccaggctgctcttgaactcctgacctcaggtgatccacccacctcagccttccaaagtgctgggattacacgtgtgagccactgcacccggcctttacatgtattacttttgaaatcagtcaaaagaataataatacataaaatttcctaccccccacccccccgccatgttctggtttccaccccatgttctggttttccccaatcctgaaagttctgagttcaagtcctggttccatcactgactgtccatatggccacggtagatctcttgatgatttgaatctcttttctcacctgaaaagtgagagtatcatgcctcctacatggctactgaggtggccttatgaaataacacagtgacctggagggccctccaaggcaggacagggctgttgctgttggggaggcacacatttcataccatgtaacctggtccactgccaccccacttcgtggacccaacaaagctgtgcatggcccatactcctacacacaggcatgaggggacaaccaggatcaaggtaggtgttggagtaggaatggttaagggacagtaacaggtcagctcagagtttgcagggagtggcagccttgtgccaggccaggcactgagacaggcctgcatgtcccaactgtaggcaggccatatcactctccttgtaaatcttagtagacaccacatggtccccacccaggatctacagcctcatcctagcaggcactcaaatatttgctgagtgaggatgggcacgcatgactgactttggtcaactcccagctggctggtcaccaacttttctttgtaacatattctgggccccacagctgcatactcatccctggagccacctcttctcaccttctcctacacctatgcacaggaatctcagtacaccaaggtggcatggcagaaatcagcagcttcccctggggattgtctactgagcacctacagaaccatatgggtctaccaggactgggacagtggcccaaaacatagaggttcctgatcggctcaggaactaggcagaaagagaatcaggtcctgagcatacctatatggccatcctgctaaaatttctcatggtccctgtagaagctatagactttcacctaaccacagagcaaccttgttgtggctagttctgtgcctctgtccctaccctgaccattcttttctcctgaccagaatccactctctagttttcaaagcatttcacatctatcgctgcattttatcctcatgccattttacagatgaggacactgggccagggacattagaggactgcctaaggccaggacaccacgcaatgccaaattcagacttcctaacacaatattcagcactctcttcattcttatgtttttctattaacatgctgctttacaaaattaaatacctggtttttgtcttccctcaaatttatcgtgcaatgttgtaacttttgtgctgtttgaaatgagtacagagtaaattaatcactcatccacttattcattcaaccaaccagcagttttccaatgccaattacatttgaggtctggtgctaccaactgtggaggagttacaaagaggaataagaccaagttgaggtcttggagtctagtacaggagctgaaggcacatagattaattttaagaattctaaacaaggggctccatcaaactcacctgtttttcctttcgttgttgtttttgcctgtttttcttaaacaaagcatcctctcaccccacgaaagatctggttcccagatcccttcagagatttaaataggatctggacctagatcaggcctaagaatctgtatgcttttaatgtagccctcactttctaccctagatgattctctaattaacagagttttggaaacccagctctagaagagggtacagctctatcaatagcacaaagcaataccaacaaaatacagtattttagaaggacagaaacctcagggcctatccagctacaatccacagggactacagagaggtcagataaacttggggggtaagggacaaatctgctgaattcagattaatcagcatttagtccaactggaacacagctgatcattttaagaaataagttcacacctagttttaaaaaacagtcctaactttgagatgtccagggcaacacatgtggtgctgggactaacgcggatttgcaatacttaatgatcctgtaggaacacagagcctggcggctgaagttgactgacccagtatcttcaatatattaccttcccagagctggcctttggtctacttggtctggcccacctcacaggaattgagcaagaaagagaacacgagagttgaatatccctgcaggaaccaccagggaacttgatc

SEQ ID NO: 61437 - DNA, 246 bp, Homo Sapiens
atactttttttttttttttttttcaatagatcttttatttgtttaataacttatgaaaaggagtgaattctgatgaaaataacttcagtaaatataaatgaaaaatgttagcaacagtttatctgccctgcattgaaaatttatcaaggaattacatgggttttgtgtttgatctggaaaaacacttgtacaatgaaaattcatcaatgtaggtgtcattctgaattaaatgtctgtattcacaat

SEQ ID NO: 61438 - DNA, 846 bp, Homo Sapiens
gccgtggagggaactttcccagtccccgaggcggatccggtgttgcatccttggagcgagctgagagctcgagtacagaacctgctaaggccatcaaacctattgatcggaagtcagtccatcagatttgctctgggccggtggtaccgagtctaagcactgcggtgaaggagttagtagaaaacagtctggatgctggtgccactaatattgatctaaagcttaaggactatggagtggatctcattgaagtttcaggcaatggatgtggggtagaagaagaaaacttcgaaggcttaactctgaaacatcacacatctaagattcaagagtttgccgacctacctcaggttgaaacttttggctttcggggggaagctctgagctcactttgtgcactgagtgatgtcaccatttctacctgccatgtatcggcgaaggttgggactcgactggtgtttgatcactatgggaaaatcatccagaaaaccccctacccccaccccagagggatgacagtcagtgtgaagcagttattttctacgctacctgtgcaccataaagaatttcaaaggaatattaagaagaaacgtgcctgcttccccttcgccttctgccgtgattgtcagtttcctgaggcctccccagccatgcttcctgtacagcctgcagaactgactcctagaagtaccccaccccacccctgctccttggaggacaacgtgatcactgtattcagctctgtcaagaatggtccaggttcttctagatgatctgcaaaaatggctcctctcctccttccttatgtctccattagcactggaataaagttccttctaaaaatcc

SEQ ID NO: 61439 - DNA, 436 bp, Homo Sapiens
ctactactactaattccggccgtcgacttttttttttttgtcgggggatggagtttgcctagcacaatctcggctcattgcaacctgagactgtgcctggtcaaatgattaagtttttagagatggggtcttgctatattggagtgtagtatctatttatatgtgtgaccatggttcactgcagccttgaactgggctcaaatgatcctccccctaaccttctgagtagctgggatcacaggtacctgccaccatgcctggcaaatgatatcatttttaaaaacccaattgatataactttaggtatttacctattacataatgcatgtgtttataatatttccttctttgtatgtttatctgaacaatttagtattcagtaaacacccaatgttttaatacccaaaatagttgtgaaattagaaaacattttact

SEQ ID NO: 61440 - DNA, 423 bp, Homo Sapiens
ttttcattcaatagatatttattgtgtacctgttatgtttcaggcactgtgtaaagaactgagtatacaatggtaaacaagaaagcaagattccctgccctcatggagcttacattctagtggggcagtcagtcccacccacccacacacatacataaagccaaaaagcaaaataagtttaaagagttgtcatcgatacaaaataacaagggtgacctgctttccatggaaaaggaacgtgtttttttttgtatcaggaaccgaaagatggccagtgtggctggagcatcgtgcactgaaaggaggatggagtggaatgacactggagaggttcgcagggccctgttcatgtaaagcaataaaataaaggcatcagaattcattttaagtctttgggaagccagtgaagaggtttaagttacg

SEQ ID NO: 61441 - DNA, 392 bp, Homo Sapiens
ttttttttttttttttttttttttttttttttaggaaaacaaaatatttttattagcccttaacagaagaaaaacccaaatggcaaataaatacatgaaaatgaacatactgtccaccagattggctaattggagaaggtatgcataaatgagctcccatatattgctggtaaaaaccactatggaaaactttggcattagttagtgcaactgacaatatacatattcctatatccagccattctaaatcttaaacataaatagacaagttgacagcagtatattcataaaaagaaatacaaggggaaaagatacctttatatggaaaaaacattggtaaaaacattaaagaatcagacaaaaggatatgtaacatacgtttctgtttatag

SEQ ID NO: 61442 - DNA, 579 bp, Homo Sapiens
  misc_feature (482)..(482): n is a, c, g, or t
aagtactctccaaagagtaaaaaaaaaaggaacgaatatctcaggctacggttattgtttcctcttttcaagaatgtttcagcaaggcccagaaactgaagtgcctccatcgtagggttcctggcatcctgattagtcacaccttgaaacagtcataatcagaatttagtgagcgttttctaggctccagacactgtctttagaattttgtgtaatactcccaaagattctataaaacaaatactgctcgccatttttaagcattaagaaccgaagttcagagtggttaagaaacgcacccaggggcacatggcatggagagtaaatggcagaatcagaatttggacacaaatttgtttgggtctgaatcctgtgttcttttcattgtatcgagtgtctggcctccttggggagggaggagaactgggctccatttgttacaagtgaatagatctagagatgttattggagcaggagtctgngtggtggagattggaacatgaaacagtgaagcagctcgccttgcagcctctagcagacagcacatgcagagtatgtggaccaattcatagcttctaa

SEQ ID NO: 61443 - DNA, 553 bp, Homo Sapiens
  misc_feature (529)..(529): n is a, c, g, or t
gcctgtgctttttcccactgcctgttatatttttctcactttccttctcagtccctcactttttccaagtcagttgccattcatcttttaggtctcagtttagccatcagttctttcaggaaatgtatgctaaaattctaagactgagacaggtatttttttgtatccctgtgtatcctcctacttactataccagattacagttgcttaatttgtctgtcttctccactagaacctaaactttcctgtcatggtgttctgtcgtatttactgttatattctaccatgtagcacaatgcttggcacatagtttgttggagatgaactaaataagagacaatgttagactaaagtttacttttaaccttcagacgtagtgatttcttatcttcatgtgctgaatggtatgatactataattgttgaagttctaagaaaaacccaactataagaattgatactgttttgaggatttaaagaacacagatacaagagattgaaaatgtgctgtaggtactaatactagcctnctgctagtaggtattgtgctagcc

SEQ ID NO: 61444 - DNA, 544 bp, Homo Sapiens
ttttttccaaccaggtatgacagcggatgtattgtacatgtatctatcaaaagccatttgagaaatatccatttagttctttctttcaaatggttaacatttggggaaaaacaggtaaatcagtctgggacttacccttaaggccccctcctaaggtaggaaagatacatatacaaaatccacaactataagataatctgtggcaagccccagggattcagtaaaaagaacactatagacgtaagtggtcaagaaaagctttaaaagtggactggtacctgagtcaggcaggatgccaacagagtactggagctagaaaacagagatgaaggggaattgacaggaatcaagataaaggaagtagggaacaaagtgtggtatggaaaaggtgaataaagcaactcagaggaatatgtgtctttatcaaaaaaaacaaagccaggaaggcaagctggagaccatttgtggagagcctcaaacaagaataatggaaaaacatagggttcttgacgagtagtggctcacatctgtaatcctagcacct

SEQ ID NO: 61445 - DNA, 445 bp, Homo Sapiens
tttttaattgaagaaattttttaattaaaaaacatttttttgacggcttcttgttgagcagggctaccccacaggccatgtgcctagagtggccttaattgaaatttttgttacaatcattgtagattcctgtacagttataagaaataaaacagccgggcgcggtggctcatgcctgcaatcccagcaccatgggaggccgagacgggcggatgacgaggtcaggagaccgagaccatcctggccaacacggtgaagccccgcctctaccaaaaatacaaaaaaaccagacgggcgaggcggcgggcgcttgcaagtcccagctactcgggaggctgaggcaggagaacggtgtgaacccaggaggcggcttgcaagcgagccaacaccgcgccaccgcactccagcccgggcgacagagcgtctccaaaaaaaaaaaaaaaaa

SEQ ID NO: 61446 - DNA, 507 bp, Homo Sapiens
  misc_feature (46)..(46): n is a, c, g, or t
  misc_feature (50)..(50): n is a, c, g, or t
  misc_feature (442)..(442): n is a, c, g, or t
  misc_feature (451)..(451): n is a, c, g, or t
  misc_feature (482)..(482): n is a, c, g, or t
attaaatggtgtttggaggaaggtcatttcagaaggcccagggcangagntgagtgtctaaaacttctaatctggacttctattgaagtttggcagtaagttaaacaggaagttgaaggctaccatatgtaaatccagttgttgcctgaaatcagtcatttcaagggagtatcttgaaaggacacagactgggaaacaggcatgagaaaaaaaaaaggaagtagacagacatttggctagtatgtgcctggaccactttaacactaaagattagaaacctagggctctgagtaagaatcatttgaccagtagctaaagtgagtcatggcctgcacagaacctagggcacacatgttgaagtcaggatgttgagaacatccaggcttacctaattttgccaaggccagggagttgctgcttccagtaagggaattgtgatccnggaatttcncgggctcattttcccagccttttcccaaccnggtgcaatcaaggtcatcccgtgta

SEQ ID NO: 61447 - DNA, 481 bp, Homo Sapiens
tttttttgagacaaagtctcagcttgtcacccaggctggagggcaatggcatgatcttggctcactaaaacctccacctcccaggttcaagtgatcctcttgcctcagcctcccgagtagttgggattacaggggcctgccaccatgcccggctaatgtttgtgtttttactagagatggggtttcatcatgttggccaggcttgtctcgaactcctgacctcaggtgatccactcaccttggtctcccaaagtactgggattacaggcatgagccaccatacccagcctttttttcttctaggtaccagcttttatttatcagattggtataaatgttagaaagcgtgcaatgaaatgggcattttcacagtcgtggcagaaagtataattatctttgactttctagaaagcagtctggcattctagaaacttgcctaacctcttcccatttagacaagatgaattctgacagggccagc

SEQ ID NO: 61448 - DNA, 453 bp, Homo Sapiens
tttttttgttccttttaattcagaaagggaaggaaataaaaaagtgtgtttaaattactattgcagaaaatctggctggatgctgggacctacctcttccaggatggggattcatgatttaatttttttgagacagggtcttgctctgtcgcccaggctggagtgcagtggcacaatctcggctcactgcaaccttcgcctcctcggttcaagggattctcctgcctcagccttccaagtagctgggattacaggtgcgcaccactgcgcctggctaatttttgtattttttttttttttttggtagagacgaggtttcaccatattggccaggctggtctcgaactcctgaccttaagtattaagtaatccgcccgccttggcctcccaaagtgctgggatgacaggtgtgagccaccgtacctggcgggattcatgatttaaagcaaaaga

SEQ ID NO: 61449 - DNA, 464 bp, Homo Sapiens
ttttgagatgaagtctcgcgctcttgtcccctaggctggagtgcaatgatgcgatcttggctaactgcagcttctgccccttgggttcaagtgattctcctgcctcagcctcccgagtagctgggattacaggcgcctgccaccacgcccggctaatttttatatttttagttgagacagggtttcaccatgttggccaggctgatctcgaactcctgacctcaggtgattcgcccgcctcagcctcccaaagtgctgggattacaggcatgagccaccgtgccggacctatttaaaaatctttttgaagtacagtactaataaactaaggactacctagagatcacacttttagatattatctattttaacatagattaaaaatactgtttatatgaaaattaagcttaaatacacgtataggtaataattattttgcccatatacaagtaatgtaaacagag

SEQ ID NO: 61450 - DNA, 543 bp, Homo Sapiens
tttaacagaaccttaaaaactgaagttgtataattttttcagaaaccataatagagttgtaaaaacaaagattttaaaaatcctctgaattgtctgtcataatgagaactataatagccagttaaccaaagcttaatgtaaatgtgcttcagaatgctacataaattctgagttaagactataggttgtatttattggaaagtttatagaaggcaataaaatttttgaatctacttactgtttttcagtgtgaagagacaaaacagtagtaagtatgtaaaaaacatggaaggaaagaacttttcataaaaactcatttctcagaataagtaccagaacaatgcaagtattattccagaatatttacaaacaaaaccaaaatccccaattacccaaccacaaagaaatagcaacaagacaaaatactttaaattacattaaccattaactgtatctactattataaatacttactctcctcaaagaaatgaatttctaaacaaaatctccattatttccatactatcttcctagtatacttaa

SEQ ID NO: 61451 - DNA, 614 bp, Homo Sapiens
ttcaatttgagagcaggtactgtttattaaccaaccagcttagaaaaataatcatggtagacacctgaaaggaaaaaagaaaaccattagaaaacactttaggcagctaacaattaacataaactaggcagttataaagtaatgattgagtttacatttttaagaccacccaatttccatctttaaagactccccaaaacaggcttttcctttcctccagaaaggtcctcaaaagcacgtaaacaaacccacctgtaatcattaagatagttgacccccactccccacaaaagcactgattaaaattcaaacccccatcaatatttaatgggaaaagtattcaagattaccaccacttatactctaacattaactcaacctttctcaggatgaggtctctcaccttagttcattcttctaataagcctgttgatctggtcctccctgttgccagcatctccaccttctacaaaatgggtggtctttttcttcattccacctcgtggagaagacaatttgaagggccacaggaagttatttgcctcttttgagcgttttccaacagtatagatctcatgaatcaaatcctccatgcagatgatgccgtattaacc

SEQ ID NO: 61452 - DNA, 531 bp, Homo Sapiens
ctttgaggtagagtctcgctctgttgcccaggctgaagtgcaacggcgcaatctcggctcactgcaacctccacctcccgggctcaagcaattctcctgcctcagcctcgcaagtaactgggattacaggcacacaccaccacgcccggctaatttttgttttaggagagatagggttttgccatgttggccaaactggtctcaaactcctgccttcaagtgatccgcccaacttggcctcccaaagtgctgggattacaggcatgagccaccacacccagcctcatttctattaggggaaaaaaaaaaaaagctaataacaacctgagacttacaaagattatactattgaaaaccactgtgcaaccaattcaaccagtcactctctcacttcagttttcatattaaatctttagttagaaatagtacttatttttgttcttttttttaattttgagaaatagtactttaaaataaaactaacatggtttgatcagcttgaaataagattcataaaatgtaccttttgat

SEQ ID NO: 61453 - DNA, 569 bp, Homo Sapiens
tttttttttggttcttggtcattaacatgccaaaaaagaggcaaatggaaatatatttttgaaacatatatagtttttccagacaaaatagagatccacttcaaactatagctataacctctaagtaggtatgtcatggacattcaggtttattcaaatatactcataaaaagccaactgaaaaagtcaacaattcctcaagtccaatacaatcttcctccatggaaggaactagttttcagaactagtctctgaagcataaattctctgaaaagccatgacaaaaaaatgaatacttctggtaatagtttcggtatattcttgtccacctctataatgcaggagagacccttttccccatgccaaacagcagaaaatgcccatccttatctagagaatccttcaggacctaccacctctagcttcatccttgaaaaactatttcagagggaaaagcacctctaccacaggaagcaccaattagtgtatctagcagcacttttctgtaatgtaatttttcatcatcttttttctcaatgaaagttgacagcctcctaaattcttaattt

SEQ ID NO: 61454 - DNA, 515 bp, Homo Sapiens
  misc_feature (491)..(491): n is a, c, g, or t
attttcttaacattttctcaagtttattgtaagaacatagcatataatatacagaccatacaaaacgtgttaatcaactgtgatgggtaaggcttcccatgaatagtaggctattagtgcttaagttttgaaggagtcagaagttttatgtggattttcgactgcacagcagtcgggggtcagtgtccctaacccccccactgttcaagggttagctgtactatatgatgagatgtgcaacatggttttgataagaggcagcaagggtttaggacattctgtggcatactggccacatagcgatttgcatcaggtcagatattctaagtctagaaagcctgtgggatagctctagaggaggagcagagatgaagcaacgcaaagatgcccttgttcgtctgcaaaatttagggtctctgagtgagacacagctcaagggggggactgtgagcatttggggaagggggttctgtccaaccaggcaaagcggngagtcatggctatcacagccatct

SEQ ID NO: 61455 - DNA, 2652 bp, Homo Sapiens
gattgcaaaggaaaaattagatcaattaaagcaggagtttgaattctggtatcctgttgatcttcgcgtctctggcaaggatcttgttccaaatcatctttcatattacctttataatcatgtggctatgtggccggaacaaagtgacaaatggcctacagctgtgagagcaaatggacatctcctcctgaactctgagaagatgtcaaaatccacaggcaacttcctcactttgacccaagctattgacaaattttcagcagatggaatgcgtttggctctggctgatgttggtgacactgtagaagatgccaactttgtggaagccatggcagatgcaggtattctccgtctgtacacctgggtagagtgggtgaaagaaatggttgccaactgggacagcctaagaagtggtcctgccagcactttcaatgatagagtttttgccagtgaattgaatgcaggaattataaaaacagatcaaactatgaaaagatgatgtttaaagaagctttgaaaacagggttttttgagtttcaggccgcaaaagataagtaccgtgaattggctgtggaagggatgcacagagaacttgtgttccggtttattgaagttcagacacttctcctcgctccattctgtccacatttgtgtgagcacatctggacactcctgggaaagcctgactcaattatgaatgcttcatggcctgtggcaggtcctgttaatgaagttttaatacactcctcacagtatcttatggaagtaacacatgaccttagactacgactcaagaactatatgatgccagctaaagggaagaagactgacaaacaacccctgcagaagccctcacattgcaccatctatgtggcaaagaactatccaccttggcaacataccaccctgtctgttctacgtaaacactttgaggccaataacggaaaactgcctgacaacaaagtcattgctagtgaactaggcagtatgccagaactgaagaaatacatgaagaaagtcatgccatttgttgccatgattaaggaaaatctggagaagatggggcctcgtattctggatttgcaattagaatttgatgaaaaggctgtgcttatggagaatatagtctatctgactaattcgcttgagctagaacacatagaagtcaagtttgcctccgaagcagaagataaaatcagggaagactgctgtcctgggaaaccacttaatgtttttagaatagaacctggtgtgtccgtttctctggtgaatccccagccatccaatggccacttctcaaccaaaattgaaatcaggcaaggagataactgtgattccataatcaggcgtttaatgaaaatgaatcgaggaattaaagacctttccaaagtgaaactgatgagatttgatgatccactgttggggcctcgacgagttcctgtcctgggaaaggagtacaccgagaagacccccatttctgagcatgctgttttcaatgtggacctcatgagcaagaaaattcatctgactgagaatgggataagggtggatattggcgatacaataatctatctggttcattaaactcatgcacattggagatttatcctggtttcttaggaatactactactctgattgtgtctactgattggctatcagaaccttaggctggacctaaatagattgatttcatttctaaccatccaattctgcatgtattcataattctatcaagtcatctttgattcctggacctaataaattttttttccctttctttgggtgtccaagagaaatggtttttgccaaactctttttaaaaaacaaattgttgctatttcctagaagtttctggtttttaagatgaacataaaagtgtcagtatgcttcttttatgaggtgtactttatactttgatgaaggctaaggtgtacctaacagctttttatagtatattcatttatggagttagctgtatttttttttaaaaaagaaaagtagtaaattagcagcttttttttttaaatgaagagaacttcatgatgatttaaaagaactaatgagaatattttgacttgacttcaattactaagtattttgtataaagaacaaataggtcctgcattttataagactttttaaagctttaattattcaactaagaaccaataatggcttcttcaaggctaatatcaatagtttataagcagtatatttcacctacactaaatatgggcattttaaaagaagattccccccttcccccccagaaatctgcatttactaaatttgtcttaagtccaattgtgtttaaaggtcatgctggtcgggtgtggtggctcacacctataatcccagcactttgggaggccaaggtgggcagtcacctgaggtcaggagtttgagaccagcctgaccaacatggtgaaaccccgtctctactaaaaatacaaaaattagcttggcatggtggcgggtacctgtaatcccagctgcttgggagtgtgaggcaggagaatcgcttgaacctgggagaccgaggttgcagtgagctgaaaccgtgccattgcactccagcttaggcaacaagagtgaaactctgtctcaatcaatccatcaatcaatcaataaaatagaggtcatgctgact

SEQ ID NO: 61456 - DNA, 492 bp, Homo Sapiens
tttctgcttttacttaaaaatgtaaaatccactcagcctgaagcccctaagtaggcagaaagccagatttggcccaagggcgggaaagttcaccaatccctggtttaaaaataagcctttgctaaaatttttctaagtgactatgtgctaaattaatgttgctcaataaactaaacaatgatctcttatcaaattggtaaagggaatttccacagatgttattaggatacagggaacagagagaaacctaccacacagaatttagtggtctgattaataattaaagttatatgaaactgccaagaataaaaccacactttgaaacccattctaaatctatcgctggttaatgacagaggtgggcagaaaaagagacaaaggctcgaccatttatggaaacaatctcacagaaagatgagccttaccggtaacccaaaatgtactgccttcttcacagaatgctccagcagaacatagctatcggatctcttc

SEQ ID NO: 61457 - DNA, 558 bp, Homo Sapiens
ttttttttttatttattcattcattcattccctcatgtgttattctgaattactgaagataattattaatccaatcaagaacactgtatattcctgggcaattaccactttggattcctaaagaaaggaatgaatgatgactgtaaatactctgttatataggtaaattatgacagaggggaaaagaaagaaacacatcaatcttgcatttttgagaatcttgggcattagttcccttcatagctataatgactatcaaattatgaggtaacgttactattgatgtcaaaggaaaattagtaatagcattgaatttcaatgccacacagctaatagggattggctatttgtaagaagcatattagagaaaaacagtatgttataacttggggcccttttagctaagacatgattatccataattgttggaagcaaaacaagagaagcagagattctgcggaatttcaaaagatacacattcacaatggctcaaataccaaatgcagagtaattatgaataattcactgtccaccagcatggcactctgagagccctaa

SEQ ID NO: 61458 - DNA, 693 bp, Homo Sapiens
tttgcaatttctttttttgttttagctcatcagctatcattagttttactgtattttatgtgtgacctaagacaattcttccaatgtggcctggggaagccaaaggattggacatccctgcaaagtctctgtacttcagtttctttgtctgtgatatggggataatacaagtatctacagttcactaggttattatgaaggtaaaaagagataatatgtacaatgtaatagccattattattactgttagttatcactactattactactaccttccttgcatcttccttcttgcatagcttcctcagaaattcaccatctcattaagggaacagaatgatatgagacacaaattaatgccactattaagaagacactgtgtagttggttcagttcattataaaatttcgcgcattaattgcttagtcatacaaatacacactcgtccccagtcctagacatctggtgttaacctggaagagtggaaatacctttgcctcgttgcttcttttccttttgttcacttaatttatccagaggtaggtttgtcatctcaactccataaacggttcttgcaagcactgctgtccaggagtccataatgtttgcccactcgtttataagttcctcccattccgtgagggaggacagcacaccaagaaagtcatcccagagctctcgagaaatgtacac

SEQ ID NO: 61459 - DNA, 634 bp, Homo Sapiens
gaaggttagggaaactgttctttgcctgttattgttttttattttaagtgtttattgcaattttagtcattaatgccaaattgcaatcaagaaaccattttgtatcagaaaattgaactgagaatatgaactatgcaacgattgcaccacgtcttttgttgaaacctcttgtgtagtaatattagaatattactttccagtctttgatagtccgaatgtgcttcaaaaaaaatagttatttgattgtcgagtcatcgttagtttatattcaatggtttaatgacttcccctaccttagctgatgtgtatgcataggtatttggaaattatagcaaggcatctatttaacttacgaatctatattaccacattattcatatccaacatttgtaaaacagttggtgctttttgaagttaaaatatatctgcagtttactctatgaaaatgtatacatggatcaataaaaacatgccaggtaaaattcttccgtgattctcagtgataacagggtagtaatttaatacatgtgttttaattttgtatttcaagggcccttctaggtttttaccatgttttcaagtggattgctcatgttccgaggttgctattatccaactgatcacccaggctttt

SEQ ID NO: 61460 - DNA, 456 bp, Homo Sapiens
tttaagaatttgctaacatttattgacgagcccaggcaattactgccaagtattcaaagcttaaatgatggtactaatttgattgagagtagttttcagcatctttaaaaacaaaaacaaaaacaattcccgtagaactaaccactctagaacccatgagattaattggtatagaaatgaaaaagggagcctaaagcctttacgatgtttcctgaacagtttaattataactcaacctcacctagcttttctttccctttataaattaacatttccatctcacttgtcaattcttctacttatatcaactagaaaatagagaactattgcttataaacacctaaacctattaaaaaactaaacctttttacacttagattacagagaagaaaattatttagaaattggtttcaaggaaattgatatcactatatttctctgatatacaattatggg

SEQ ID NO: 61461 - DNA, 509 bp, Homo Sapiens
aggtccttgacattacagtttattcaatatcagaaaagaattacatttgaaccaaggaggtactataagaaacatgtaaccaaatcagagtgttctgaatactggtaagtgcaggtaagaaaattagacaataacaatcgtcattaagttgaaaggctatatctagtattttgaaaatttcctaaaagtatgattgggtatgattttgatcgtcttggaaaacaaatactctacatttcccagtgaaatttgaacattttttctttttaaagcaaaacagattttagttgcacagaatttaaaagactgtagcttatgtaactaaatttaatgtcctaaaatattttctcctaaatcatgctgcacatattttattaatctatgaataaaatctattccaggatggcactgcacatatttaatcatagtcaaatctttcttcatctagaagatccaatatagctaatattgcttagaaaataggaactacagagagctttagaattaag

SEQ ID NO: 61462 - DNA, 537 bp, Homo Sapiens
tttttttttttttttctattttaataattagaaacgtaattaatttttggacacaggagtcattacagtaatcaaaaatggtaattgcttaaaataatttttcttcaaatggaaaacaaaacccagatagagttaagaaacacctctccagcctacttacttagaatagctagacctgcttctttggcttcaacataatggatccttatagatcaggttccgccttcaactcttaattttaaatttttttccaatatcctcatgcaacattccttatacaaaacaagaactaaaagcataggtataaggcatgtaagaaactttaaccacttccttctgaatcttgctaatcatgtgcaatatgccttttgagagtaccttttgttttaaggaaattaaaaaaaaaaataggcagcagcgatgaagaccattaacacaaccacaagttagcccttacccttaaaggattaagatcaagacagaacctatgggaaacagctcatttgcataaaattgtagaaagtaagagagaaatca

SEQ ID NO: 61463 - DNA, 430 bp, Homo Sapiens
  misc_feature (93)..(93): n is a, c, g, or t
  misc_feature (374)..(374): n is a, c, g, or t
  misc_feature (402)..(402): n is a, c, g, or t
  misc_feature (408)..(408): n is a, c, g, or t
  misc_feature (426)..(426): n is a, c, g, or t
ttttttttttccttttgtacaagcaagttcctcaactatcttcctcctctgccaatcatccttctcttgattatttcgatcgtctcccctggncccaaccatctccaataattttttgtgaagtacaatgttgatgaccatagaggatgcaaagctccgggctggttctgtatgatgttttatatttatgtataatgtcttacctgatgatacccaacatattactagccttatagatgaggatggatggcagcttggctggtcaatcaataagtcagtccacagatatttaatgagcattttctatgcaacttatactgttctagatagtctatgacctaaagaagattctttgtactcggggtgggtagggnagacaataggcccataaaataaataggntaaggncagggtttacatattggntaaa

SEQ ID NO: 61464 - DNA, 381 bp, Homo Sapiens
  misc_feature (191)..(191): n is a, c, g, or t
  misc_feature (201)..(202): n is a, c, g, or t
  misc_feature (206)..(206): n is a, c, g, or t
  misc_feature (234)..(234): n is a, c, g, or t
  misc_feature (349)..(349): n is a, c, g, or t
cataaatacaaaattttatttgcacttcattagtgtagaaagaccacaatgcttttcataccacaacactcaagacacaccaagttattcaaatacataattacttaattaccttgactaaacaaaacagtgcagtttaataaaagatataccaaagatagagttcacaaattcatcatcagaccaaaaanaaaaaaaaannaaangaacacagtctaggcttaatcagaatangcttcaccgtaaagaagggggaagttttatcattacaaaggtacagagtgtttaggcaaatacacgtatgttctttgatatagtaaaatgcatctctttaaaattcctttaaacnggatttgtttaggacagcagcgtgttttaaaa

SEQ ID NO: 61465 - DNA, 455 bp, Homo Sapiens; identical to SEQ ID NO: 38445

SEQ ID NO: 61466 - DNA, 3041 bp, Homo Sapiens
caatgctacattaacccattatgtaagaccaataaatgcagagccagcgtttcaagcacaggaaataccagcaggcagaatggccagtttgcttaagaatggtgagcctgaagctgagttacataaagaaaccacaggtccaggcactgctggccctcagtccaacaccacatcttctctaaaaggtgaacgcaaagccatccacacgctgcaagatgtgtcaacatgtgaaacaaaggagctattgaatgtcggggtttcctccctttgtgctggtccctaccaaaatacagcagacaccaaggaaaacctcagtaaagagcctttggcctcctttgtttcagaatcctttgatacttctgtttgtggaatagccacagagcacgtagaaattgagaacagtggggaggggctcagggctgaggctggttctgaaaccctaggcagagatggagaggtcggtgtgaattccgacatgcactatgaactctctggagattctgatctagacctgcttggtgattgtagaaatcccagactggatttggaggattcttatactttaagaggtagttacaccaggaaaaaagatgttcccacagatggctatgagtcgtcgttgaacttccacaacaacaaccaagaggactggggctgctctagccgggttccaggcatggagacgagcctccctcccgggcactggactgctgcggtaaagaaagaagagaagtgtgtgccgccttacgtccaaatccgagatctccacgggatcctcaggacttacgccaacttctctataacaaaagaactcaaagataccatgagaacttcacacggcctgaggaggcacccgagtttcagtgcaaactgtggcctgcccagctcctggacaagcacttggcaggtggcagacgacctcacccagaacactttagacctggagtatctgcgttttgcacataaactaaaacagaccataaagaatggggattctcagcattctgcctcctctgccaatgtctttccaaaggagtcaccaacccagatctccattggtgctttcccttcgacaaaaatctctgaggccccatttctgcatcctgcacctaggagcagaagcccccttctggtaacagctgtggagtcagatcccagaccacagggacagcccaggagaggctacacagccagcagtctggacatctcttcctcttggagagagagatgtagtcataatagagatcttagaaattctcaaagaaatcacactgtttcattccacctcaacaaactgaaatacaacagtactgtgaaggaatctcggaatgatatttcacttattctcaatgagtatgctgaattcaacaaggtgatgaagaatagcaaccaattcattttccaagacaaagagctaaatgatgtttctggagaagccactgctcaagagatgtatctgcctttcccaggacggtcagcctcctatgaagacataatcatagacgtgtgcaccaatttgcacgtcaaactaagaagtgttgtgaaagaggcttgtaaaagtaccttcctgttctaccttgtcgaaacagaagacaaatcattctttgtaagaacaaagaaccttctgaggaaaggaggccatacagaaattgaacctcagcacttctgtcaagctttccacagagagaatgatacactaatcatcatcatcagaaatgaagatatatcatcacatttgcatcagattccttctttgctgaagctgaagcatttccccagtgtcatctttgctggagtagacagccctggagatgttcttgatcacacctaccaagaactgtttcgtgcaggaggctttgtgatatcagatgacaagatactagaagctgtaacattagttcaactgaaggaaattatcaaaatcctggaaaaactaaatggaaatggaagatggaagtggttgcttcactacagggaaaataaaaagctaaaagaagatgaaagagtggattcaactgcacataagaagaacataatgttgaagtcatttcagagtgcaaatatcattgaattgcttcattatcaccagtgtgactctcgatcatcaacaaaagcagaaattctgaaatgtttgctaaacctgcaaattcagcatattgatgccaggtttgctgtcctcctaacagacaagcctactatccccagagaagtctttgaaaatagtggaatccttgttacagatgtaaataactttatagaaaacatagaaaaaatagcagctccatttaggagtagctattggtgactcaactacagcctgcctggatatggatgatgccaataaaaaattagtattttccctttggaaaacttgtgaacatgtgaatacacatgtgaagtcttacatttgaaaaaccaatgttctacaacttggaaagttttcattttttatattttgctgaaatatgtcacagtggcattgcagttgtctgttagctttgggttgcagtgctagatattgttttaaattattttcattttaaacaagatgccttctaagctattgagcttattaaaaataattttacatgtttacttagttggagcaaaaataagtctattttaacgaatagctttgtttttgctatgctaatgtctagaaaggcatacgatgctactattatgctctgttttaaaggttttacctacccttgtaaaaactataatcttaaatggttttatttgctgtttactacttatacatactactactataaaactattttttcctaaatggtacaaatttataaactatcatttttcacttacggtatttgtaaatactactactacaaaaatcagctttccgagaaagaaataatcatttatttatgatattgaaaatttctacagtaaacactcaaaaccaagcaaaaaacatttgtaagatacacggtatctatttggagcaacggtttttgtaactaatgtgtttcattttttaaataaagacaactaaaaataaaaaaaaaaaaaaaaaa

SEQ ID NO: 61467 - DNA, 457 bp, Homo Sapiens
tttaagttttccaattttatgtttaaagtctccacataaaaggcatatcctccttctctgctcctgaaatgatttttggtatacaaatacatattcatggtttgaaactgagaaattacaaactggtatgttactactttttgtctaccagtgaattttatcttatttttcttttttgacaaaattctggatgagtagtttagcgtctgatattctatttttctgacaaacttttcagggtaacttttctttttgtctctgtttgctctctgcacgctaaggacattctaatatgttagcttttttgaacattatataatagtcacagggtaattaatcactatactggcttttgctagacaatgatttctgggttcaatactcatgtagtctacccaatcataaagtctatagaatgatagtacaagttgagtcttcctaattcaaaaatctgaaa

SEQ ID NO: 61468 - DNA, 1256 bp, Homo Sapiens
acgaggggagctccggctgcgtcttcccgcagcgctacccgccatgcgcctgccgcgccgggccgcgctggggctcctgccgcttctgctgctgctgccgcccgcgccggaggccgccaagaagccgacgccctgccaccggtgccgggggctggtggacaagtttaaccaggggatggtggacaccgcaaagaagaactttggcggcgggaacacggcttgggaggaaaagacgctgtccaagtacgagtccagcgagattcgcctgctggagatcctggaggggctgtgcgagagcagcgacttcgaatgcaatcagatgctagaggcgcaggaggagcacctggaggcctggtggctgcagctgaagagcgaatatcctgacttattcgagtggttttgtgtgaagacactgaaagtgtgctgctctccaggaacctacggtcccgactgtctcgcatgccagggcggatcccagaggccctgcagcgggaatggccactgcagcggagatgggagcagacagggcgacgggtcctgccggtgccacatggggtaccagggcccgctgtgcactgactgcatggacggctacttcagctcgctccggaacgagacccacagcatctgcacagcctgtgacgagtcctgcaagacgtgctcgggcctgaccaacagagactgcggcgagtgtgaagtgggctgggtgctggacgagggcgcctgtgtggatgtggacgagtgtgcggccgagccgcctccctgcagcgctgcgcagttctgtaagaacgccaacggctcctacacgtgcgaagatgtggacgagtgctcactagcagaaaaaacctgtgtgaggaaaaacgaaaactgctacaatactccagggagctacgtctgtgtgtgtcctgacggcttcgaagaaacggaagatgcctgtgtgccgccggcagaggctgaagccacagaaggagaaagcccgacacagctgccctcccgcgaagacctgtaatgtgccggacttaccctttaaattattcagaaggatgtcccgtggaaaatgtggccctgaggatgccgtctcctgcagtggacagcggcggggagaggctgcctgctctctaacggttgattctcatttgtcccttaaacagctgcatttcttggttgttcttaaacagacttgtatattttgatacagttctttgtaataaaattgaccattgtaggtaatcaggaaaaaaaaaaaaaaaaaaaaa

SEQ ID NO: 61469 - DNA, 472 bp, Homo Sapiens
ttaagaactgaaggtttaccatcttgatgtaggccttgccgtcctgaagagcactcgggctcatgtgtttcattcactcacatgttaaatatgaagccctatgtacaacatagcctgtgggaactgtggcaggggtagctgtctccatcctccagaaccttgtcacaatcaagaataggaaatgagacgcacaaatcactaccacctgtcgaagtggccttgcagtgctaaatctaagtgctgaggcaatttgcctgcagtccttgccacttcttgttgattagtccagcagcccccagctgggaggcaattctgttcaccctcactcccacctcaggacatctggcaatgtctggaaacagttggttgtcaccacttggggaaaggggagtgtgcttttggcaggtagaggcctgggaggctgctccacatcctacagtgcacagaacagtctccccaaccaagaataatc

SEQ ID NO: 61470 - DNA, 498 bp, Homo Sapiens
gaaggcaggctaccgttgtcactactactaatttatctgcagtatgagtagcagtaggtgacttcaccataactcacatcatctggatctcaaagagccactctgatgacgtaagtataatctggcagtatcgtgggaatcaggaccaccgtctttgctgtagcaatacccgggacctcagtttacatatctcctttatgtgtcgagaaagtgtatgtgtgggtggtaggagggccaggaaaaaaagctaaaatcactcaccgtgtgattgttcagcatgaactgtaccgcactaagcttcactagcttccttacgctactgtacccaatggagaggtcattgagaagctgtagtgtcttggaggtgattggttcacaacggccccagtacttcaagttggtgatgcctggaggacaaaagaaaaaaaaaagcaggagacccttttgatttgctggtttcctgagggctgggagaagaagaaagtcattcatcaaaag

SEQ ID NO: 61471 - DNA, 499 bp, Homo Sapiens
tttttttttaattcattattcaacttgaacttcttgctgtctttaatagcatggatgacaccaaactatagactaactggtatttagagtagagtatagtaagtcggtatttctctcaaggacgtcttagaatggattgacttaatcagagatttgttgggaagtgggaataagttttagttcagacactcttttggccatttaagattaagtttaggtcactttgagtcagcagtggccctggcttagagggtgtgtggctggcagacaccatcctagacactagaagggcatttgtgaagagtttggtcagttcatactaatatttaagcgtggcccatccagtgctccactgcgagcaggaagattgtgttggaagaaattttgcaaatcgaactaaaggttgtgggatatggaaccccagccccacactgcaaggagggaggtgaaagagtctgaagtgtaggctgtgggtaggagtggtgaagggtttcttgtt

SEQ ID NO: 61472 - DNA, 571 bp, Homo Sapiens
  misc_feature (360)..(360): n is a, c, g, or t
  misc_feature (531)..(531): n is a, c, g, or t
  misc_feature (544)..(544): n is a, c, g, or t
  misc_feature (561)..(561): n is a, c, g, or t
tgtagtgctgcctctgtgctgatgccctccatgtggactgtctgcaacttggccacgcagggcagtgcctgctttgagttgctcatggccttccccatggtgccactggaaggagtggggtcctggcctgcgcctggccactgccgcctcatgcccctgcctccaatatccttactcacatttctgaggaagccctacattttcaatgattatttagtagttagctctttcccttttaaaactagaatcaaaagtgatgaatatattcctatcactatattattgatgggaattaagaaaatttttaaaaaatgagggcctcttgccaactacaaatgacacattattttgctttagctngtcattttaacctcatttatggttttccagtagacctgaaaacagactgaaatctactctgaattacctagtaatcaagtgattgggctactccattcagtgaactgacaaaaaatctggttaggaaatacatttaaaaaccagtaagggaatccttttacctataaacanggaatagcaggcnattggggttagcagtgnggaatcctat

SEQ ID NO: 61473 - DNA, 476 bp, Homo Sapiens
tttttttttttttttttccttaagtgagactgaactgagtttctgtcccttgcaaccaaagatttctgacaatatggtctgctatgccatgacccccgactggcattgctttttcaatctgaccagcttcccacgactgggcaaaggaaggacagcagggctgacactgaccaccctggagctgcctaggaaggagggcagggctgcctcaaaaaagcacagggcctggcctgaactcgaggacctccagaaagggcttccatagaaaagagacataagttgagtatccctgatctgaaaatctgaaatgtgaaatgctacaaactctgaagtttttgggcacaaaacatgaaaaaacactaatctagaatcatcaacagtgattttcggatatcagattagtgatgctgaaatgttaactataatacaaatattccaaaatccaaaaacgtctaaaatctgaaatgcttctggtc

SEQ ID NO: 61474 - DNA, 508 bp, Homo Sapiens
ttgtttttttgagacaggcaatcaaaaagcatgctgatgccaaaataccagaggacgattctgcagaggcattaagataacgctgtccagatacatactctcccgtgtgcatctgggatcctgggtcctgaggcctttcaggagtcccacagaactaccttcccgagcgtcctaagccgccaccagccttgctcactctcattctcacagagtgcacagcagaggcctccgtgggctgcaaggcgtgtgatatcacaggaatgaacgcgagattcgagagcctatcttttatcaagccagacattaagatatttgcaaaaatgtaatgggtttttattgctaattaactatagaaatattctaatactattttaatttctaatatggtcaatattgatgactattacccacacaaacaagaactctcatttaagaatgactggggttccaatcattcttaaaaacatataggaaatgtgctacatatataccatggcatactacatag

SEQ ID NO: 61475 - DNA, 487 bp, Homo Sapiens
taaatattcttgatttcttgattttggggagtaactgcagcttcctacgacagcagatgaggcctcaggtctctatacctctcactcttcctttccaatggactttctatgcaattagatggcaatttgctgatgaaactatagtcagtgttcattatgactttgtactaaggctgatggttccctttctcagtaaagcctggctgtttttcctgggatggacaattgtttctttccgccccgccacctttgcttagttttctgtttatctaccttaaacttgtccccatgctgtattagacttggctgaggcctatcagtgttatttttcaaatgtacaaaactctcagctaatctcctgttccgtttttcccttgacttcctctaaggactctccaccatcttgctcagtgtggcttgactgtcacgattgccctagcatggccctcctggtggcctgtggcagcgctcttgtcagccaggtagg

SEQ ID NO: 61476 - DNA, 497 bp, Homo Sapiens
  misc_feature (285)..(285): n is a, c, g, or t
  misc_feature (424)..(424): n is a, c, g, or t
  misc_feature (494)..(494): n is a, c, g, or t
ttttatacatatataacttttgtaataataaaaaacatacttctacttaaagagaatatcaataagccctaaagtttttcatagtgaaagcccttcaaaattgcttgacaaataaattctaagtatactaactatgggaaaaatgtatgcttgcgaagactttgttagacacattttcttaaatgctgaagctataatttaaaaatgaagatttcaggagacaaaataaagtcagctggataaaaaatgtgcagagagaaaaaatataccaaaatgttaagagtngagtgtctcggccgggcgcagtggctcatgcctgtaatccccggcactttggggagggctgatgcggggcggattcacgggggtcaagagtttgagatcagccggccaacatagtgaaaccccgtctctactaaaaatncaaaattagccgggcatggtgatgcatgcctgtagtcccagccactcgggaggcttagggaggagaatcnctt

SEQ ID NO: 61477 - DNA, 497 bp, Homo Sapiens
tttttttttaaaaggtggatgaaatcatgagaatgtttagtttggtctggttttcttctaccaaaatgatggaatatttagaatttcagggcaataaaagtggaaagagagaacaagccactagctgggtatagccaccagcagagtcctctgaaggccaagaagactgattataaaactgtcccctaggctgggtgcagcggtgcacagctataatctcgacactttgggaggcagagattacaggcgtgacgactgcgcccggccttgaaaaagcttttaaatccatcctcatgaattcattcttgcagaatctagacaaatgctgtgattaatttaaccaccaagttcattttcctctgcagtttttacagtaaatacagtatagtatagtgtggcatgatatagtatagtaattttatagtaatttaggtgttagtttgacagaggaaggatgattaataccagttattcccatctaagagtatgtcatgtgt

SEQ ID NO: 61478 - DNA, 692 bp, Homo Sapiens
  misc_feature (511)..(511): n is a, c, g, or t
ctctcaaaaaagtaaaatgcctcttggctttgtgaaaaggatctcaagttgacacagaaattctttagagcacttttacttgaaaaataaagacagggctttggcttctatagatagggaaatgatagcaacccattttctcattttccttggggtcagggaataatataacattagcaattctcaagtagacaggaggaagatgaatttaaagtgtgcttgaaataattgataaattgatggcatctcctactatgtgtgatctgcatgcaatggaagctctcaaatgactagaggtgaccatgcaggaagacatagcaaaagcctcattccatgcagggcctactcgtcgggctgctgtgaaacaacagtgctttggtatttctagaatcaagttcctgtggataatccagggccccatgcagccaagcatgtgtagcaaactccacactgcaacaaagatcaggttcagggggagctacacagatgacatgacattcttgtcccatanacgtacacgcttttttaagaggcaaaaattgatgtggatgagatttccatgatcatggcagtggtccgtcgacctcagcatacataagaatgccaatacagggtgctttaaatcatgttccctaggcatacattcagaaactttgattcaggaagtctagtatgggggcccaagacctaca

SEQ ID NO: 61479 - DNA, 2506 bp, Homo Sapiens
gttcggtggcccataggggaagatggcggctgctcctttggaggagcgggattgagaggatcggggtggggagaccaaacaagagagacatttctggctctgaaggcgaacgcttcgctggccatttaggagctctgctcaaagccagacgtatcctagaaggaaaacatcaccatggctacagaaattggttctcctcctcgttttttccatatgccaaggttccagcaccaggcacctcgacagctgttttataagcgacctgattttgcacaacagcaagcaatgcaacagcttacttttgatggaaaacgaatgagaaaagctgtgaaccgaaaaaccatagactacaatccatctgtaattaagtatttggagaacagaatatggcaaagagaccagagagatatgcgggcaattcagcctgatgcaggttattacaatgatctggtcccacctataggaatgttgaataatcctatgaatgcagtaacaacaaaatttgttcggacatcaacaaataaagtaaagtgtcctgtatttgttgttaggtggactccagaaggaagacgcttggtcactggagcttctagtggggagtttaccctgtggaatggactcactttcaattttgaaacaatattacaggctcacgacagcccagtgagggccatgacgtggtcacataatgacatgtggatgttgacagcagaccacggaggatatgtgaaatattggcagtcgaacatgaacaacgtcaagatgttccaggcacataaggaggcgattagagaggccaggtttatacacaatataccattttctgtagtccctattgtcatggttaaattattctctaagtgtattctgggtgcagagatgcatgggctctgtcagtttctgggaaactttctgcaccctataaacacaatatttttctttgttttcacacattcaccattttgctggcacctttctgaagtagtgttgtcccggtatcagcctttgcaatatgttagagatgtactgtctgccgcattttgcactggttttctcttttcatttatgattaataatgtgtatacgttattcctttttattatctactgtgtaagacaagaatatttcattccaaataaagaattcagtctttaattatgcaactgaataaaatctaaagcctacagaaaacaacttcagaattcacacaaagtggaaaaaggcttaagtgaagacctggttggcttggttatgccacgacttccaaaggaaagtataggactaaaaccctcacagataactggatgtggcaaacattaacggagtaatgaatgggttcttcaagctttgcagctgtaagcagatcattgtcaagaagactctaggacttttcttctgattcactgttgataacatcacttatgcaaatgtatacaataagtggagtttaaaatattttcagtgagttgtatatttttacacatcagtgaggtatgtatagtaaaactgggggaaaaagttccaaatacaagcctgaagaattgctgcagcctcagaataaagctaagcagcattctttaaggttgtgccacccatgtgtgggaggaggttgacatctttatggaaacatcatccactgtagtcatttgttcatactttcagaatcttaacagaaattgttggatgaacatgcttctgctttgtagattttgccttagtgtcatgcccatacattgagtttacacagctggtccttcataggattccaaagttcaagggagtttttagagttagttgagaaacttgatgatctttcactgctgggaaaaactgactccttcttgcagcagattctttggctttacacacaagtctgaatgtccttattttaaagttttcctcaaaggtgcaacattcatggaatagcttgccaggaagatgtgaaacttttctacagacctttgaaatggatgagaaacattgtatgtagggatgtttagcaatcagtcttttaatagacagcccacattgtttcagcttatttcatgaagtgtctgaggcagaagctgatgataattttgggagcagtattcgtgtgtgatttaaaagactgcaggaatactgcaaaaatagaatccatttattttcaccacttaaggcagcttcatgtgatttcctcgtatcatagaaaatagagaaggaacatggatagcattagcactaataatacacacttgaagttctcagaatactgatgattgaaaactcaaacaactgctctgttgaagtcttcttttgatgagatgcctatgttagctgacgacattcactttaagggcttcttcactggattcttccctctcctgtttataatgcagcacagtgtttttatttttccctgtctgagaagcacagattatctgttaaatgctgacttctttcccctgctgtgtgtcttcatgtaacagtttctcacccacggataataaatttgctacatgctctg

SEQ ID NO: 61480 - DNA, 620 bp, Homo Sapiens
  misc_feature (494)..(494): n is a, c, g, or t
  misc_feature (544)..(544): n is a, c, g, or t
  misc_feature (588)..(588): n is a, c, g, or t
tacaaactgaaagactatttgatgagtcaaggctggctgctgtcacttacacaactctacatgctttcagtgagaggtgtaatgaagggtcccagaagtggtcatcaacctgtaggcctctacagtgtaggaagggcacgggagggaatgttcccatagacttggcagcagcccagcgctaaggcaggttccacacctaacaagatgggcagctgtaaacccaccaccaagactatttctgagccctgagcaaacacacacctaaacatcctgaatcctgatgacataaaggctgatggcattcattactaaacatctaacagctgagctcttttgaaactttgacctaataaaggctgaactgtcaaattaatatatagaaaactatggtttttaaattaacttcttcaaattaagtttctggaaagccaagagtatatcatagacttttaatatagttgacccctgaacaacttggaggttaggggtgccanctttcatgcagtcaaaactctgtggtataacttttggctccccagaaacntaactactaatagcctattgttgaccggaagcctgactgaaacnttaacagttacacacactttgtgttatatgtt

SEQ ID NO: 61481 - DNA, 509 bp, Homo Sapiens
  misc_feature (79)..(79): n is a, c, g, or t
  misc_feature (354)..(354): n is a, c, g, or t
  misc_feature (381)..(381): n is a, c, g, or t
  misc_feature (429)..(429): n is a, c, g, or t
  misc_feature (453)..(453): n is a, c, g, or t
  misc_feature (467)..(467): n is a, c, g, or t
  misc_feature (486)..(486): n is a, c, g, or t
  misc_feature (494)..(494): n is a, c, g, or t
taaaggttcgacatgcacagactacaaccctaaacctggccagttttttgtcaatgcgtgacatttgggcatgggggtnggtaggggcagacagtacaacagagagttcaaatggattggctttatttccaaaaccagtccttggggaaagatttcaaggcacgtcctgctgaaagtcagcatgcagagattgtcattcctagaacagggctgacccaaagaacaacagtgctacaagcaatcttcacacccaaccctatgacgtagggcatccattatcccccattttacaggatgaaggaaactgagggttaaggcaatttgtcccaccacttactgctgggggaatgaccngaggcccaaggctttgccaccatactngggttcccctttcccctggccattcccttttttaacccatacttccantcttgccttggggggggcccaggntcccctgatggggncatggtttatttatttttnaccagggnaacagggctctttga

SEQ ID NO: 61482 - DNA, 534 bp, Homo Sapiens
  misc_feature (25)..(25): n is a, c, g, or t
  misc_feature (29)..(29): n is a, c, g, or t
ctaaagttttttttgtccccttggnatgngatttccatctctttaatattgtaaatctgactgtaggaattttaacgcacttagcctaaaatggtatcttttttttctttttaaagagatcctgtgttcagccaaggcctaaaggatatcttttaaatttggtcatttttcttttttttgtcttgagacggagtctcgctctgtcgcccaggctggagtgcggtggcgtgatgtgcaagctccgcctcctgggttcacaccattctcctgcctcagcctcccgagtagctgggactacaggggaggccaacgcaggaagatcgcttgagcccaggagtttgaggctgcagtgagttatgattgtgccactgcactccagcctgggtaacagagtgagaccctgtctctaaaaatactaataataataataataataatttttgaaaagcatttagactatgggccagacaactgaggtagggcaagttattttaacttatgtgccttagtttgtataaaataggagtgacaatg

SEQ ID NO: 61483 - DNA, 584 bp, Homo Sapiens
aaactatcaatgccattttttattttaaaaacagaaaaattaaaacccacaattatacgtagccaagttgttttcactctccatttattttccttttaaagtgctacatttgtgaactcattagcagttaccctatcaaaatttcaaaatcatgaagaaggttatacataaaaaatgaatgttggcttgagggccaaggaaatattgactgattagatagaagagcacatgatagatctgaactactctatgtcatcattcatttggtcaacaactgcaagctcctggatgtggctgattttgataaagtcatagaattcacagtattcttcacatttgttcaatggtcatcataaatacacatcacaataaccctaatttgtgactgaaacagaaactcttttcttttttcttcgaattttgtataatatttattttatcaaactcttttctaaatagcatttttaatgaacatgaatgtataaaactgtgaacaattttaataaaagcagaaactggtcgggcatggtggctcacgcctataatcctagcactttgagaagccaaagcgggatgacagcttg

SEQ ID NO: 61484 - DNA, 471 bp, Homo Sapiens
aacataaactcagaccccaaggtttctataaactcacaccgaaccagctgcggggtagggattagagagagatctccaatcttccaggttcaagttctccacttcattaatagcatagccaccagcttttgcaacgtaaatactgaactttacacccatcttgtaaagtatgaatcgaaggtaagtgtattaaaggaattatatggtaaattcttctgtaatctaaaagggatctagttttaaatgttggatttttctaaaataggattcacccacacagtatttccttggtattgcttcacatttctggtgtgaaagagtaacggctgctcttacaactgtttgtttttgtttgttttgggacggagctcactctgtcgcctaaactggagtgcaatggggcaatctccgcctccccggttcaagcgattctcctgcctcagcctcccaagtagctgagactacaggcgc

SEQ ID NO: 61485 - DNA, 492 bp, Homo Sapiens
gctgagaaggaagagctttatttcagaactgtccccagctggaaggggccaccaaagaagcggtgagttctcgggctctggagacattcaggcagagtttgaggaatgctcatgaaggatgtggggcagggctgacaagggggtttctgcacctcaaggatcattgcctgggagccttctgaggtctgactctgagagcctgagattcctacattccttccaccttagtgactagtctatacctaagcatttggtgggctggggggtgggaggggaactgcctccaaaacctcccctaacccatgtgtccctttatcctttgtgggacagataagtgcacataactcattcaggggaaagaaggattccagaaactactcacagatatacacaccccctctaatccacctgagcccagccctgtccaggtgtttccaacacagagaagctggctcagactccagggccccaacagactcaaggataagaagc

SEQ ID NO: 61486 - DNA, 351 bp, Homo Sapiens
  misc_feature (1)..(1): n is a, c, g, or t
  misc_feature (3)..(3): n is a, c, g, or t
  misc_feature (339)..(339): n is a, c, g, or t
  misc_feature (346)..(346): n is a, c, g, or t
ntncgagagacaaggtctcactatattgcccatgctggtctcaaattcctgggctcaagcaagccttatgctgtggcctcccaaagttctgggattacaggcatgagcactgcacctggctgaaaatgttttttaatgcaaaaaagctttacatttttgcagaatctaatctatttttaaattttgttactagtgcttttgggtgtcaaatctaacaatccattgtcaaatctgagggaaatgcagatctacttctatgtttgcttctaaggaattttgcaatcttaccccttacattgagggtccttggggttatggaggttaattattatatatggnggtttanttaat

SEQ ID NO: 61487 - DNA, 493 bp, Homo Sapiens
tttttttttggcagtccccactcttcccctgccatgcatggaagccctcagcttgggagctcatcttccacaccgtcaggtgggaaccatggcaggcctgcactcttgtggcggctgcaccccgtttgccaggatttgtctgagccctgacctcaacctaggggaataaaggaagagtccccaggggttctgcggagggttttcctccctgattaaaggagatgcttgggtaaactgttcccttctactggccatcccctcatctgtaggggacacctgcagctgtgtcaggtgacttgggcagctatcaccaacaactgaggatgagggtgacacgacagagaggtgggagacagcactgagacccctggtgaattgttgaacaagggaccctgctcactggccactctgcctctggatttcttgtaacgttccttattgtttaagtcactgtcagtgatctccaaaggtaccctgactgatgcgttcatcg

SEQ ID NO: 61488 - DNA, 467 bp, Homo Sapiens
atcagaaaaagactgtattgcagatacactggttctctcaagatctttcctggctttcctggcagctaagactctcagaattcaacttcgccaggacagcaaacaatgttgttggtcagactatctgctatttcctccatctggctttctataacagagttagtgtttagacccttctcatcataggtcctctgaacaccttgctggatacagagtatgaattactaggtacatacatacatacatagattaaatatcaaaacagatcctggttaagagtcaagataagagcggctgagaacttaactcttggtcagcttatttatttgtgctaattcctacctgtgcatttagaatgttttcagatcccttttacgctactaaatctatctatggtatttctggaaattttttctctccatgttcttttccatgcaatcaagcagattatgaacatgtcacttaat

SEQ ID NO: 61489 - DNA, 2138 bp, Homo Sapiens
tactggcaacgtggttccttggttggtggcgattccggccagtctattcagcgggtttctctctgatcatctcatcaatcagggttacagagccatcacggtgcggaagctcatgcagggcatgggccttggcctctccagcgtctttgctctgtgcctgggccacacctccagcttctgtgagtctgtggtctttgcatcagcctccatcggcctccagaccttcaaccacagtggcatttctgttaacatccaggacttggccccgtcctgcgccggctttctgtttggtgtggccaacacagccggggccttggcaggtgaggggcgggcctctgtgcccaggagttcccctgtctgtggggtttgaggccaccgaggtgctgcagggtggggttgtgcctcccttcagagggggtccgggtgtcagaggagggcacagaccccagagcaggcccaggagaggaggatggggctgccttccaggttccactggactttgctgacggcaggtggctcatgagtcgccatctgccctgactcacagatatgttcccatcctggtagcccagggtccccgggataccgcctggccccgctgagtgccatggatgatgggggtccttcttcagctcagcctcgcctgggccggcctgtggctcccattttcctttcagcgggacaaaggggacttgttaccaggccattctctggatggcctgtgagatctctgcccctccaagaccctccaagtctgagcctgacccacagctgggacactgaattcagccctgggaaccatgggggcttctatcaggcgctagacccccagcccttcccctggcactaccttgggaaccagggtggggtgtggggcctgggctgcccgggagcactcagcccgcctggccctctcttgggcaggtgtcgtgggtgtgtgtctaggcggctacttgatggagaccacgggctcctggacttgcctgttcaaccttgtggccatcatcagcaacctggggctgtgcaccttcctggtgtttggacaggctcagagggtggacctgagctctacccatgaggacctctagctcccaaccccacagcctctccaaggacccaggcgccagcagccccgggacacaggggactcagtgtgtgggacttggtcactccatgtcagacacacgagcagagaggaacacaaaccactgtggagcctgaagctccttaagaagagtccacaacagctggtgggagggtggggtgggcctgggtccagaccaggctcgctgctctctgggcctcagtttccccacctgccagcgggctcggccctgtcctcctcacaggctggtgtggccgtcagggtgggtggggttattgttagtaggcgcagcctcattcccaccacgatctgttccgcgtggttcccgccaaacctccctcggtcgccgtgttctccgcaagcctcctgcagcgcccgcctgccaatgtgaggctggcaccaggctgcagcctccccaatcccagcccactttgctgtgtctctggcgggctgtcctccttggtgggagctgtcctgcacactgtaggatgcttaaaggtatccctggcctccacccatccctagccagcagctcccagtcagacatgacctcagagtctctgtgtctcctagaagcctgacagagacccccagggcagtgggtgggtggcgggctagagacccttgcctgtgtccgggaccctggcgccgctctcccctcctgtggatccctccgcactaacagtgttctcagtgggcagacgcctgggcaccccttgggccctgcccagcatggccatggcgcaggctctcgaacccgcatggctttcccaggcctggtgattctgctctccagggacggttggcaccttcctcgggggcgggccccacgcaccccagaacacacagacccacctttctggcgttctttctacctcccttttcgttgcctgaggagctggtggtttcatgagttaatgatacatcttgcaaggtgtacacatagagaaaaaaacctaaaaatgtggaaaagcacgccaaagccttatttaaataataactattaaactattcaaaaaaaaaaaaaaaaaaa

SEQ ID NO: 61490 - DNA, 778 bp, Homo Sapiens
tctctcccgtctaccctgacctggagatccagaagtatggcccagaagagcccttgccccgcctgtctgcccttggtggcagtggccatggccgacgccaggcccagccaccctgggactgagcctgactgcttcagacagccgacccctccttgtccccgctccacgcccgcagcctcctggtggcgctccgccctctcccgcttcctttgtgtatctcagccctacaaagaaaaacactcccactcttgtcatacctaattgttcctgctgtggttggggaattttttttattaaataaagttttttattataagggtaaaaaaaaaaaaaaaaaaaaaaaaaaaaaaaaaaaaaaaaaaaaaaaaaaaaaaaaaaaaaaaaaaaaaaaagggggcgggcgcgcccaaaaaaatcacatcgccgcgggcgggggcaccacatgaagcccacccccccctcatctttcgtgtaaggagggggccaccacataaggagtacgctaaataaaacgcacagaacaggcgggcgccgcggtacaaaccagacccggcggcggagggaacaacagcccacaccgcggcgccatcttgggaggagagacaaccccattcgcccgcgggggggaacgtcacggggcacccaccccccagcgaaaaaaggccgccacagggaaacaacacatctcgggggctcagggtgacccccaccgtctattcgcccgcgacaatagctccacgcaccataactcagaaatctgcgacggcgtataaaacgc

SEQ ID NO: 61491 - DNA, 476 bp, Homo Sapiens
ttttaaacattaatttcaaactatttttatttaacatttggtattgttaaacaggtatagtattcaggacatacaccttctaccacaatttctttaattagggtactttatattttatcaaaaatgtgcatattaatagattgtagtttagcctttgtcaaaagacatgcaagtatttagtatttacattaaaaggattgcctcagaagaaacattgaattcataagccctcttaaaaagtcaaaaatatgcataaagaagactagtattgatattttctgatattttagatatgattaatattttggacctccattggtttccacactatcatgcaaatttccaacttgctttaacacaacagttctatcagctgtattagagggaatacacattttaattgctctttttgaaaatatcaccaggcagttcagaatgtctcatttattgagaatattgtgacaatcaaagacctg

SEQ ID NO: 61492 - DNA, 430 bp, Homo Sapiens
tttttttttttttttattctgatttattatgctctatgttccaaaagccccacacctctcacctttactagcttttatttctggtatttttttttttaagttttgagcttatttcaatattttctaagggtcttttcatcatggcacctggggagtcttaaggacctgctgttgcctctgccggtacaagcccatagacacatgaccatctgttttctaaaagcagagatataaataacaaggcatttggggagggtcaagaccccagacacaaattatttgcaggcatgtaaatcactcttagtgtactgagttagctttcttcttcttcttcttttttctttgagatggagtctagctctgtctcaaaaacaaaaaaaaaaaaaaaaatcaaacttccaggccgtgtccctagagattctgattcagg

SEQ ID NO: 61493 - DNA, 886 bp, Homo Sapiens
gaaaacagtgtgtatagggttctgttctatcaaatgtttcaggcatcctctggggggtcttggaatgtatcccccatggataagactacgttgtataatctggtaaaatggatgaattattcataaataatgtcagaaccagctatttcaaacaagattagattctctagcctcatatcatatgcaaagataaattatatatggattaaggatttaaatgtaaaaaaagaaattataagagttccataccgaaatgcaggtttatatttagtaaaatagtcaagaaaggtatttttttttaaaaaggttaattcaaagcctaaaattacaaagggacacagagtggaaacattcatccccataaattattaaacaccctcagtggtggtggccaataaattcacacagatacggggacacttacgggggaacatctctgaacacttgcaccgagtggtcataatatatacagggcttttcccctctccgaacaacacgggcggatatctcacgcgtcgaacagactctcggaaacgaacaagtatttccccagacaaaagggggtgaacctcccattttatcagaagaaagcgcaatgaaaatcacggatggatttcttacaccgtgtgaattgggggatgcaccagtagtgggacctacggaggcctttctggtaagcactagcaacaaggtaccaccaccttactacttcaggcgcaggggttgacagcaactggagcaacatgcatgaggcgtacactggcaccaggcaaaacactccgaccggcacaaacgaacgagatacgccaaccctgcgagcacaaatcgtagggaggcaactcgtaatcgcgcaaacatatggccgtaaacaagcgagctgacgaaa

SEQ ID NO: 61494 - DNA, 549 bp, Homo Sapiens
tactaaattcgcggccgcgtcgactttttttttttttttttttatgaattttcctcccatacagaattaaaaggcagaccatacctcttcttttaaaatcatccttgcacaaatgcattccctggcttctttctcaattatataaatgaacctaattaaagacccaaccatttgcacatcaaggtagctattccatcagttgccaactttatctgtcctgatttgaagaactattcaggagtattacaagaagttatgcacctttgccctagagtaaaaacaagcaaacccttctttaagaaataattggtttcactgtctacggggatgtaagccagtctaattagtttactgttatatttgtttggctcaaacaaagttaaatggacatttgcatgactgtaaaccttatttccatgtgttgacaggttcattgctgctaaatgatgtttactagttttccaagtttgagtcaaagtctttaatgttttcagtaaatgggaaagtttctgtaaataaataccacactgaagaaaaacaaaattagtt

SEQ ID NO: 61495 - DNA, 1549 bp, Homo Sapiens
gctttttttttttttttcctaagccgtggtcaccccagcctatgaagctggaagctatattccttccaatcccaatttaccattcctgtaaacaggcccattcagggctgcctgagcaaatggggacttgccgaggcagctgcaactagacttgggctaagccgtctgggtctactcaagaattcgagtctgaagatgaccaagcttgagttattcaactgagagtgaggtgtcaaggcggaagcgactgtccccagggaagggctgtgagatggatgggcgtgagtcagcttttccaaaactcaagtacctgggacaggacaactcgctagcagctcagtcacctccgtggcggacacagataaggatgttaagaccagaaaaccagagactagggccccgtcctcagccctcacagcatgacacagatgcctccctcggagagcagggtctctcggcatccagcggcgtggtctgcattctgctctacctcatgctctaggccccatgccatcgtctcggccctagaccgtgaaaactgccagtcacccgggacctgctcctaggggctggcctgcacagccggatggcctgtgggcggggtggaagtgcccactcccactccagatgggcctgctggccactgacccacctgtgctgagggagagcgccagcctccagcttaggtacacggcgcccacccccagctccacgggaaacccataaccaccagaaacatctcaatcaagagacgggtgtgtggggtggcactaactgcacagagaccactccacgccggctgaggtagaaagaaggcaactgaacacacagcagctagggcaggggcagggaggggctgcaggtggtgtgaagaagagcccagctgtcatctaaggcaaactgcccccactgaggacaagcgtaaggccctacctcccccaacctgtgcgcatctcaatcacagcagacactgtgacggccacaggggacccagatggtgcctaccaccttgcctccaggctccactcaccagacctcaggctgagggtctggcagtggaggtaggggcagggacccttggtgctttcagaccccacggcaggtaaaatcaggactgcctgagaacccgtcaccctctgcctctcaggtcaccccccagctccaggaacctgcctcctgctgtccattgccaggtcttccttgcaccctgacacctgtgctgaggcgctctggcagctggaggaggctgattgcactccacaaacaggactgtctggaccaagggaaactggcaggagggaggtgggaaaggaagagggcaaacgtttggcttttataaagtcaaggacgtttatttcctgaggtcatgacacaggaagtggaatcctagccacggctgcggagctctcgtgatgaaggccagagtgctgactgacatgccgggtggaccaggagctggagtctgttatcttagcacgaatgctcatgaccttggtttagtgttaaacagtggagcaggtcctgagcgggcacggccaggcctggagga

SEQ ID NO: 61496 - DNA, 483 bp, Homo Sapiens
  misc_feature (410)..(410): n is a, c, g, or t
  misc_feature (425)..(425): n is a, c, g, or t
  misc_feature (438)..(438): n is a, c, g, or t
  misc_feature (451)..(451): n is a, c, g, or t
  misc_feature (459)..(459): n is a, c, g, or t
cggaaaaacatttaacattttcaatttattcaacaccaatatagaatgaaataagttttcaagtactatgtattaaaaataaagctactcctcatgccctccataattggaaaactaagattatcacacatgggctaatacatgaaaaaaatacagttttaacattagaaagtttttaaacggggatacaattgtttaaaatatttacttttcatggtattatgaacacttagaaatccaaaaactccaatggccggaatcataatatgcaaatcataaagcagcctaatttgaaatgtttttctagtcatttcaagccatagtctgattttctatgattagcactgacagtgttttatttttacacactttaaaatgttaaagtctaagggacagaaatataaaaaacnaagaatttaaaagcngaataaaatagcngagatagttttcnaaactgcnaatccatggtttaaatcccaaata

SEQ ID NO: 61497 - DNA, 434 bp, Homo Sapiens
tttactatgtcaactttgtcaagtcatttaaattcatcaataaatgggaataggaataatacttatttcacagagttatgagaagtaaatgaagtcacctatgtgaagcacttagcatgaagcagagactcaataagagctagctatttttataaaaacttatagaatataacaaacatgaccacatcttttattgagcatattctatatgccctgtgctacgtgaattgcatatattatctcttataaacctataacaaatgtaggagatatgtatgagtacctcattttatagatgaggaaactcagttcctgagacagtagcagcttccagaaggactaacagccaaaatttagtggaaaggatttaagctgagacttaagatgtctccaagcatattgtctccattttgacatctccaaatgcgaatgca

SEQ ID NO: 61498 - DNA, 251 bp, Homo Sapiens
tttttttttttttttttcttcttttcttctttctcagttttggcttgctggaatgctgtggcataaggctgtcaaagagtaggattctccccttaatcttctctgtcttctacttcttcagtttcttctactggttcaggaactttctttttttttctttcttctttggaggttcacgtacttcaagcatatttttcggacaggcgtaacttaggtgtccacttttcccacaaacctcgtgccgaattctt

SEQ ID NO: 61499 - DNA, 540 bp, Homo Sapiens
  misc_feature (496)..(496): n is a, c, g, or t
  misc_feature (511)..(511): n is a, c, g, or t
agaggttgcagtgagctgagattgtgccactgcatttcagcctgggcaacagagcgggactctgtctcaaaaaaaaataaaaaattgcattgcatacagttttcactgtaaccctaatctttcctcatgtgtagataagaataaattctttagacgaaaacctttcatcagtattaaacattctacagattttatgatatcattagcatttatctttatgcatgtgttatataaaaatatttaaagtaaatgtattttttaaatgttatttccattattaatggattgatactccttaagtagagcattcacaaccttttagtaatatttgggaaatatgtttggtctcattattagatggtattacatctcaaatgatgttcctgttgcagaagtctgcgaaacaatatctaaacttggctgcagttgagagctaaacagtgtattgaaccagttaggagtttagttctctgtagaaaaccagaggcagtccagngctgatgtaggtttngttccacattctttaggatcctaggctcc

SEQ ID NO: 61500 - DNA, 414 bp, Homo Sapiens
aatttttttttttttttttttttttgctcatgtaatagaaatcatttggttttgcctacccagaattccttacccgttctgtttaaaaataaaaacataaaaacaaaacaaaacaactccgtattattattatacattggtattttcaatcacacagtcatgccctcctcaaactcagaggtgggcctggtgatttattagacggggggagagggggaagatcaaaaatgcttgataagaaggggataaatacggcctggaaagagaggatgctctttagctgctagctataagaatgtcagcctagctttaccactatacagagaaaaggaggatttgaacatggaaagagaatcaagttcccatgacatcatccaaatccctggatccagccattcctaaaaccagtgtcac

SEQ ID NO: 61501 - DNA, 448 bp, Homo Sapiens
gcggccgcgccctcgcacagatcccagctgggtcacccgcactgagtcaacagactgagcgcgtccaggcctgacagctctgcggctcgggccctgaggtttattcagaaaacatgtccactgcaattagggaggtaggagtttggagacagaccagaacacttctactgaagaattacttaattaaatgcagaaccaaaaagagtagtgttcaggaaattctttttccactattttttttattttggttaatattaattagcatgatgcatccaaataagaaatatgaagaagtgcctaatatagaactcaatcctatggacaagtttactctttctaatctaattcttggatatactccagtgactaatattacaagcagcatcatgcagaaagtgtctactgatcatctacctgatgtcataattactgaagaatatacaaatga

SEQ ID NO: 61502 - DNA, 1755 bp, Homo Sapiens
tgtcctgcgggtccaggactgtccgcggggttgagggaaggggccgtgcccggtgccagcccaggtgctcgcggcctggctccatggccctggtcacagtgagccgttcgcccccgggcagcggcgcctccacgcccgtggggccctgggaccaggcggtccagcgaaggagtcgactccagcgaaggcagagctttgcggtgctccgtggggctgtcctgggactgcaggatggaggggacaatgatgatgcagcagaggccagttctgagccaacagcaccctagtttcattctcaactctagccctgcacactcacctatggcccgggagattgacaacttctaccctgagcgcttcacctaccacaatgtgcgcctctgggatgaggagtcggcccagctgctgccgcactggaaggagacgcaccgcttcattgaggctgcaagagcacagggcacccacgtgctggtccactgcaagatgggcgtcagccgctcagcggccacagtgctggcctatgccatgaagcagtacgaatgcagcctggagcaggccctgcgccacgtgcaggagctccggcccatcgcccgccccaaccctggcttcctgcgccagctgcagatctaccagggcatcctgacggccagaacctgagggtggtggggaggagaaggttgtaggcatggaagagagccaggcagccccgaaagaagagcctgggccacggccacgtataaacctccgaggggtcatgaggtccatcagtcttctggagccctccttggagctggagagcacctcagagaccagtgacatgccagaggtcttctcttcccacgagtcttcacatgaagagcctctgcagcccttcccacagcttgcaaggaccaagggaggccagcaggtggacagggggcctcagcctgccctgaagtcccgccagtcagtggttaccctccagggcagtgccgtggtggccaaccggacccaggccttccaggagcaggagcaggggcaggggcaggggcagggagagccctgcatttcctctacgcccaggttccggaaggtggtgagacaggccagcgtgcatgacagtggagaggagggcgaggcctgagccctcacacatgcccacgctcccctgacactgaagaggatccacaactccttggagaaacaccctcacgtctgttgccgcacacattcctctcagctccgccccatacccgtcactacagcctcacctcccacccctgtcactacggcctcacctcccacccctgtcactacagcctcacctcctacagccttaagtcccaggcccatgtctgcctgtccaagggctcaagactttctaactgggatgtggtagagggactgaaggtacctttgggggcaacagcaccctagtttcattctcaactctagccctgcacctcctgtcctctcccagttcattcctggaaccagccaggccaggcaaccagtggcccccaaaggcaggcaggatcctcaggccccagccgcgggaggctggaagggctggcagatcgcttccctcatccacctccaccggtccaggtctttgctgctgtccccagacctcctgtgacaccacgccagatcacagggcaccaggccagagatagtcttctttttgtcctttctggcctctggctagtcagtttttcatagccttacagtatctggctttgtactgagaaataaaacacattttcatatttggtt

SEQ ID NO: 61503 - DNA, 522 bp, Homo Sapiens
ttttgagacagggtctcactctgtagcccaggctggagtgcaatggcatgatttcagctcactgcaacctccgcctcccaggttcaagtgattctcatgtctcagcctcctgagtagctaggattacaggcacctgtcactacacctggctaatttttgtatatatatatatatttttgtagagacagggttctcactgtgttgcccatgctggtcttgaactcctaagctcacgtgattcacctgcctcggcctccaaaagtgctgggattacaggcgtgactacgcgtgccggccatcagatacgttcttaagtacattataagaatgtaaaaaaccaaaaatttgaatttgaaagacttaaatatcatttgtgtcatcttcaaattcaagaacaagttatttgtgcttttggttttctaaaatgacacagcatatttccagttcaccaagactgcatttgaatgtgataacagattcagattttcacacatttctatgctatgctacaaaaacgctatg

SEQ ID NO: 61504 - DNA, 428 bp, Homo Sapiens
aacttctcactacttgtgagcatcaatgacacaactaccttgctctcttgtctcccattaattaggagcctgtccagaagaggtgtgaaacaacatttataagaagtcaaagcttaactcacaggagaagcaggaaggcaccccagagctcctttcccatggtctccaaatcttatgttgccctctggctaatcaaagagagccctctttcatctatattcttctcaggactcccttccccctactttcctcaccccattcccttcaaaacaaccataaaaccttcaaagcactttttggcatggttccctttgtgtcagtatcatccccttgtgtgctgatttcagcctggtataatgggggctgcaatctgtttcaggtaattcagttgaaggtataaatattcaatctcattcctttaacattcc

SEQ ID NO: 61505 - DNA, 273 bp, Homo Sapiens
gtagaaagacagtataataattctgtctgccttgtccagcagtaattgccaggactcaatgggttgatacaaatgaagtagcatgtcagaattagctatcatgatcattgttatttcttctctaaattggtgttttccaaaccgtggcatgcagagatgattttagatggttcacaggtagacttttaatttaattaaattaatttatttatttgagacggagtctcactctgtagcccaggctgaagtgcagtggcacgatctcagctcctg

SEQ ID NO: 61506 - DNA, 496 bp, Homo Sapiens
  misc_feature (475)..(475): n is a, c, g, or t
gtcattttacaaccataacttttaaaattatactggaggcgagggagatgcatcttcctagccatggcactcctggggaaaggctgacttggcttatggctgtcagtgcacagcagcgccagtatgcagaatgcctgtgcctctgctggagcagctcagtgaggcggacaccaggtcactttaactagttttggtgccaaactagttttgtgagatagctgcagaagtgctcgtttctgtctgttgccacttcacttttggagacagggtcttgctctgtcacctaggctggagtgtaccagtggcgccatcagagctcactgcagccttggcctcccaaagtggtgggattacaggcgagagccactgtgcccagccagcttcactttcatttgttttaaaatttggtgttctgtccacatagttcagaattcaaaactgcttacaggggaaaatttcctcctacctgtgtccncagtgcagccagcattagggc

SEQ ID NO: 61507 - DNA, 445 bp, Homo Sapiens
ttttttttttttttcacattcttcaaactctatttattctatcttaaacacaaaacaccattaaaaccaaataacatcatttgtagtatggcattcttaaaaacaaagtaaattttaatgatttttaaaaatagactaagctaattactaaaccaaatatttcattacttgttataagaatttaaatattattacttattgtaaatgtttaaacttgaaatcttatataaaagaaacatacctccagaataatacccaaagacatgtttttaaagcttttatttaaaaaaagggtaaaacaagagatgacattttaaaaagacaagacagtaattaaatcatagtaccgtgtcccttttaatttgccataataattccttttctttggagtattcatttttatgctcatttctttgcaaagaaaaattacaaaaaaaatgttttc

SEQ ID NO: 61508 - DNA, 425 bp, Homo Sapiens
ttttttttcatgtttatatttcaaaataaataacacagctttccataaattggtgttgcaacagtagcagctaagattcctaacagatctaagccctgttataaaacattctttagcaatgtagcagatgctatcttagagttacaacccagcgtttttcaacagtgagctctgtgtagtcaggccattctgtaagtttttctactgtgatacttgctatataggttggtaacaaatacaagcataagcaaaaccaaggccagctttgctggcacccaggtcatatggaacctggcccagtgccatgccatctgcctctgctcctgtcctgaccctccctcctcaagctctgaccacttcttgaagtgagttcccaaacagctctgctctctgcaaccttggcggccacaggaaaaggccagtga

SEQ ID NO: 61509 - DNA, 386 bp, Homo Sapiens
  misc_feature (330)..(330): n is a, c, g, or t
  misc_feature (346)..(346): n is a, c, g, or t
gcaaagacaaagccaaaaaattgatgaagtggaaatgcagcaaagcaactgcatgaacaaagatgctgtcattcaaaaactacaggaaaatgttggcgctttttactctctatagcaatttgttgtaaatagactgatcccatcagagtgaacttcaaatgcctactaatgtcagtaacatcttctgattatctggtgtcttttattcaaggattcagaaggaaattgcaaatacattattttaaggtacttatgcaaggaaaacagctgaggagatgattttatcattcatatttcactaccagcaaaatctattttaaatgtaaccantaaaaaatagctaacnattatttcattcttactctatgcaggcactgttacaagca

SEQ ID NO: 61510 - DNA, 333 bp, Homo Sapiens
cggccgcctgcccaacccctcaaacaccaccaaacaccaggcactgggcatgtcagggtcagcaggccctggagccgcttctcccgcctctgccctctgtctagacagcacccgagggcgagggcacgcggagccccgcgcctggcagcccccccaccgcctggcccgcctcttactcactccaacttgggaacattccccttgcatgagctcactgtctccccagggacgtggccttcggggagggggctctgctctccctttggcgcagggctggggtggggtggggctgcagggatggggggtggggattctttcttctttccttttctt

SEQ ID NO: 61511 - DNA, 2598 bp, Homo Sapiens
aaagccctcctcccgggccaaggtagaggaagttgggctcccgcctggctgggaggcgggagggatcccgctcctgttgttttccgccggcaggagtaggctggcgggcgcagggggcggggtgcgccctccctccccggccagggcgctcgggagcggggacccgagcctgcagccgagctccgctgccggccctggacactcggctcagccaagcatccttcctgggggccgaggaagtggggccactctgccgttccgaggacctgggaggagccctcggtaccccgggccccggggccctggggcacacacgtccagcccagcccgagcctgcgtttcctgagccgggatctggggcgagatggccgcaggcggcagtgcgcccgagccccgcgtcctcgtctgcctcggggcgctcctggccggctgggtcaccgtaggattggaggctgttgtcatttggagaagttatgagaatgttactctgcactgtggcaacatctcgggactgaggggccaggtgacctggtaccggaacaactcggagcctgtcttccttctctcgtccaactctagcctccggccagctgagcctcgcttctctctagtggatgccacctccctgcacattgaatcgctgagcctgggagatgagggaatctacacctgccaggagatcctgaatgtgactcagtggttccaagtgtggctgcaggtggccagcggcccctatcagattgaggtccacatcgtggccaccggcacactccccaacggcaccctctatgcagccaggggctcccaggtggacttcagctgcaacagcagctccaggccaccacccgtggttgaatggtggttccaggccctgaattccagcagcgagtcctttggccacaacctgacagtcaactttttctcactgttactgatatcgccaaacctccaagggaactacacctgtttagccttgaatcagctcagcaagagacatcgaaaggtgaccaccgagctcctggtctactatccccctccatcagctccccagtgctgggcacagatggcatcaggatcgttcatgttgcagcttacctgtcgctgggatgggggataccctgaccctgacttcctgtggatagaagagccaggaggtgtaatcgtggggaagtcaaagctgggggtggaaatgctgagcgagtcccagctgtcggatggcaagaagttcaagtgtgttacaagccacatagttgggccagagtcgggcgccagctgcatggtgcagatcaggggtccctcccttctctctgagcccatgaagacttgcttcactgggggcaatgtgacgcttacatgccaggtgtctggggcctacccccctgccaagatcctgtggctgaggaaccttacccagcccgaggtgatcatccagcctagcagccgccatctcattacccaggatggccagaactccaccctcactatccacaactgctcccaggacctggatgagggctactacatctgccgagctgacagccctgtaggggtgagggagatggaaatctggctgagtgtgaaagaacctttaaatatcggggggattgtgggaaccattgtgagcctccttctgctgggactggccattatctcagggcttctgttgtattatagccctgtgttctgctggaaagtaggaaacacttccaggggacaaaacatggatgatgtcatggttttggtggattcagaagaggaagaggaggaggaggaggaggaagatgctgcagtaggggaacaggagggagcacgtgagagagaggagttgccaaaagaaatacctaagcaggaccacattcacagagtgaccgccttggtgaatgggaacatagaacagatgggaaatggattccaggatcttcaagatgacagcagtgaggagcaaagtgacattgttcaagaagaagacaggccagtctgaagaagaggatggtccatggttgtcttgctctgaaagcttggagagctacattgaagacgagctcttcattcagctttgactccacctgcacccctggcgggggcttgcactaacaatgtttgggtctcagcaaaaaacaaaaccaagcacacacatctttccttccatgtattgaaaaacattggtttgatttgctctaagttttcccaatgatgtttaaaagctttgagaaggaaagctgctttggtgtctgaggtgccacttctgctgtgaatcctggctttatccaggttgatctactgtgatagatgctgatttagagggaacagaggtcaggaaaacacaagatggaaaattgcaataacccatgcactgagacttagaaaatcatccttactaggtaaaatgtattatgatgcaataagtgccaactgatatttctcacgttgggactggccaggaactgctgcaaagaaaaataagcagctccttctccattatttacattttaagatgtggtggggggaggttgggagaaattagttctgaggttatcatatgccttttttaaaagataatggaataaagctatttttaagtaaaaaaaaaaaaaaaaa

SEQ ID NO: 61512 - DNA, 605 bp, Homo Sapiens
  misc_feature (566)..(566): n is a, c, g, or t
ttttacaaaatgtatttgttttatttatctctcacaaaaatcttattaataagttaccaaatcatctctattttacaaatgtagaaactaaggtacagaagaattatgtctcttgcccaatgtcacataattagcctatggtgaaactaaagtgttaaaatcaggcaatctgaatccatttttaattcctgggttacaatgtcttcttcctgcagcccaatcacttaagctctcctaagatagagtctcttaaaatacaacacctaggccagagctgcttaacccatttgcctagtataatccccgtgggcaccatatcttcaaatctcaagataatgcagtatacttggaactgttttatgagcaacataggataaaactgggagctggaattattcaatttagattgaatttgctgaaacttagttcaaatgcatagacagaagtttatttcataaaacagaatagcaacaaagtaaaaattttgattttgcctatgaagtcaaataccacaaaactcatcatcttgagtttatagtaacataagggacaaaggagtacaagtntcttaactggtagccaaaaatataatttctactaaagag

SEQ ID NO: 61513 - DNA, 3989 bp, Homo Sapiens
gtataaatacaagctgatccgcggcttattagagaacaacctgggagaacccatagaggaatttatgcggccttatgatttacaagatccaagaattcatactgtcctgagtggagaagtgtacacctgtatgtgcttcctcattgatatggtgaatgtaagtctggagcttaaagatccaaaaagaaaagaaggtgctgggtccctagccagatttgacttcaagaaatgcaaactgctctatgaaagtttttccaaccaaaccaagtccattaacttggtttcccattccatgatggcttttgacacccgttatgctgggcagaagaccagccctggcatgacgaatgtgttcagctgtatctttcagcccgctaagaacagcagcaccacccaagggtccattcagattgaactacatttcagatctaccaaggattcctcctgctttacagtagttctcaacaatctccgtgtgtttctcatatttgactggctactgttagtccatgattttctccacactcccagtgatattaagaaacaaaatcatgttactccttctcgccaccgtaactctagcagcgaatctgctatagttcccaaaactgtgaagagtggagtagttaccaagcggtcttcccttcctgtgtccaatgaaaggcacctggaggtcaaggtcaatgtaacaggtacggaatttgtggtcattgaagatgtgtcctgcttcgacaccaatgccattattctgaaaggcaccacagtgctcacctataagccccggtttgttgatcgccccttttcaggaagtttgtttggcattgaggtgttttcatgccgactagggaatgagcatgatacagctctttcaattgtggatcccgtacaaattcaaatggagttggtggggaattcttcttatcaaaatagttcaggattgatggatgcattcaatagtgaagatttcccacctgtcctggagattcagttacaagccctggatatcagactctcctataatggtgttcagctgtttcttgccattgcaaaatccatcccagagcaagctaatgctgcagtgccagactcagtggccctggagtcagactccgttggcacttaccttccaggtgcatctcgcgttggagaggaaatcagagaagggacaagacacaccttagatcctgtcttggagttacagctggctaggctgcaggagctgggattcagcatggatgattgtcgcaaagctcttttggcgtgtcaaggccaattgaaaaaggcagcaagttggttgtttaagaatgcggaacctctgaagtctctttccttggcctccaccagccgagatagcccaggggctgtggcagcgccattgatctctggcgtggagatcaaagctgagagtgtgtgcatctgtttcatcgatgactgcatggattgtgatgttcctctcgctgaactcaccttttcccgtctgaattttcttcagcgtgtaagaactagccctgaaggctatgcccacttcaccctttctggagattattataaccgtgctctttcaggctgggagccatttattgagccttggccatgctctgtatcctggcaacagcaggcagctggtcgtctccatcctcctcgactgaagctagaagccaaggccaaacctcgtttggatatcaatatcacttctgtgctaattgaccagtatgtaagtaccaaggaatcgtggatggcagattactgtaaagatgacaaggacatagagtcagctaaatcagaagactggatgggctcttcggtggatcctccatgttttggacaaagtaagagttttcactacatgtgtttaactaaatcacttttgacctacaaagcaatgcttcactgagaaattcaaatggaaccatcattctgcgtggaaaaacctacaggaaattctgactatcttctgtagttctgttttagtctttgcaggagacagttttctggcatgaactactgaacttataaatgtgggctgtaattccacctttgcgggggagaaaagatctgcaacacgtaattcctaaatcctggtaataatgcatatgaactggtgcacctgagaatgcatcaggatcagctgtggtttgtgttttactctgcaaaacattggttttctaattgatcggatttttttggccagatttttaaaagcatctaaaatggtcttctaaatctagagatagagggtttggacatattcttgaaaagagggcgagcaggagcccatgtggaaaaagttgttaaaaagggagccctgtgctgttcatagagtataaaagaattgaatgccctgcctcttgaagaaagaggagtcagcttgctctctattgatgatgctttctttccttatttaatgcctcgccggctctgttttcctcagagctggggagatggtgatggacaactgcatggtcttagttgttccacaagccattgtcatccaaattcaactcagctccaactcttacaatgtggtttctttggggagtcttggctggacttcacatagctcatgaatacttaaatattccatctggtctgcaaacgtgtcatgggaagattgggtgttcttagtgtgtgaagtaattgtactggttcatctctcctcagggtgaataagtggactttctgtctgccttgtacttctagaaagagacacaaagaaatgtcagctgtgcttgttctctgttttcccaggctgttgcttctgagtctcaaggtcattacttaggagccagggcttttcagatattgtcagctttgattttagctcctcctccaaccttcccaatttgtgtgtcaagaaaatgtaacatagtctacccagaagactctagataatctttgtaatatgtccaagagagtgtgtttctaaaacattattcatgcaggggcatcttcaattcagagtcaaactctagcaaggcctggtctgcaagattctgatgaaagattttcttgtccctctctttcttctttccttcttccctccctgcctccctttcttccttcctttttaaaattttgtccctctctctttctctatagttaaaaggcttcctcatctatattaaatgctggtgctgagttaaagcttgatttttatttatttaaagatttttatgattacttaggcttataaaagtgtaatctatctttttaataagacataacttgaatatgcataaatttccaaacctcttttcttattggaaattcctggatggtagtacagtacattccaggattgtattcttttagcaggcctactaaaatgatcattgggaatttattttgaaagtgagtagggttcaaccttgttgaactaatcataaactttcaggtcttattcaagaatagtaagtcatattcctacaaaagttatgcttcttattcagactggccttaaaacaagctcttgggaatagcccttaacatgaaatttagcctaagggacctgctgctttctcactgtttctttatcaggggaaagaaaataccagcctccttttgacaaaattgttggctttgttcagtcagggctgagattttgcaggtaaacctgggcggtgtggcacttcattgaatttattagttttgtattccaaggacattttatgaaaatatcaaatattctgaaaacttccatgcttgatttagaatttaaataaacactatgaggcaactccttggtagagattgtttaaatttggaacacatactgactcttcccctgaatttttgagatcccctgagactggcattttacttctgtgttttaccagttggaatggagcaaccttcactaaaatctgtactgatggattttcgtaactttttaatgccatttaagaacataacacctttaaattaaaaatcttcaaaaggctcgtcattctgttcaagagaaggttcaatacatattcttctaattcagg

SEQ ID NO: 61514 - DNA, 465 bp, Homo Sapiens
tttgtaatggaatattttaatatatccttgcagaaaattaaatagacaagtgatagcatacaagttatttgaaaagttaataaaatatttctaagaaacatctacagaagcttttgttcaacaaaaacatacacatggtttttaatcacatataatgaaacaaaattgaaaatgtactgagagatgacattcaactgtaataggaaacaccgacaatctgcttgatattaggaaggtgcttattcttacactgtaggactgggtaagtgcattccctgcacagtgcagtggagaagcaaacacccatgtagttctttttgactgcaccactgtagttgtcacggtggaatcagaaacacatagtcactggtactgttaacaaaacatggtgtttattacataaataataccttggataaattcaacctagagatgaggtgagtcagagcatcagagaatattccc

SEQ ID NO: 61515 - DNA, 371 bp, Homo Sapiens
  misc_feature (278)..(279): n is a, c, g, or t
actaccttgtacaacaaggaatacagtactggtttttaagtgtggagaaaggtttaatatttaaacaatatagccttaataaaataaatatactcaccaataaaagcactatcagattccaataatgagtttttcaagaaatcactagtgtcatctctgggctaaaagaaacatgtttcaatgactatttttattagttttgtgtacaaaaacaacaaatttatactaagaagaggcacaagtttccacactgttctccctaaaagcagaggatgggnnagaggtagggactgactacattccaatgctcagaaaatactggaaagccttaacacacacaattcctacgaagaacggtgatagcaacagaa

SEQ ID NO: 61516 - DNA, 431 bp, Homo Sapiens
  misc_feature (290)..(290): n is a, c, g, or t
tttgctgattaagtaaagaaggctcagagaaattaacctgtaaactcacagtagaactaggatcagaaccaaagcgtatgtgaagccaaagccaatgaagggcatagtgttaagcatggaagctacatcagcttatttaatctcggcaagaaaaaagtattaagtactaactaggcaaagtttttgttgctactattatacgtatgaggtacaaaaataatcccattttctacaaaatgaaactaaagctgagggaagtaatttgctcataggtagtggataaagggganaatccaggcaatctaacagcccatctttttaaaagcaaacaagggctatattgtgccagaattctaataaaattaaaaaataagctaaaataaacaatataccaataacaaaaactgcacatatcctcttataattaaatt

SEQ ID NO: 61517 - DNA, 455 bp, Homo Sapiens
  misc_feature (219)..(219): n is a, c, g, or t
tgaccaaagaagcaggagaaacatccaatctatatcttttcttcatgttccaattcagtcattgtttcttgaatgtttctcccaggaagaattaatttcaccaatgaaagcactggagggaatggtgcctgaatatttaaaaaaatgaaaatctctctcatatgtggcttttagtaacaggggaaacaaagtaaaatgcacctcaagcaagtgtgagangggcgaggaagaaagcttttcagaaaggtgcattagcgctcacaacagcgccctctgctgtccaagtggtggctgaagtgaaggtggctttcatgctatcagaaaagcccttttcactaaacaaaattgatgttatctcctcttctaggctctagagaggtcagaaaaggaagagcaaagaattagcaataagtcagacagacagcagtgacctattggaagaaaggaaaggttac

SEQ ID NO: 61518 - DNA, 443 bp, Homo Sapiens
  misc_feature (335)..(335): n is a, c, g, or t
  misc_feature (429)..(429): n is a, c, g, or t
  misc_feature (435)..(435): n is a, c, g, or t
ttacaataaggaattatatttaaattccacactgaagatctggagtatgggggggatataggaatttcagcatatgtattatctgaactaaatttacaaaagtggaacagttggaaggtacttataggtagacctgagggtctgttaccttattttcagttcagtgaaaatgaaatgagagcagattccagattttaccagcggatggaagactccatcttcccatcatgctctcagcatgcacctctgataagcagcttaaagggaatttcctgggggtcagacataaatagagattctcaggttctctttaatcccagacacacatcgcttgnagttttaggccttcattaaatcttcaaaaacagtcagcaacatattgaaaggcaatgtttgtttagaaggctccaaatacatttaaattgggancgtctngaaacatg

SEQ ID NO: 61519 - DNA, 1254 bp, Homo Sapiens
ggacgaggggccagctgagccccgcggtctgctgtgagctgccggcctcctctcctgagtcctgcccgtgccatggctccccgctaatccaccaggcagcgcctcgccctcctcctgtccctcgcgctgcctgagcctccagccaactcatcccaaggccaaggtaacctgagcagagatagcacggcacatctttaattgtgggggggatggagagataagagtgatgatcgcatgtgtttacaatacacagagacgcccagtgctggcaagactataataaagcgagcgtactcacaccactgcggctggcaccaaaaaccgggattgcagtggaaatgtttttggaaagcagtttggcaactgtcaacaaagcgactacagaacagttgtcaatgagacacagaaatacgaaggagaggagggagggcagaaacccagttaacaatgtaagcgggcacggagggaagatcagcgtgcaaagctaggtcggcaagacgtgcaaggtgcacccacagccataacaatccctccccagaccccaacgtgtcctcacggtggtggcagtggccccccgcactacagaagaacaatgcgaggcgagctcaggcgcgctgatggtggtttccgatacaactccccactcaaagaaccccggagagctcttgattccatctctcagtagggtcctgaagtccatgctgtctgaagacacagggtctccccctgcgtctgtgccaggacagagggactgccaccagccaagctgcaatccttttaaacgctaaaaacggccgggcttggtggctcatgcctgtagtcccagcagtttgggtggatgaggcgggtggatcccctgtggtcgggagttcaagatcagcctgaccaacacgaataaaccccttctctactaaaaatacaaaattaggccgggcacagtggctcaggcctgtaatcccagcactttgggaggcagaggcgggaggatcacctgaggtcaggagttcgagaccagcctgaccacatggagaaatcccgtctctactaaaaatacaaaaaaactagccgggcttgttggcgcatgcctgtaatgccagctacttgggaggctgaggcaggagaatcgcttcaacctgcaaggcagaggttgcagtgagctgatagcatgccattgcactccagcctaggcaacaagagtgaaatttcgtctcaaaaaaaaaaaaaaaaaaaaaaaaaaaaaaaaaaaaaaaaaaa

SEQ ID NO: 61520 - DNA, 530 bp, Homo Sapiens
caagaagaataactattaaatcatatctactacttatacctcaactcttcccacctttaagggtgaccactttttttctttttcttttttttttttttttttgagacaaagtctcactctgttggccagggtggagtgcagtggtgtaatcaaagctcactgcaaccttaacctccctgggctcaggtgatcctcccatcttcagcctgtcaagtagctggaaccacaggcatgtgccaccacacccagctaattttttttaatgttttagagagacagggtttcaccacattacctaggctagtctcagaactcctggactcaagtgatctgcccatctcggcctctttgtatgtagactgtaccatgttgaatatattatcaatattcaagaaactagctttaactaacttttgctggtcaattccactgtactggctccgaaaattatcctctgggtactccctactatgaaaatggaggtatttttcaaaagatattaagaaattctccctatcaagacttattta

SEQ ID NO: 61521 - DNA, 365 bp, Homo Sapiens
ttttttttttttgccacagggtcttgctaagcccaggctagtctcaaactcctagacttaagcgatctccctgcctccacctgccgagaagctgagattatagtcactgtgcctggctggaatatagccttttgactccatgtcattacccgcactcttcgctcttcctggaatgtatttcctgagcctgtctgccctaaaaattccaatttctcctttaagctttggctcaaatgctatctatactctgctgcctcccccaagtccccctagtgacacacagggtcctcttctgctcttccttatgttcttctttgtcagagcaacatcacagcagtaccccaacatttggtagcaaacccttt

SEQ ID NO: 61522 - DNA, 475 bp, Homo Sapiens
  misc_feature (332)..(332): n is a, c, g, or t
  misc_feature (342)..(342): n is a, c, g, or t
  misc_feature (345)..(345): n is a, c, g, or t
  misc_feature (348)..(349): n is a, c, g, or t
  misc_feature (378)..(378): n is a, c, g, or t
  misc_feature (392)..(392): n is a, c, g, or t
  misc_feature (467)..(467): n is a, c, g, or t
ttttttttcctaatttggtggtaagattttaataacacatttaaagcaataagtatataaagcacaaaaccagtgggtggccaaacatttcctattggagggagctaaatcataaaaataatgttaaaaggaaggtatgctataaggattgtaataaaagtggtctctatttaacatggcttcttatttgggttactgttaaacagacacgaatctattttctgcctataggtgaccccacttcagctgttaacttgctgtctcagtgcttaattgtgcttgggtaatcaatactgtcagaggaagacgtgtgagtgtatggtatggaccanagaaagaganatnaannaaaagttaaccttaaaaaggattgaattngggctggacactgntggcccacgcctgttaatccccgcactttgggaggcccgaggtgggtggggtcacaaggtcaagagatcgagacnatcccggc

SEQ ID NO: 61523 - DNA, 1640 bp, Homo Sapiens
aagacagatttcctgatataatgacttgtcatcacagatcttgtgtggattgcttacgacaatatttaaggatagaaatctctgaaagcagagttaatattagttgcccagaatgtactgaacggtttaatccccatgatattcgcttgatattaagtgatgatgtcttgatggaaaaatacgaagaatttatgcttagacggtggcttgttgcagatcctgattgtaggtggtgtccagctccggactgtggatatgctgtgatagcatttggatgtgccagctgtccaaaattaacttgtgggcgagagggctgtggaacagagttttgctaccactgtaaacagatttggcaccccaaccagacctgtgatgctgctcgacaagagagagcccagagcttacgtttgagaactatacgctcttcatccattagttatagtcaagagtctggagcagcagctgatgatataaagccatgtccacgatgtgctgcttatataataaagatgaatgatgggagctgcaatcacatgacatgtgctgtttgtggttgtgagttttgttggttgtgtatgaaagaaatctcagatttgcattatctaagtccatcaggatgtactttttgggggaagaaaccctggagccgaaagaagaaaatattgtggcaactgggaacactggttggtgctcctgtcggaatcgctttaatagctggcattgctattcctgcaatgattattggcattcctgtgtatgtgggccgcaagattcacaatcgctatgaaggcaaggatgtttcaaagcacaaacggaatttggccatagcaggtggtgtaacgttgtctgtaatcgtgtctccagtagtagctgcagtgactgtaggtatcggtgttcctattatgttagcttatgtctatggcgtagttccaatttctctttgtcgaagcggaggttgtggagtctcagcaggcaatggaaaaggagttaggattgaatttgatgatgaaaatgatataaatgttggtggaactaacacagctgtagacacaacatcagtagcagaagcaagacacaacccaagcataggggagggaagtgttggtgggctgactggcagtttgagtgcaagtggaagccacatggatcgaataggagccatccgagacaacctgagtgaaacggccagcaccatggcactagctggagccagtataacggggagtctgtcaggaagtgccatggtaaactgttttaacaggttggaagtacaagcagatgtacagaaagaggctgctgtcgccgctgctgggagatgggcctactcgcccgccaccctgcgctgccgccgctctgaggagttaaagaacatccatgatagcagtcttctgtaaatcgaacttttcaagaattctctgaaggaaccaagtaggatattcttacatcatgacttaatgtgaatgcaagaacaagaaataggttttatctctaaatataatgaagggctgtgtgtaaacactgaccctgtctcaattctaacaagcattttagacatgagtttacaccggcaaatgggttcagatcgagatcttcagtcctctgcttcatctgtgagcttgccttcagtcaaaaaggcaccc

SEQ ID NO: 61524 - DNA, 1775 bp, Homo Sapiens
aagaccgtcccggatggcctcggggactgccagtgtgtggaggtgagctccgggattgccggcattcccgcttctgctggttgcttcatgctgcaggctgcggccgtcagccctcgctcgcattggtggcgctgaggtgccggggcagcaagtgacatgtcgtcgggcctccgcgccgctgacttcccccgctggaagcgccacatctcggagcaactgaggcgccgggaccggctgcagagacaggcgttcgaggagatcatcctgcagtataacaaattgctggaaaagtcagatcttcattcagtgttggcccagaaactacaggctgaaaagcatgacgtaccaaacaggcacgagataagtcccggacatgatggcacatggaatgacaatcagctacaagaaatggcccaactgaggattaagcaccaagaggaactgactgaattacacaagaaacgtggggagttagctcaactggtgattgacctgaataaccaaatgcagcggaaggacagggagatgcagaaagagcttgcagaagcagcaaaggaacctctaccagtcgaacaggatgatgacattgaggtcattgtggatgaaacttctgatcacacagaagagacctctcctgtgcgagccatcagcagagcagccactaagcgactctcgcagcctgctggaggccttctggattctgtcactaatatctttgggagacgctctgtctcttccttcccagtcccccaggacaatgtggatactcatcctggttctggtaaagaagtgagggtaccagctactgccttgtgtgtcttcgatgcacatgatggggaagtcaacgctgtgcagttcagtccaggttcccggttactggccactggaggcatggaccgcagggttaagctttgggaagtatttggagaaaaatgtgagttcaagggttccctatctggcagtaatgcaggaattacaagcattgaatttgatagtgctggatcttacctcttagcagcttcaaatgattttgcaagccgaatctggactgtggatgattatcgattacgggtaagacccagttaagaaagttagtgcaatctccaaacttcatgtggtgttatcaaggcacaaactggcaggtgcttaattaggggactttgttttcccaaaaatcatgcttgattcaccctgcccttcctttcctccttggggaaatctgtgtttccactttatactctttgtccaaaactcagtttcaaaatatttgcaatgggaccctcacatttgcatgaaaaccttggaatactcttcataaggactaaatactttggtagatagcaattttggcttaatggcacagaacttagcaacagcatgtgaattgtgattcctgtgggctctaaaacctaattacctaaagtgggatatagaagtacaaatggatgtatcatagggataagacaattctgaaacaaaaactccaagctgagaaagaggggacaggtgtcagagcagggagaaatgattggatgttgaggaaagctgcatttgaaccaaaacttgccaagaattctcttggcatctgacagagagaccaaaacttggttgtatcatttttgattggggcagggggcggagggcgaagcatgtaacttaatttgcagacattttttttccccataagcctgaaggaatcatcacataagcttattaaatacaagctattgaaagatataatggaggatgaatttggcattagtaggcattttact

SEQ ID NO: 61525 - DNA, 3203 bp, Homo Sapiens
cctctgcactcccagcctcctggccccttctgtacatgatttccttgtggccactccatgcatttttcttggctcaagacttagtgggcctccatgggacttggtacctctacttgttcccttctggaatctgtaactttgtgttccccaccattctttcctttatgaaccgatggtgcaacagcatgactacctgaaattcttagtcacccccagctgctttagtggagggaaaatgcccacagcacaggaaatagtcctgcccttcgagagaggccaggggatgggagcgtgtccagagaagggcgatgggttgatgaagggtggccacagcgcccgggaggaaggggccagaacgctctctgttctgttccatgaggaggattatgctggtgtgtgtagtccactggttcagagttgtccagaaatagctcagtgtaaggaacaattttccaaagatcaaaagagctgtctcaagatagcagtgcgttcccagcccctacaggtgtatacagcacaaagggagggaccccctggtgtggctgtcacagagggaagtggacgtcctgtggtttgaccccaccagatggctttagagatctgggccccagggtctgtgattctttttcccctccctcttttctctcccttatttcactgacttttttccagccagagttctagcatcttctttgtcaagcttttaatgattttccctgccacatctatccttttaaaaacaaaatggagtgtaagcggctaagctgtacctcattcccagggctctgtccatgcaggccctcacggcgtccccgaggcccctcagtccagacccatgcttatattgcatccctgatcaccgtgtgctgttttcccttttacccacttctctgtatctgcctttctctgtctctagacagggaacttcttgagagcagagactgtgtctctttgtccctgcctcccagagcgcccagccctgggaacctgctgagtggatggttgctgagtgaatcagagggaggggtagtttactctccctgaggaaaggagaagtagccaccatgcagttctgcctgggttggagttggaaaggctctgtgatggtagaagtctcgcatggccattatctgtcattgcatggtgaaagcgataaagtcctctaagatgtcataactttctgtttttcctttatagcaagcaacccagtgatagcagcccagctctggtgagtgtccttgagctctagagcacagctctcctctctaaggatcgtatttatttgcaatgttgactttttccttactacagtgaaatcaggaagtgtgtcatctggtaatttttttcccctttttctgctgcctggctattccatgctcatggctttcaataagtacacaatataatgttccaagacagtttggtttttttggcaaacacagctgctttgtttgagtagctgtgtgctttgtttatgataacagtgggtgggaaaggtagaggcctgtgcgcagcacactgtgctcatggcgtggcaggcagtgctgggagaggaaggccttgctcgcgagcaaaagctggacgagagcagatgctagatttgctcagtgacgtgcaggttttacatcatagaagacattaaacacctttactgaaattcctgcaggaaaatgaacttatcacaagagtgaaaattgccagcacaggattcagcaaacattttctgtaaagggccacatagtccatgtttgagactttgcaggctctgctgtgtctttcacagctactcacctctgctgttgtagctagagagccgctgtggaaaatatgtaaatgagcgaacgtgactgcattccaataaaactttacttataaatatcagtggaccagatttggcccaaggggtatagtttttgcaggcctcttccctggcacaggtgtccagggtcttgcctgtatagtagaatgatctggtgagcataattatctgaaacatcctccgcagccacaccccaggcgcattgaatcagtctctcagggtgggacccatatagcttgtttttaaagctgcccaggtgagtctgcccggcatataccgctcttgctctctctgaaacaactgcctgtcttatgtgagttttggcttgttgagtagacaagctgtcatgtgagagaaccacagacttgcattgtttggacctttggtctgaactgcagccgctggtaggtaggccaggttcattaggctctcagtcatcccaggcgcaggtctcaaggcggctgagagggtggtctttgagatgggcacagcttgactgtgccatgcactatcagtcaggacagttggcaaaacgtggcacggggtggagcgggttgcagataccccggtgagcgaggagagccctggctgaggcatcaggaaccctccctccaggtaccagctgtgttctaacccagctctggagacttaggccttcctacttctgggcctccgttttctgttttgcaaatcaggaggttgggctagatcagtgtttttccaaactgttttaccctctgattttcaccctctagaagaaacctgatgtcaaagcccaaaatacagaacagacaaatgtggaggtcctccggatgaagccgagtggggagggagaggccagttcctgcctgctcttctgccactcctcccaccccgtagctccagggcaccttcaaggaacccagggttctagagaacacagctggtccctcatattacacagctggaaactcaacctcgcatctctgattccaaatcctactttcagcgtcattctgccttttgtctctgggttttgttctcagcatctgatgaaggggctcaggggtcctgttgaactgctctgtgtcgccccctgccccggagggtgggaggaggttgcagtattctggatgggttagttgtaggtccctagattcaccccatttttaggatccttctggcagatagtatgccaaatggtatctgtacctttcttagcttgtcggggtgtcttgcttttaattctctggggcttgtaagttacagccccaatttctttactttgctctctaaggtagtgattgttttgcttgtttctccctaataaaattacattttcctcccagcatctagtggagattatatattgggaaccaaaacaaactaaaaaaaaaaaaaaaaa

SEQ ID NO: 61526 - DNA, 505 bp, Homo Sapiens
  misc_feature (347)..(347): n is a, c, g, or t
  misc_feature (387)..(387): n is a, c, g, or t
  misc_feature (496)..(496): n is a, c, g, or t
ttttaaagactagtcaagtgcaatagtaagggaggaaagactagaacgagactgttcgatccgtaactgactgtgaacaatcaactgagctaactcactacctttggacgagcatcaatgcttttctggagtcaatacacagagaggcttttctcatcaacaactgaaaacaccttggttagaagctagatttactagagtgaaccagagaggtagcatggtatatggagtgacccagacctcagagtaagacagccccagattcagctcccatatcagcctctcatttcctacatgctttcgtgtaaggaacagaagtaattcatgagaagtacttagtgcctggntgaatcatgagcacacaataaacagcagctcttgcaaggntcaacttgactcaccaacccaatgagagagagctaaggcagggcaaaggcacaggaggaagggccaaaaacctcactggggcgaatactttacttgggtctcagggggncctcacggt

SEQ ID NO: 61527 - DNA, 464 bp, Homo Sapiens
tttttttttttttttttctggtataaaagaaaaaaaaaatcacgtttattttacaaggcagttattttcctagagtgttacatatcaaggaaagttgagctgtctgtaggaaaacaatataattttaggaaattacagaagagtcaacattgtgcttaaaactttaaaatagtttttaaaaatagcagagtaagtgaatattgccaggtatgaacagccttaaaaagtgaggtggacacaacgatatagaagctcaatattaaagccgctagtgataagtcgctttgagaagtgttcaggctactaagagaacactgcttcaaccttaatcgaaaaaagaagtcatagcactaactgaaacatggccttttcctagaacagctaactctcagttatctacagtaatgaaaaagagcagtgacaatttttaaatggtgaataattccaaaattaatgttgagaag

SEQ ID NO: 61528 - DNA, 563 bp, Homo Sapiens
  misc_feature (20)..(20): n is a, c, g, or t
tttttttttttttttttggnagagacaggtcttgcttgctttattgctcaggctggtctcctgggctcaagcaatcctctcacctccgcctcttgaagtgctgggattagaggcgtgagccactgtgcctggccaagtattacattcttcacagaatgtactactgaatcattccttgggaatcaagaagaagaaataaatgcaagactaactttatgggcagaactctcagaatgaagagattcagaaggaggctgatagagaggaaccggtcatgtgtctcattatttattgtttattgataaggcataccgtcagagaaaaactgaaacagcactaacttctcaaggaaaatattcacgtatcactgttctgtctgaatgttataagtggttctactatattctttctgtaaagctgaacatagctggattatccttaagaaggatggatacatattcaaggaaaactttcatgaagcactaattgcattcatcacaataatagaagcattatttttacaatcaaattgtgtgagatattgaaaagctataaaagtgtgg

SEQ ID NO: 61529 - DNA, 471 bp, Homo Sapiens
tttcctaaccaggggtcataatttcccttgcccttctaaaacattcacaaggtcactttactaaaaacctagctaacctgtatgtacaaaatctaaacaatgtaatacaactttctttgtaaattattaaatgatgctacgaaatgtaagcaaaatatgtgaatgggtaagtaaaaatgaggcactataaaactagttttattcttataatatgcctaatgatccaccatctactgtcttccccccaccccttatctaactagtcacaatacttggtacttctttgcctgaataaaaataactctgaatttctgaaaccttttttaatagctggaggtggttcctggaataaagctgggcagtatggaaaagggttaaatgattatccagatgatacatgtggataatttaaggtattacaaagcatgttttttgttttttgattattcatgccaatacttcctcttcact

SEQ ID NO: 61530 - DNA, 428 bp, Homo Sapiens
ctttttttttttttttttttttagataaagagttttgctctgtcgcccaggctggagtgcaatggcatgatcttggttcactgcaaccttcgcctcccaggttcaagtgattctcgtgcctcagcctccgagtagctgggattacaggcagctgccaccacgcccagctaatttttgtacttttagtagaggcagggtttcaccatgttgcccaggctggtcttgaactcttgacctcaggtgatccacccgcctcagccccccaaagtattgggattacaggcatgagccactgcacccggcctaggcatctttatttctatgtatagaaagccttccttaattttccccccaaagagaaattattgtttagtattttgaatgaagagctcagtttagcaatttaaatcaagaaattatacaaattg

SEQ ID NO: 61531 - DNA, 522 bp, Homo Sapiens
ttccaaaacgtcaccacctttaatcaaatgaagagtaaaaaaccactaactgaatactgcatcatcctttatagagaaaggtctcttcaacccatgaagtacattatatcgatccgtgttcatgttctcagactgtctttttcagaagtcttctgaaggtcactgttaagctattttaaatgcaatgatatttatttatcttctgaaatttaaatacaggcaacaaaatatctctgaagtttaactacccaacaaatccaaaattggctcaacttgtaagctatttgctaaacaatattaattttcacattaaaaaaataaataatctaattagactattgcatctgcaagtctttcaaaagacttcttcgccccctaattcaaataatatgaaattcttttgggggaggcaaaatataagaattttctagataatatagaatgccattccataggaaaaaaaattatgtagaccaacagtaaatctctcagatgatagaaaatattgaccaaaaaaactgt

SEQ ID NO: 61532 - DNA, 309 bp, Homo Sapiens
ttttttttttttttttaagagatgagggttcactttgttgcccaggctggtcttgaactcctgggctcaagcaaccctcttgcctccatctcccaaagtgctgggattataggcatcggccactgcacccagctacacacactttttcaccaccactccagcaaagttctgaacagaaaattacctttaaagagtttctctgtgtcataaaaatacttggcaaaaggtattaataaaatctgacatacaagggatgtaatgacccttcaaaatcactattcttattgctcggaagcgatcaatacattg

SEQ ID NO: 61533 - DNA, 1680 bp, Homo Sapiens
gagctagcatcaccctgagaaagcaggctggccccaggactcacgggcgtccatgcagctgatggaggggagctggaccggacgactgtgctctcttagctctagcatcaccctgagaaagcagcctgtctccgggactcacgggcatccatgcggctgatggagggagctgggccggacgactgtgcttctcgtgcttcatgtagaacccttaggtttgcccctgaagtctgtctgctccatgtactatttagttgcttttcagcatagagcttggttttccctttttttaattgtaagaatgatgtgctctggcatgtcacactgtgaaaggggaccagatgatggagcctggactgaaagggtgaatggggccgctcacctcagaactctccctgctttgctttgctgggagcagggagcagggcagcctgggagaggctggagttcctcaaagggcagagaagaatggccttcaggggaccacagggaggaaccatgccatgatagactcaaaaagctagattatgctaataaaaaggggaagacatctgtgacacacaggaaacagtgttcgtggccttgccatagaaggcgcagtaaaggaggaaaactccggagactccctgtgaattcttggctaagaatgcacgttatctgcagtgatctaaaaacacaaacgagaacagaagtgagtggccctacctgtgagatgcacagtgctgagcggcacccagcgctggctgcaggatgggaggctggctgccgtatgattgttcgtgggaagaaattttgtagaagttatcaagctccttaaaatgttcgtgctgtgtctgcctggacagttgcaattctgagaagcgatccttgaaaatgattctgggtatagaaaaaggtacagcacagtggtgttcttagtatggctgtttacagtcgcagaaaatgagatgctaaactgctgccctaggggattggttaagcaaactggtgcttccactccatgagataggatgcagccatttgaaatatttatgaaggttttggacagtcatttggaataatggttttgttggggctcttaacttgcaagccaatagaaaagaaatctggctaatataatcctataaattatttccctacagcccatttttaaggttcccagtaactttcagaatcaaaggagacatcggatggccaggcctcagtagtggcaaggcccaggcagttccagatccctgcagcctgccactaccccgagtctctccaggtcaccagccaggcttgggggtgatggaggaggactcggtaagggacagttcacttggcaaatgtttagggagcacctgctgtggccaggcattgccctagaggcagggaatatgatagaaattgcggcagtacaggaaggtaaggtccctgtaccgcagagctcacagtctcatgggaaggagttcttacacaggtgaggtaagtgttagggagaaactaaagccaggtaatgagagagggcagtggggctgcagaggctggggtgagccacagactactgtagacacggtagcaacgtaggtctcttaagaaagtgacacacaacgtaggcctaatcacagcactttgggaggccaaggtgggaggatcactgagaccagcctgggcaacatagagagaccctgtctctgt

SEQ ID NO: 61534 - DNA, 434 bp, Homo Sapiens
tttttttttttttttttcgtttttttttttttttttgagacagagtcttgctctgtcatccaggctggagttcgagactctatctcaaaacaaaaacacaaaaaaaacaaaacaacatttttttttgtagagttggggggtctcactacattgcccagactagtctctaactcctggcctcaaatggtcctctcacctcagcctctcaatgcactaggattacaagtgtgagccaccacactccaaaatttttcaattaacacatttataaatattctcagagaatgccaatttaactattagagggaaatctagtttgccttatttccaagttctcagtgggttgttttggaagaaaggaacagaaactactcaaactagtttaatcaataaaaatagaaggtagagttattggaatgtagggatatctcata

SEQ ID NO: 61535 - DNA, 1934 bp, Homo Sapiens
tgcatttctaacagcaatgaatgagagttcctgttgctccacatccccaccagcatttggtggtgtagtgttttgaattttggctattctaataggtgtgtagtgctaccgcattgttttaatttgctgtccctaatggtatatgatgttggtcatcttttcctatgcatatttgctatctgtatatattttttggtaaggtgtctgttaagattttttccctttttaaaataggatttttttttattgttgaatttaaagagttctttgtatattttggatacatgtcctctatcagatatatgttatgcagtattttttcccagtgtgtggcttgtcttttcattctcttaacaatgtcttttgcagagcagaagtttttaattttaatgatgtccagcttatcagttttttctttcatgagtcatgcctttggtgttgtatctaaaaactcaatgctagaccatggtcacttagattttcttgtatgttatcttctagaagttttatgttttgcattttacatttatgtctgtgatccattttgaggtaatttttgtaaaagatgtgaggtccatgtctagatttttatattttattttattttgttttgcacgtcaatgtacagttgttccagtactatttgttgaaaagaccgtccttttcccattggatcgcctttgcttctttgtgaaagattagttgaatatatttgtgtgggtctgtttctggactcttgtgttaatttgctatagcttctattagaaagtaccacagactaggtggcttatacagtggaaatttattttctcggttctggaggctagaagtctgagatcaaggtctcaatagatttggttcttctgaggcctcactctttggcttatagttggctgttttctcctggtgtctatacatggtctttcctctgtttccaaacatgaggagtttgggattgtaatttggagtcagatatatagcagagaactaggggagataaggactgggagaagactatcgagtctagttaggagggtataattgctgttcagaaagagtagttggtaaagcatcctaattagaaatgattgagaaggcaggaggaaatggtgacattgtctgtggtctcttttcaaggagtttgatcatgctgctttcttctagtaccatagcatttctatcttagtgtttttctcaggagtatttattgagcacccatgctgagctgtgtaccatggctgacagaggatgaacagaatgtaatccctcttctcaagttggtggcagactagatacgggaatagtatggagtaattatagcgttaagtaatatggggtattttgtgattaagtattgtgtaattcccaataaaagttcagaagatcagaaaaaatgcagcccatggccaaataaaggctttttagaagagatagaatgaaagtttggctttaatgtgttgtttagatttaaatggataaagtggaagggcactgtagttgaggtgaaaatcgaagaatgaagtcctggtagggggaggaataagcaagaagagatcatgcaggaaacgggccaaactacatcaaatgatttgtattggagaataatagagaacattagatattaataacaatagttataatcatagcagatgccatttatagagtatatactatgtactaggccttattttatttaagtgctttataggtattctcattttaattctcttcacaaccttacgaggtaggtattgttatttccattttacagatacagaaactgagacacaaaaagaaaggtcaagaataggcccaggtcaggtgcagtggctcacctctggaataccagcactttgggaggcccatgtgggtggatcgcttgaaaccaggaattcaagaccagggtgggcaacatggcaaaaccctgtctctac

SEQ ID NO: 61536 - DNA, 2170 bp, Homo Sapiens
ttgtttattatttgctgtttgctgaaagtgttcatctgtcagatgtcagaggaggaattacaacttcattttacttatgaagaaaaatctcctggcaattacagttctgactcagaagatcttttggaagaattgctgtgctgtttgatgcagttgatcactgatattccactcttagttatcatgaaatatcagtagaagctatatcaacaatggttgttttcctttcctgccaactcttccacaaagaagttttgcgacagagcatcagccacaagtatttgatgcgaggtccatgtcttccatacaccagcaaacttgtgaagaccttattatataactttatcagacaagaaaagccacctcctccaggggcccatgttttccctcagcagtcggatgggggaggactgctttatggacttgcatcaggagtagcaacaggactctggactgtcttcacactaggtggtgtgggcagcaaagcggctgcctctccagagctttcttcccctctggccaaccagagtctcctgcttctgctggtgttggccaatctgacagatgcctcagatgcgccaaacccctacagacaagccattatgtccttcaagaacacacaagatagcagtcctttcccctcatcaattccacatgccttccagatcaactttaatagtttgtacacagctctttgtgaacagcagacatctgatcaagcaactctcctcttgtataccttgctccatcaaaatagtaatattagaacatacatgttggctcgcacagatatggaaaatcttgttttaccaattcttgagattctgtatcatgttgaagaaaggaattcacaccatgtgtatatggcccttataatattgttgatccttacggaagatgatggcttcaacagatccattcatgaagtgatactaaaaaatattacttggtattcagaacgagttttaactgaaatctccttggggagtctcctgatcctggtggtaataagaaccattcaatacaacatgactaggacacgagacaagtaccttcacacaaattgtttggcagctttagcaaatatgtcggcacagtttcgttctctccatcagtatgctgcccagaggatcatcagtttattttctttgctgtctaaaaaacacaacaaagttctggaacaagccacacagtccttgagaggttcgctgagttctaatgatgttcctctaccagattatgcacaagacctaaatgtcattgaagaagtgattcgaatgatgttagagatcatcaactcctgcctgacaaattcccttcaccacaacccaaacttggtatacgccctgctttacaaacgcgatctctttgaacaatttcgaactcatccttcatttcaggatataatgcaaaatattgatctggtgagtgtaaatgaagacatttattatgattcttttttaagtattaaagcagagaatgtttaataagccttggtaagaactataatagtaagagtttcttctttcaacattaactgtatttgcagtctattttactataatagttgtggtaatctgtgtgtgtgttgtatatacacacacatacatatttaatacaattgaagtcatacttcatacagttttttattctgacttttttactttacacttagaccatgagcatttttctgtggtattatcaattctttgaaagtctcacattttaatttctatctagcccatgtttgtgtcctaaaatatatataactattatcccatttttgctcatttatttccagtattttatatcaattcataatgaatgaaaagtttataaataagtcttatctcaaattttaaaattatatttttgatatggttttaaagctggaattttactagtttttactgtcaaaagatatctttattttcaagattcaacacaggttgccaaattgctttccagaaaaactgtagaatttatgcctgtgggccgggtgtggtggctgatgcctataatcccagctacttgagaggctgaggcaggagaatcgcttgaacccaggaaatagaggttgcagtgagccgagatcacaccattgtactctggcctgagcaacgagagtaaaactccgtctcacacacaaaaaaaaaaaaaaaaaaaaaaa

SEQ ID NO: 61537 - DNA, 4200 bp, Homo Sapiens
aacaatacctagaagaaaagagaagtgccctagaggagcagcggctcatgtatgagcgggaactggagcaactccgccagcagctctcccccgacaggcagccacagagtagcggccctgaccgcctggcctacagcagccagacagcgcagcagaaggtgacccagtgggcagaagagagggatgaactcttccgacaaagcctggcaaaactgcgagagcagctggttaaagctaataccttggtgagggaagcaaacttcctggctgaggaaatgagcaaactcaccgattaccaagtgactcttcagatccctgctgcaaacctcagtgccaataggaagagaggtgcaatagtgagtgaaccagctatccaagtgaggaggaaaggaaagagcacccaagtgtggaccattgagaagctggagaataaattaattgacatgagagacctttaccaagaatggaaggaaaaagttcctgaggcaaagagactctacggaaaacgaggtgaccctttctatgaagcccaagaaaatcacaacctcatcggggtggcgaatgtattcttggaatgcctcttctgtgatgtgaaacttcagtatgcagtccctatcatcagccagcagggggaggttgcagggcgtctccacgtggaagtgatgcgtgttacaggagctgttccagagcgtgtggtggaggatgactcttcggagaattccagtgaaagtgggagccttgaagtcgtagacagcagcggggaaatcattcaccgagtcaaaaagctgacatgtcgggtaaaaattaaagaagcaacggggctgcccttaaacctctcaaattttgtcttctgtcaatacacattctgggaccagtgtgagtctacggtggccgccccggtggtggaccccgaggtgccttcaccacagtccaaggatgcccagtacacagtgaccttctcccactgtaaggactatgtggtgaatgtaacagaagaatttctggagttcatttcagatggagcactggccattgaagtatggggccaccggtgtgctggaaatggcagctccatctgggaggtcgattctcttcatgctaagacaagaacactgcatgacaggtggaatgaagtaacgcgaagaatagaaatgtggatctccatattagaattgaatgagttaggagagtatgctgcagtggaacttcatcaggcaaaagatgtcaacacaggaggcatctttcaacttagacagggtcattcccgtagagtacaagtcacggtgaaacctgtgcagcattcagggacactgccacttatggttgaagccatcctgtcagtatccatcggctgtgtaactgccaggtccaccaaactccaaagagggctggacagttaccagagagatgatgaggatggtgatgatatggatagttatcaggaagaagacttaaactgcgtaagggagaggtggtcagatgcactcattaaacgacgagaatacctggatgaacagataaaaaaagtcagcaataaaacagagaaaacagaggacgatgtggagcgggaagcccagcttgtggagcagtgggtagggctgactgaggaaaggaatgctgtgctggtgccagccccaggcggtgggattcctggggcacctgccgactggatcccacctcctggaatggaaacccacataccagttctcttcctcgatttgaatgcggatgacctcagtgccaatgagcagcttgttggcccccatgcatccggcgtgaactccatcctgcccaaggagcatggcagccagttttactacctgcccatcataaagcacagtgatgatgaggtttcagccacagcctcttgggattcctcggtgcatgattctgttcacttgaatagggtcacaccacagaatgaaaggatttacctaattgtgaaaaccacagttcaactcagccaccctgctgctatggagttagtattacgaaaacgaattgcagccaatatttacaacaaatagagtttcacgcagagtttgaagaggagaatatccctgaaaaatatattttattcctgtggtgtaacctatgaaatagtatccaatataccaaaggcaactgaggagatagaggaccgggaaacgctggctctcctggcagcaaggagtgaaaacgaaggcacatcagatggggagacgtacattgagaagtacactcgaggcgtgctgcaggtggaaaacattctgagtcttgaacggctccggcaggccgtcacagtcaaagaagcactttccaccaaagcccggcacattcggaggagcctcagtacaccaaatgttcataatgtctcttccagccgaccggacctttctggctttgatgaagatgacaagggttggccagagaaccagttggacatgtctgactatagctccagttaccaagatgtagcatgttatggaactttacccagggattctcctcgaaggaataaagaaggttgtacatcagagactcctcatgccttaaccgtcagcccttttaaagcattctctcctcagccaccaaagtttttcaagcccctaatgcctgtaaaagaggagcataagaaaaggatagccctggaagcaaggcctcttctaagccaggaggtaaatgcttgacttgtctgtactatgcagaatagagcagagttgtgtcacctgtgaagcagcagtgtgcattagcaagctgagtgctgcatgtggacatgcacggtcatcactccatggttcccgttctcgaattcctctttctcaagcatgcagagtcatggtagaatctcttgtttgttgttgctgctgtggttttatttctttgtgtttatggcttttcaaagtatttttttatgtttcaagtgagaaagatgttttctaggtgttttgaaaagattaaaggccttttttaaaattatttttcttttttgtctttttggggatttctgattttgttttttatagagatagggtcttgctgtgttgcccaggctggtctgaaactcctggcctcaagtgattcttttgccccagcctcccaaggcactgggattgcaggcatgagccgttgtacctggtcaaaaggctgttttttaaataagactaattatgctttttgccacagaatctgtttattcctgtcatatctctccagtagtttaactctggcctgcagaattggctgctgcattactcacatgtaataaaagtgttagcattgcttttctaacttgcatgtacttaatatgtattttggccgttgtcgtctttgtgtgtgatgcatctgtgtgtcttaacctttgcagagcatgcctccacctcaggcacataaccctggctgcattgtaccctcaggaagcaatggcagcagcatgccagtagaacacaatagcaaacgtgagaagaagattgtaagttccggaaccatttctgtcatattgcctggtggtgggtttaaggccctttcacagacaatcatccaaatgctagaagaaattaagacatgtattgggtctttgtcttaaagaaaataaaaatgtgaccattggtaatgatattttgcatggatgtggccatgacctacaattttatcttatttatttatttattttttgcttaagtttgcttagaaaaagggagaaaggcacttttattgcttctggcctttataaaaagtgtaacaaagagatctttttaataccaaaatctttctaatgtgcctatacatattgcctagattctgaagttaatctacctagaggaagtgcacttacttggagtaagtaatcatgcatttaatgcatttagctgtggatatgtttggaagcttttttatgttgcctgatgctattgccaagataattctgtagttagagctgcactacaatctatcataatcacccttcatcgtctcactgtctagggtagcctttgttaattagctggcaaaatatattccaataccttggtgccagccttgcattcaggatggcttatatatattttgccacaggtaggctgaaactctacccacaaaacctcattccttagcacttggttttaaaattattaatttgagatacagttttaaaaacactgcataccaggcaccttaggttataaattatacctcaatttacaaaaaaaaaaaaaaaaaaaa

SEQ ID NO: 61538 - DNA, 221 bp, Homo Sapiens
ctcacttctgaagtcagtttgcagctggtaacttgttcatccagaaaacattctaaagcaatgagactttgtgagctgtgcttacagattgggagaatcatgaagattctttctatattttgcatttacttcccagtgcttcatagctgcattttgtttgtaactaagacagaagaatttcgtaatccttgaaattgaaaaaaaaaaaaaaaaagtcgacg

SEQ ID NO: 61539 - DNA, 512 bp, Homo Sapiens
  misc_feature (458)..(458): n is a, c, g, or t
ttatttgtgatcctgatatgtcacatataatagctttgttacctggagtatttgattaacctaaacagtttaagcattttgaattagttggagtttaaatggattacatttggtgtatattgtcttcattgaaaagatattgttggatatgccacatcagagttagcattgacttataaataaataccagaatttaccagagtacacttttctcttcagatgactcaattattaaataaaagaatatttcttatttctgggtcaatataaggtactgacttctgatgcataatcacttaagctatgtgagtttaaactggtatcttttcttagtgggtacccattcaatgtaaggctggtccatggggaatgggacatggaaggagggattttcacagttatgtaggaggcaggaagggcacgtggaattgtggttttggctttgggcttggggagcnttatttaaggtttttggaccacggtttaaaataagttcaaatagtaagtgggtt

SEQ ID NO: 61540 - DNA, 2072 bp, Homo Sapiens
ccaagattcggcacgagggactgtactgaacagcaaaaattaagtgacttgctgccctgcacatcatggcactgccattccgtaaggacttagaaaagtacaaagaccttgatgaagatgagctccttgggaatctgtcagaaacagaactgaaacaactggaaactgttttggatgatcttgaccccgagaatgcccttctgcctgcagggttccggcagaagaaccagacatcaaagtccaccacagggccatttgatagagagcatctcctttcatatctggagaaagaagcattggagcataaagacagggaagactatgtgccctacactggagaaaaaaaagggaaaatatttatccccaaacagaaacctgtacagacttttacagaagaaaaagtgtctcttgatccagaattagaagaagctttgacaagtgcttctgatacagaattgtgtgacctcgcagcaattcttgggatgcacaatttgataacgaatacaaagttctgtaatataatgggaagtagtaatggtgttgaccaagaacatttttcaaatgtggtcaaaggtgaaaagattcttccggtatttgatgagccaccaaatccaaccaatgtagaagagagtttgaagagaactaaagaaaacgatgctcatcttgttgaagttaatttgaataatataaagaatatcccaattccaaccctaaaagattttgcaaaggctttggaaaccaacacacatgtgaaatgtttcagtcttgcagccacccggagcaatgaccctgttgctactgcttttgcagaaatgctgaaagtgaacaaaactttgaagagcttaaatgtggagtccaactttatcacgggagttgggattctggcactgattgatgcgttaagagataatgaaaccctggcagagctcaagattgacaatcagaggcagcagttggggacagctgtagaattggaaatggccaagatgcttgaggaaaatacaaatatccttaaatttggatatcagtttacacagcagggaccacgaaccagagcagctaatgctataacaaaaaacaatgacttagtgcgtaagagacgagttgaaggagatcaccagtaagtctgcaaaggtgtaatctttggaagacttcagaagatcaccaagggctcatgttggtgacatcatgtaaaattttcctgggtagaagggaaaagactggaaaaatttttttagtgacatgcattttttttttagttgttatcaaattgtaaaatcagtaatgtgatattttatattctgaaacatttctactttctgctaaaatcaattttaatttagtttaattgaatgatttatgatgaatcttgggcaaaaaaatacaactgtaaaaaatttcacaggtcatttgtgtagaataatttgaacattgtgaggaccaatcttttttaaatcaaaagggatgttgctggtatcagaattgttattgcttcatttagacataaaacacttaagtgttttccttcctccgtgacctggagagttttccattttttaaaatacatgaacttggcaagggtgtgatttttctttatcaagagaacaaaatgccagaatgttaaaacagttaactcaaaatctagtcatctgtgtaggataaagcaggtctccctccccaccccccaaaaaaggcgtacagccaactcttagttatttagggtaagagaaaaaagaaaactgttaaacaatgaaatcaaagataataaatatgatagatttccagtatgaggcactttgcaaaacagtcatttaaactgatggttactgtaagtcagttggaagctggcatgtatgtaaattacttggtgttacaccatatccgaagaagttcctatgtgcagtgcagaattgcataaacagtatttcaatcactgctacaaatcttccaaccaagaaggaaaactgctattcttcataaatctaatttttagtatatgcttcctttcatcttatacttttatcaatatttataaaagtcatttctataataaaagcagtctttcttgctca

SEQ ID NO: 61541 - DNA, 1416 bp, Homo Sapiens
caagcagacatcaatttaaccaagtgatcaaagttaacattatcaataatgagataaagtcacattatgtgcacacaacatcacctgggtagtattcttgccaagtatatttgacttgaatctaatcatgacaaattcaaattgtacaacattcttcaaaacaatcggcctggacacttcaaaaatattaatgacatgaaaaacaaaaaaaacagaagagaactgctctaggttaaaagagactacaaacatacaacaattaaatgcaacacatgttccttgaaggaatccaggattgtgggggtaagttgtaaagcatgttgagataactgaagaaatttaaatatggactgtttataatattattatatcactgtaaaatattttgaatgtgatagtgaacttaataatggtattgtggaaaacaccactgttctcaggtgatacatgcttaagaaattatggagtgaggtatcctgatgtctgtaatttatttcctaatacgtgaataaaaattcctaatatacagtaacacaaaaaactgtgtgtgtactatgtatgtagggagggagcaaagagaggagagggaaaaagtgagagggagagaggaagagaaaaagaggaagggagagaacaaacatacaaatgtggcaaaatattatcaattggtaaatacaggtaaatgtcataccagtgtccactgtatcattcctctacctttcctataggtttgaaattcttctaaataaaatgttggagccaaaaagaacaagaagcaacattaaccaaaatacttggctgcccaatagaaacttgccctgtcctaaaaggcaatttgagatgagggttaaaagcacagacttcaggccaggcacaatgactcacacctgcaatcccaacactgggaggatgagaagggctgattcagccccaggagttcaagaccagcctgggcaacaaggtgaaaccccgtctctaccaaaaatacaaaaaattagccggcagtggtggcacatgcctgcagtcccagctactcgagaggatgaggcaggaaaatcacttgaatctgagaggcggaggttgcagtgagctgagaccgcgccactgcactccagcctgggcaacagagtgagactctgtcccccccgccccacaaaaaaaaagccagctgggcatggtgactcacacttgtaatcccagcactttgggaggccaaggagggcaggtcatgaggtcaggagatcaagaccagcctggccaatttgtacctgcaggcctcctacacctacctctctctgggcttctatttcgaccgcgatgatgtggctctggaaggcgtgagccacttcttccgcgaattggccgaggagaagcgcgagggctacgagcgtctcctgaagatgcaaaaccagcgtg

SEQ ID NO: 61542 - DNA, 448 bp, Homo Sapiens
ttgcttagaaactctctctgggaattagtcattttatatctagcaataaacgtaagacaggatctgactattctcctgaaaaggaagcctggatccttcagcaaataatcttttgtataatttgcccacagtttaacccacagatccagctatggatgtttcatttaacagtgagtgaaaaactcaggactgtcagcatcaggcctttgggtgggaatacccagatatcaaggttgggcaagtgggcattaggagtggtgccggcgatgagagggggtagattagacggctggaaaatggggtcagcggtggggatgtggggcagacgaggtgtctgtggggatatgtaagtgacagcaggaagggaatgccagaacaaagcgaggaaagcagaggtagcatcactaatgaagacacaaatatgtacatttcatgcctaaacatggat

SEQ ID NO: 61543 - DNA, 587 bp, Homo Sapiens
ccggaccggcagatcgcggggacgacacacgtccggaagtaaatccaaagggacagatgatatgtgctttcgtgatggaggcaggaggagctccatctttactcttcctttatagaacagaggccaaaatgcaggaggcaacaggaccattcgcacagttgcaggtgtacaatcttcctgtgctgctgaacagctggaattctgacatggggcacttccagacatcaccagacatcactgaaccccaatatctgcttgacgtgatctgagctgcaagaagagtaactcaaagggataggagaatgacaaccaaaaaaatataaggaggaacaacagagcaaagaaaactgccaagggagcaaccagcttatgagacttacattctatatataacataaggtggaaaggcccggctagagagagagaggaaagatacagaaaattcccctccccacaaatcaagtattgtcaggaaacattaaagtagaaatctttgtaagcagctttgcatttaacattcagtcaagacactaaaaccttacaaaacaagaacctctattacaaaaaaaaaaaaaagggctaacggc

SEQ ID NO: 61544 - DNA, 1741 bp, Homo Sapiens
atatagcaaatagaagagaactaatttgtctcagatttcttaaatgtgaagccttttctttcaaaataaatgtttagatgaggctggttgtagactttcataaagtacctgtgaaactatttttgttttcagaaagtgattactattaatataaaccaagatttacttgtaaaaagcagtgttctcagggtttatattatggaacagtagcttcaaatactttgtcttatgacagtaattcacttcctttctttttcacagagtaagttcctctcagtttatacagagtgattttacttattttatttggtggtagtggtggaaggtgggagtattataaataagcctggaaaaatatatagtgccacattaatagtggttatctctggataaaatttataactctttctcttacttacagtgaatatattttgtaataaacaaatcaagcttataagattacaggtcttcagaataagaccatagatacattggtaaaagattaataatttctctaaactaggctattgagaaaattaataaacataaaagacaaaagcattcagctcttcgaagtatattaagctgattagaaaaatctgaaataggtggcgccaagatggccgaataggaacagctccagtctgcagctcccagcatgaacgatgcagaagatgggcgatttctgcatttccaactgaggtaccaggttcatctcactggggcttgccagacaaataggtgcagcccatggagcagggcggggcatcgcctcacctgggaagcgcaaggggtcggggaattccctttactacaaaagggaagccgtgagagactgcacctggaaaatcgggatactcccaccctaatactgcacttttccaatggccttagcaaacggctcaccaggagattatatcccgcgcctggctcagagggtcccatgcccaaggagccctgctcattgctagcacagcagtctgagatcaaactgcaaggcgacagcgaggctgagggaggggcatctgccattgccgaggctcgagtacataaataaagtggccaggaagctcgaactgggtggagcccacctcagctcaaggaggcctccctgcctctgtagactccacctctaggggcagggcatagctgaacagaaggcagcagaaacttctgcagacttaaatgtccctgtgtgacagctttgaagagagtagtggttctcccagcactgagtttgagatctgagaacggacagactgcctcctcaagtgggtccctgacccccgagtagcctaactgggaggcatctcccagtaggggggcgactggcacttcataaggctgggtgcccctctgagatgaagcttccagaggaaggattaggcagcaacatgagctccttgccagcagcggaacaaagctgtatggagaatgactttgacgagtcgagagaaggcggcttcagacaatcggtaataacaaacttctcccagctaaaggaggatgtttgaacccatcacaaagaagcttaaaaacctttagaaaagagtagacaaatggctaacgagaataaacagcatagataagtccataaatgacctgatggagctgaaaaccatggcacaagaactacgtgatgcatgcacaagcttcagtagctgatttgattaaatggaagaaagggtatcagtgattgaagatcaaatgaatgaaatgaagtgagaagagaagtttagag

SEQ ID NO: 61545 - DNA, 487 bp, Homo Sapiens
ctactactactaaattcgcggccgcgtcgactttttttttttttttttaaagaaacagggtcttgctgtgttgaccaagctggtctcaaactcctgggcttgagtgatcctcccacctcagcttcccaaagtgctaagataacaggcatgagccactgcgaccagccaaaagtagtgtgatttgaaggttaaattgctatacggttctaattatcctaaagtgattttgttattaagaacaaaaccactgccctgtcaacctgattcaaaactaaaccttgaaatgcccactattaaacatagaagtcctagagaaatatgatctagaaagctgttcaaatgtaacagctgaaagagaagaagtgggtgcttgagccttgtcccatcagtacataaacaaagatttgaagagctgccatctgagagggagtagagaactctggaggagggcatgggatggagggtaagtcatactgtgaaaaaagaa

SEQ ID NO: 61546 - DNA, 3067 bp, Homo Sapiens; identical to SEQ ID NO: 30792

SEQ ID NO: 61547 - DNA, 500 bp, Homo Sapiens
  misc_feature (423)..(423): n is a, c, g, or t
  misc_feature (473)..(473): n is a, c, g, or t
  misc_feature (488)..(488): n is a, c, g, or t
tcttctgcagatctgaagtgtaactttttcgacgatctttccattttgcaaggtcatcctgccatttctgatcttgttcttttaattgtgattttattttctgcatctcctcgtaacgcagctgacgcaagttttgaacatcttctgcgctgacatcactcatggacttactccttgaaaatgttccatctgcttctgtataaaccgggcttgccaacttcttctgttatcctcatgtttgtctggctttttctttctcagaggtgctggtacataggatggctgtctacttttgttgggtaaaaaacgattgaagggtaacgcagtctttggctcaacagccgaaaatccttcgatacgacatatcatctttaatataatcctggcatcttgaatgtaaattccgaatctgtgtcactttcnaaaaccttcacgccccctctcaacgtgatatcagaggagcagcttggtcnaagacctcgagcccnaagagtccaagc

SEQ ID NO: 61548 - DNA, 182 bp, Homo Sapiens
gagaagacgacagaagggagagcttttctgtttttgagctaaagacataacagggtgcagaggctgagaaaaggagagttctaagcaacatgtcacgagctatgtagcctcttcacactgcttctgaaataaaatctaacagtaggagtgaaaaaaaaaaaaaaaaaaaaaagtcgtatcga

SEQ ID NO: 61549 - DNA, 468 bp, Homo Sapiens
ttaaataaaatgtaccagctctttcggggaactgcctgaaagttttggtactcatgatcctgaagtaattaacttattttattcccaaaggttgtctgcagatcgttttactgtggaggttaatgctgtgacaataatagaatcaggaggttatgtcaaacagcgatgggtgagagcaaccagcctcagtcctttgagctgtccatagataaagctaaaaaggtgataccacacagccctcacatctgcatttgattttgccaagtataactcagctgtggatcctgttatggaacagaccaatagaaaaacatccttctggacacagagcaggaactctggcctggcagacagggaaaaattccataatgcctggcaaagttctttagtaccacaggctattctcccagctcaaaaaaaatccttggaaaagggcaggtaactcaccagaaaaatgccaacttctcc

SEQ ID NO: 61550 - DNA, 531 bp, Homo Sapiens
ttttttttttttgccaaatactgcactgcctccctattgactactttcttgcatgtacggtaatttcgatcacctgtttcatatcattacatacccacaacgcggttgttaaggctgaaatatttcactgtatggatgtgcataaattactgaacccattccttacttggccatgaaaaagagtaagtcgatatgacatactgatgtgaaatgatgtgcaatagtaaatgaaaagaagcaagttgcactgatagcgtgtatcatattaacttagtaagacatggaaaaattaaatgtgtgtgtttttagacctggtctaggcatgcaaatatttcagaatgagacatagaggtctattaggagagctgacttttggtcatggaaggaggtggctgtgaatcaggattttcttttttttactttatatatcaaatatgtattttcaccaaatcgtaactagccaagtgctaaaatagccaaagctgatcactgtcgtcataaataaatatttgggatttaagaatacatcta

SEQ ID NO: 61551 - DNA, 1659 bp, Homo Sapiens
aaagagtgtaatctcacgtatcactaaggtgctgatgagtcccaaatcataatacctaccatgccttttctgtatgacatttccagctgttggacatctttttgttttttgtttttttctcccctagacggagtcttgctctgtttcccaggctggaatgcagtggcacgatctcagctcactgcaacctctgcctcccaggttcaagcgattcttctggtctcagcctccggagtagctgggattataggcacatgccaccacgcccagccaatttttgtatttttagtagagatggggtttcaccatgttggccaggcttgtctcaaactcctgaactcaggtgatccaccagcctcggcctcccaaagtgctgggattacaggcatgagccaccacgcccggccttttttttttttcttttctttttgagatggagtcttgccctgtcgcccaggctggagtgcaatggcgcgatctcggctcgctgcaacctccgcttcccaggttcaagcgattctcctgcctcagcctcccgagtgtgggattacaggtgcgcaccaccacgcccagctaatttttttgtatttttagtagagacggggtttcaccatgttggtcaggctggtcttgaactcctgacctcgtgatccacctgctttggcctcccaaagtgctgggattacagacatgagccaccacccccagctgctgttagacatctttatctggatgtcctacagataactcaacatgacttcactggttgtccattgcagttaaagcatgactgtcctccaaagctagaaacatgagaatcatctttaacaaattgggtatttctttaattcaacagatattcttttattacttgccattctgctaggcctgctgagagctggggatacagtgagagctggggaacagaacagggatggtcctaatctttatggagaaccattgggtggtccattgggtgagatggacatttctccaggaatcccacaaaaatggaatcatgaacttcaagaagaggtcatgtagggaaaggacacaatggggtaagagtatataacagagggcctgacttagtgggaagagagggtggacaggggagactcaaaatggcttaagcaaaatatcaaagaagagctaagtgaaagtagaatattgaggaaagaatattccctgcagaagccctgtgttgttttttttttttttcgatttataaatagtttatcctgttcacattatgcagaatttcagtgtcgttaatccacaatgttagtacggtaacagaaacataaaggagaaaaaaggcaggtggggggaggttcatagtgtggcctgacatagtctaagggttctctcctgtagtatgcatctcctgcaggcaagtattaatatcacttcattgtttgaaggacagtacactatccaggattcatttattgttcaggtgtcttttctaaagtatgagaaaacaggaataaattcaataatgaatatctgcaattcaaaccaatttaactacaggtcagtggtgtctttcttatctattatcacaaacatcccagttgcctccatctaaaaatttctttcaaaagttaagacacaattaattatatcttattaattccctcaaaagcaaaaaaaaac

SEQ ID NO: 61552 - DNA, 455 bp, Homo Sapiens
tttttttttaaaaaagacctgatatttgagataaataatattcttctgtttgttttatgttgtagtataatacctatctgatcaaactggataatgtaaatatatttactgaagatcagcttctaatctaaatggttccagtggtaacataatggacatctgagacttatactcatgaggtctacctacagtccattcccatttaggggaagagaaaggagaggaaatggccaagaagtccataagaagtggacagtgctttaactttttcaagttttgctaacatattttatgtaagttattcaatacccccatattaaagagcagcagctattaaacaccaacatttattagctgctggaaagtaataaataacttcagctagtccccttcagtttccataaaattataaaaccaaccatttgacgtgaaaaagcagtttttgaccctggtgg

SEQ ID NO: 61553 - DNA, 458 bp, Homo Sapiens
aaagataatcttgaagaaaaccatggtgggccagggatggacagggaataggacactttttaactattcttaaaaaataaaaaagaacatttcaaaaagattactgagcacataactaatgtctctgaaaggaaattcattataacagcagctagcctttattgatcatttgtgttagacataacgcaaagtatatcataatttaatttgctacataaagatacagtctacctcttaaggttgcttttgccattctacacagtacagaggaatgatgcacaccttggcagtatacttccagagcttgcaatcactacactatactgcctcactgacagcaatgcttttactataaacaatcagaactaaacaatatcctatatacattatttaatccaaacacattttatcttagaaagactgtacacagtgagttccacttctctgtcatcaaggtt

SEQ ID NO: 61554 - DNA, 1944 bp, Homo Sapiens
gctgtcagctttctccgtggtctgagtttgtggctgcatttttatctctggtggctctgctacggcggcgcagaaatgaggcagaagcggaaaggagatctcggccctgctgagctgatgatgctgactataggagatgttattaaacaactgattgaagcccacgagcaggggaaagacatcgatctaaataaggtgaaaaccaagacagctgccaaatatggcctttctgcccagccccgcctggtggatatcattgctgccgtccctcctcagtatcgcaaggtcttgatgcccaagttaaaggcgaaacccatcagaactgctagtgggattgctgtcgtggctgtgatgtgcaaaccccacagatgtccacacatcagttttacaggaaatatatgtgtatactgccctggtggacctgattctgattttgagtattccacccagtcttacactggctatgagccaacctccatgagagctatccgtgccagatatgaccctttcctacagacaagacaccgaatagaacagttaaaacaacttggtcatagtgtggataaagtggagtttattgtgatgggtggaacgtttatggcccttccagaagaatacagagattattttattcgaaatttacatgatgccttatcaggacatacttccaacaatatttacgaggcagtcaagtattctgagagaagcctcacaaagtgtattggaattactattgaaaccagaccagattactgcatgaagcgacatttaagtgacatgttgacctatggctgcacaaggctggagattggggtgcagagtgtttatgaagatgtggctagagacaccaacaggggccacactgtgaaggcagtgtgtgagtcatttcacctggccaaagattccggttttaaagtggtggcccatatgatgcctgacctgccaaacgtgggactagaaagagacattgaacagttcacagagttttttgagaaccctgcttttcgtcccgatgggctgaaactctatcctaccctggtgattcgtgggaccgggctttatgagctttggaaatcaggaagatataagagttactctcctagtgacctggttgaattggtggctcggatcctagccctcgtgcctccatggactcgagtgtaccgagtacagagggatattccaatgcctttagttagctcaggagtagagcatggtaacctgagagagctggcacttgcaagaatgaaagacctcggaatacagtgtcgagatgtgagaaccagagaagttggaatccaagaaattcatcacaaagtacggccataccaggttgaattggtaaggagagattatgttgcaaatggtggctgggaaacattcttgtcatacgaagacccagatcaagacattttgattggcctcctacgattacgcaagtgttcagaaagaatagctagagaagaacatgggtctgggaaaatcgctgtgatatcaggggtcggcaccaggaattattatagaaagatcggctacagattacaaggcccgtacatggtgaagatgctgaaataatggccacaccagtccactcttctgcagtatcctccctggcagaacacggagaatcaggatttcttaaatactcaacagagaggctgagcagagcaaatggggggcttcaccctcatcccgcagctgcagagactggaaactgccttcaaggccacggctggtcatctgctgaccacaccccagatccgccctctcctgcgtgcaccccaaaaaatcacttgcgtttttgaggcttaaatcatctatccagtttctacattttgcatgaggcctgcaggtggcctattttgactcagacggtgaaaaaagcaaattaactcatttggacaccataactcatgcaataaaactgattgtcattcgaggagc

SEQ ID NO: 61555 - DNA, 456 bp, Homo Sapiens
tttgagactgagttttgctcttgtcacccaggctggagtgatgggtagagtttcattattctatttttgtgtatgtttgaacatcaagaaatgtatgaataatattgaaattattcaatattccataatgaaaagttaacatgccaagaatctcaaattatggtgaacactcagtggggactgcatattgtgagttatgtctctagttagttaacagatagtagagacctggaaaagcttgtatgtagccttttaaacatttcttctcagatacatacatgcatatatatgtattatataaaatacatattcatacacatatgtgcacacacacaggatggcttcatggacatgcaacctgtgcagttgcacaagactgtgcttagaagcaccccacacctaatttttgaacgagggccgtacagtttcattttgcccttagtcccacaaattatg

SEQ ID NO: 61556 - DNA, 494 bp, Homo Sapiens
atagttctctcttccaaattaacagcactctaacatactgtgacaatgtccggcatcctttagggcattttgttacccagaattttctaactatggaagttactaatgaatgcttctattacgcttattacagggtgtgaaaaaagttaaatcattacaaaaaaaaaaaaaaataactacaaaaccaacattagtgctgttagaagtcccacgggctgagcaagtgctggctgcaaggcattgaggcaagcaggcagggctgctgctcaggagccacggcaatgccaccgtgtggccatactatcagtgcagtgtataattcaggctaaaaacaaatctgcggcatttgcattatttcaaattttgagcattaagaagggttttatttttcaaatagcataacgaaaattagcataaaatgcattgcactgctttaaatcacctatttgaaaccttcatataatggcttgaagttattagtattgaattttagg

SEQ ID NO: 61557 - DNA, 685 bp, Homo Sapiens
  misc_feature (456)..(456): n is a, c, g, or t
  misc_feature (495)..(495): n is a, c, g, or t
  misc_feature (509)..(509): n is a, c, g, or t
  misc_feature (570)..(570): n is a, c, g, or t
  misc_feature (574)..(574): n is a, c, g, or t
  misc_feature (580)..(580): n is a, c, g, or t
  misc_feature (591)..(591): n is a, c, g, or t
  misc_feature (598)..(598): n is a, c, g, or t
  misc_feature (611)..(611): n is a, c, g, or t
  misc_feature (613)..(614): n is a, c, g, or t
  misc_feature (633)..(633): n is a, c, g, or t
  misc_feature (657)..(657): n is a, c, g, or t
  misc_feature (659)..(659): n is a, c, g, or t
  misc_feature (670)..(670): n is a, c, g, or t
  misc_feature (680)..(681): n is a, c, g, or t
cggcacgagccaccatgcctggctacaagttcttaattcttaagagacatggcgataattcatgctgaagaggaaatctggaaacctgaaagatgcgacattgcttttaccaacacctccacatttcctatacataaaaataaattatactagtgtaataccctagaaatgtataaaatgtgacaaagcctttatatgattgtcatacatgattgtaggtgatagaagtcatactgccaaaactcctgtaagtgtgaagaatgtggcaaaatattttattagtgcttataccttatttcacaggaaagctcttatccttgagaaaaattgtgcaaatacaaagaatatggaaaaaccattaatgcctactcacatcttactgaacagaagaaggttcatagttaataaagcattaaaagtgcaattactgtcaaaaaatctttcagtagaagtctntaaaggtgaagaatattattctgaagacagccattacanatataaagggggtngaagtgcctttacttgtgtcacagatcttagtgcacacatgtagtactagagggaaacccntgangcagtngctcaagcttntgttcanggaatcaaggaantnnatatgagatagtactgaantgtatgaatgaaagactttctttncntgcagctaganacacagaggnnttcc

SEQ ID NO: 61558 - DNA, 1569 bp, Homo Sapiens; identical to SEQ ID NO: 58444

SEQ ID NO: 61559 - DNA, 411 bp, Homo Sapiens
ttttttttgaggcaataggaaacattttttaatgaacaaacaactttcacacaaactgtctgtatcacattgttattacaacacagatgagctgaaacgtttttgtacagatttggaggatgggaatcctaaaaagaaatcaagcatatagaggtagttgaatagcaatatggggggaaaaaaagcattatcttatatttcccttcagttcattacagtgcaagagtaaaatggctgcttaccaaacaaatggaaaacacacacacatttgccactgtttacgtggcttgcttgatattttaatcctggcattacttacaactgcataagatgatggaactaatttacctaaaataagcctatggtgccacattggcctatttgctttccttttattccattattagtgtt

SEQ ID NO: 61560 - DNA, 340 bp, Homo Sapiens
taattggcagtttgtttcatgtccagcaatcaaagacattaaggaccactaatatttacatccatgaattcatttagacagttttctttaattgatgatgaagacactacaattctaagtaccagacagaatcaggaaaaaaaaaattgaaaataagcataacactataaagaaaacttggaaaagtgaaacacttctaaataaaaaatatatacctggcctggcacccattacatatatacataatacatgttataaacatatatacagtaaatgttttggtagcaatacagaccatgcattggtctttgtgtacacagatgaagtagcaccggggcaa

SEQ ID NO: 61561 - DNA, 492 bp, Homo Sapiens
  misc_feature (491)..(491): n is a, c, g, or t
aactatgacccatagtatacttttatttcctagcatacacatatgtaaactgaataatgattcttacccttactatatgatacatatttcctattatttcaactaaatgtgtcacagaacgcttttgaagaaaaatcctaattcataatctcagaaccatgtctttctttcaaagcactcagcatattttttatgattattgggttaatatctaccttcctcattgcctgtattctgtatgaggttagggagtatttggcattttgcttagctttaataggcacttaaacatttggaatgaaatatataaattggctgataagtacttttccttgtagcacttatcacaattgtctctaatgactctgttataatcattaagcttcttcactctaaactccaggaggtcaggaatcctgtctgttcaccccttcttacatccctagcacctaaccacagtacctggaaaatggtaaataaaaaattatttnc

SEQ ID NO: 61562 - DNA, 655 bp, Homo Sapiens
  misc_feature (527)..(527): n is a, c, g, or t
  misc_feature (562)..(562): n is a, c, g, or t
  misc_feature (633)..(633): n is a, c, g, or t
gaccactatagattcacagtgctgcttttttccctgagctcagagagcttttaagcatgtgctacattgtaatatttttcaagtgttggattggttatttaattcttcagttactatgtcttttaaatgtttttctctttcctgtctcattttttttctcactttttattaaggtatagtttctgtacaataacatgcatatattttaaatgtacaggctgatgagttttgctgattaaattttaatttctctgaaggtaagagaagtatgcttgagtatgtgattgattgccgaccaaaataagatattggcaataaacacttaagtactttttagaaagcagacttcataaactgatttgtgattcttctttccttcctttagacagtaaaagaaaagggatgtaacaggtgaaacaagactgaccatgttttaataagctggctaataggtacttaagttcattatgctttgtattctctacttttgtatatgtttgaaggcttttacaataaaagtttttaangtaaatgcagatgctcacacacacataaaattcanactaaagttacaaagaaattccacacgtaatactaccagacttgaatcttctttcacagtatttccagcanatctggaatcaggagtcgtatt

SEQ ID NO: 61563 - DNA, 1289 bp, Homo Sapiens; identical to SEQ ID NO: 23283

SEQ ID NO: 61564 - DNA, 430 bp, Homo Sapiens
  misc_feature (158)..(158): n is a, c, g, or t
gaaaattaaaaaaacatgtaatttttttttaaaaaaagaacatttgatccactttttggaaaaataattaaagtactgaaaatggcaagacagttattaattcattcaacaatcaattactgaaatctttttgtgtaccaggtactgtgctatgcatnagcagatacggtcaagactagttgctccaggcagaaaacattatggaactaccatggaagggacacagacttatatacaaataatccgtcaactatttaaccacagtttctacaaatccaatcaccaaaaattcttcccacctctcaatgctcaatgtcactcctcccatcaaaaatagcatccctagttccctctccttgaatttagccttatgatgcggtttgaccagtagaatgaggcataagtgatgctgtgccagttctagacttcg

SEQ ID NO: 61565 - DNA, 450 bp, Homo Sapiens
tatacattattagttatactttatgaagtaggtactattcttaatccaggtgtacagacaaggcacagataaatgggggagttaactgagaggaacgcagctattaaagtgtaggcactttaatctgtttcaatgcagatctgtctgaattcaatgatgttcccaaacttggaacatgaaaatatcaactttctccaagaagtctgacatgtttaatatcctctaatagcaaatgtgataaggttagcacttaagacactggtttacaacggacctgtgtacttgatgcctccccaaccggaagataagccatctgaactcacttaaggcggcatgttcacttttgcttccccagctccacagttaagtgtaccacagtttctggtacacgtaatgcgtgttaataaagatttgttgaataatcaaataagcgaaactgcttttaaacag

SEQ ID NO: 61566 - DNA, 662 bp, Homo Sapiens
  misc_feature (528)..(528): n is a, c, g, or t
  misc_feature (641)..(641): n is a, c, g, or t
agtctcactctgtcggccaggctggagtgcagtggcgtgatctcagctcactcatatattcaagagagattaccaaggtaaaataagacccggcaaactgagcagatttggctgggggaacattaaagagtcaaagatgatgatgtccatgctaaggtgtctctgagaggtggttggtacgatgaacagaaatatgaaaactagataagaagtgatgtgagagtagttctattttagtgatactaagtttgaagtaaactgatttttattaggcaattagaaacaaaggtcaagaacttaaaagagattcagccttgagagataactgagatcatctacgtacagatactagatggaatcatgaaaagtattagaggagatgaaaccacttagtgtgcagagaaggaagagaagagacagaacagaaccatgaagaaaatttaaggtttaaaagaaaaaagccagtgaagcagaatttgttaaagatgcaaaaacacttctatgagaaaacattttagagaaactcanagggaaaaaatacttaaatataaaaatgcacagttctgacagtgaatacatggagattaacaattgtaataaaggaaaacaaattttaaggctacactcagaagtgacctggnataaattcccggcttgggttg

SEQ ID NO: 61567 - DNA, 4438 bp, Homo Sapiens
  misc_feature (312)..(312): n is a, c, g, or t
  misc_feature (3415)..(3415): n is a, c, g, or t
  misc_feature (3451)..(3451): n is a, c, g, or t
  misc_feature (3671)..(3671): n is a, c, g, or t
  misc_feature (3880)..(3880): n is a, c, g, or t
gcggccgctgaattctagggcggagcgaagagaaccggtcgcggcaatcctagcgcgcagcagcagcagcagcagcagcacccgcatccgctgcgggagtccgagccggaaccacacccaagtagctgccctttcctcttctgtcatctcaccgccccaccacagaccgcgttccccgaggaaaccggccgcccacgcccggagcatcctcccctgttgagcgggcgctgacggacccggcggcatgatgcggctgcgaggctcggggatgctgcgggacctgctcctgcggtcgcccgccggcgtgagcgngactctgcggcgggcacagcccttggtcaccctgtgccggcgtccccgaggcgggggacggccggccgcgggcccggctgccgccgcgcgactccacccgtggtggggcgggggcggctggccggcggagcccctcgcgcggggcctgtccagctctccttcggagatcttgcaggagctgggcaaggggagcacgcatccccagcccggggtgtcgccacccgctgccccggcggcgcccggccccaaggacggccccggggagacggacgcgtttggcaacagcgagggcaaagagctggtggcctcaggtgaaaacaaaataaaacagggtctgttacctagcttggaagatttgctgttctatacaattgctgaaggacaagagaaaatacctgttcataaatttattacagcactcaaatctacaggattgcgaacgtctgatcccaggttgaaagagtgtatggatatgttaagattaactcttcaaacaacatcagatggtgtcatgctagacaaagatctttttaaaaaatgtgttcagagcaacattgttttgttgacacaagcatttagaagaaagtttgtgattcctgactttatgtcttttacctcacacattgatgagttatatgaaagtgctaaaaagcagtctggaggaaaggttgcagattatattcctcaactggccaaattcagtcccgatttgtggggtgtgtctgtttgtacagcagatggacagaggcattctactggagataccaaagttcccttctgtcttcagtcctgtgtaaaacctttgaaatatgccattgctgttaatgatcttggaactgaatatgtgcatcgatatgttggaaaagagccgagtggactaagattcaacaaactatttttgaatgaagatgataaaccacataatcctatggtaaatgctggagcaattgttgtgacttcactaataaagcaaggagtaaataatgctgaaaaatttgactatgtcatgcagtttttgaataagatggctggtaatgaatatgttggattcagtaatgcaacgtttcagtctgaaagagaaagtggagatcgaaattttgcaataggatattacttaaaagaaaagaagtgttttccagaaggcacagacatggttggtatattagacttctacttccagctgtgctccattgaagtgacttgtgaatcagccagtgtgatggctgcgacactggctaatggtggtttctgcccaattactggtgaaagagtactgagccctgaagcagttcgaaatacattgagtttgatgcattcctgtggcatgtatgacttctcagggcagtttgctttccatgttggtcttcctgcaaaatctggagttgctgggggcattcttttagttgtccccaatgttatgggtatgatgtgctggtctcctcctctggataagatgggcaacagtgttaagggaattcacttttgtcacgatcttgtttctctgtgtaatttccataactatgataatttgagacactttgcaaaaaaacttgatcctcgaagagaaggtggtgatcaaaggcattcctttggaccattggactatgaaagtctccaacaagaacttgctttaaaagagacagtatggaaaaaagtgtcacctgagtcaaatgaggacatctctacaactgtagtatatagaatggaaagtctgggagagaaaagctaaagaaatgggttctagtttcagaatgtttcttcatttaatctttcaaacatctttagcttttttttgcaagttataaatatttatttgaggtattttttgttctcaatcttgggtgctggagccataaagcttttttttccttttaatctttgtataaaggcagtagattaagaagtgcatttgttggtctttaaaaagtatttacaagtacataaatttgctttatttttaaaaatacaaaaaggaaaaatttaaattttttttgatgtaattaaaatgttaactatgtggtcagataatcccattttacaatagtaacagaaaattgtaattcttagttctaaaattcacaaattaaactcataagctttgttgcattttgttttttcttttccatttttaaaactaatgtgatgtctttagtggcaatagaaggtacttctatgctaaatacaaaactaaaaaggcaaaataatgaaccccaaattattttatttaaaatagcagtggattataaaattagcttgtgtttacatttatgccatttttggtgatagattggctttacattttaaaaaatttatttaaaaatttatcaaatgctttaaaatatgactcctactttttttattttgcaactcctctgttctgtcagagttgttatatacaggagtgtcttatgttactaaaacattccagccaaagaatttcagatgtgagataatgatgtttcatcaataaaaagctataatggttagttactcagaaggagaaacagtgagtgtcttcaagtgaattgttcacctaaacaattttattttcatattatccacataactttttctatgttatatttaaatatgaatggcaaattttggtttttagcttttacattttattatcttaattttataaatgctaatatttcttttgtgataagttatagcatctcataaagtttgttctatttgaagttttttagagtacttgagaaatgaatttagtctgcaggtagtaagtatgctactaaaatacgttagatctaaatccttttatttggtataaaaatgcaatattgagaatcaaaacttgtttttaagagaactatagattctacacaacctgatttcaagtaattattcatagtatttatagttgtcttggcaaagtgattgtaaaattctgtaggacctattcacacttcttccttcttccatatacttctctggttttccccatagttcccctataatttcaagtttgttgaaacctgttaattttagtgggggattagaagaaaaacttggtggtttcttagcatgatggtgtatgtatgtggtaatggaaagtctgtaaaagtaaatatagtgtagnaaaaaagatttcactgagtattttagatactagtgnaaataaagatagaaaatcttgatcataatgtcttaagtttgggaactgtgatattaagaaaagaaattcccttctagaggtgctggccaaaaagccttttgggctaacttaagtattaaatttatatatttaaataattatattttaagttgtagaggattttcccaaggattttatgcttacttgaatgttctttgaatgttcagatgcatatcctaanctggatgcttctcaaggccttactgcatatttgtgttgcatatttatgttagttgcaccagggccatttgtagtttgggcaaccgaatgccttaattggaaaaaaggcattgtggtttcccctattatctaaattgttacattttaccatttcattccgaagttggttttactttattaaatgaagatttagttttcatatcgtatacntagctgtatagatttcaaaattaggttgttaatttgtgtcacttactatttttgtgttggtaatgctttaaatgcatacttaaaaatgaagtactgttatctaagctactgtgtttagaaaatgttaagaatgagcagaaatttttatagaaaagataaacggaagaagagataagatactgcgaataggccctcaaacttaaaaaagaaaaaactttgccagttttaaggacatattttgattctttcagtatcttaacacctttttaaacaaagttcttgatagtaccactattattgggtttgttttatgccattattgattcttgatattcaagcatttacaatgtagcatatttgattttcttttttctttctttttttggcatgtttttagcataaatgttgcattttatcttagtgtttggatgaaaacatttgtgttgtttagctttcatttgctttgtatatttaataatgtacctttattttccagtatgcctacattttgtattgcacaataaatttattttaagctgaaaaaaaaaaaaaaaaaaa

SEQ ID NO: 61568 - DNA, 390 bp, Homo Sapiens
acaaaaaatttcccactatatcctaaaaagtcggaattctgaaatagactggactcagacaccaactaaaggcagcatcactcatcactccccagcttagtcacaagcagctaaatattctcctctaaataccaagggatgacaacccgaagctgtgagaggggaagagacctgatttgacaacaggatgaacagaactcaggcaaactaagttccagtttttaacaacgtaaaaaatatgatcgacacaaagacaaaatacaaggaaaatgaataaagaagaaaagaagacatggggcagggggcacacattcacttctaggcttaagtcatttggagatacacagcaatagtttaggacagaaagacaagaagcccacagacaattaa

SEQ ID NO: 61569 - DNA, 554 bp, Homo Sapiens
tttaattttttgttttactggccagcatcaggaagttgtgttcatttcatttctctgtggggcagctgcccccctcctttgctctctctcactctttccctttctctgagtctctgcttggaagggaaaactgttaagctttgtacgttccctttcacgaaaaagaaccaccgtgagcaacgtccgcgacaggcagccctggctccgcagatgagccacggccccgcttccaccttccggaggagtgctttgcttggaaggggtctccctggggccttgggtctgctttttcctgcatttcttctgaaatgctgtttcagtagaaataagcccacttgagacttttccctttcaaggccttagccacaaacgccttccgactaaccagcttggtgccgtagctcaggcagaaaattctaaagcatccgttcaagcatctgaaacaaacgaatcagccagtgaaatctcatctgttagcatctgttctcctcttagattaaaaaaagaaaaaaatttaaaaagaggcttttgatggcttcaggtagaatcatgct

SEQ ID NO: 61570 - DNA, 427 bp, Homo Sapiens
  misc_feature (344)..(344): n is a, c, g, or t
tttaggtagaaatcatttcctccgccaccccaggaaaacatagatacattatcacaaatgtattctccaaaatcagtcgtaaacttaggtcttacaaattaaacagcatttttttttcacacatcctgagctgttaaatgaaaacaattatgagtcatcaattccaggctcgagaattccactttggtttacctggatcaaggttactgtcaggccagctacctgcctagattccagactccagcctttctgagggcctttccttcctgagttccattagcaaaagaggtattgccggatgtaattttcccttgaaattacacaacctcatccacttgaaactngaggactaaagctactaaatcccacctctgtgaagagcgaagatctcaatgcatgggcggatttgagagcccccttctgtcct

SEQ ID NO: 61571 - DNA, 546 bp, Homo Sapiens
tgagacagcatcttgccatgttgcccaggctgctctcatattccagggttcaagaaatcctcccaccttggcctcccaaagtactgggattacagtaaaactcttaaaatattttcaataattgagttccttgaaattttttactggaagaaaagagaaataaacaggacctacaactcagtacattactcagaaaactactaacaggaatttctgaaaataatttttgcatttatcacttcaacttagttataattcaagaatttaaaaattattattttctgatacatttaattttcctgccaaagtacaaaaaacatgttttaaaataaaatttaaaattgaaataagtgggagccaactaactaaacttaacttttaaaagaacaatttttccatgggtaagtacctttaaaggacacaagctgatagggtgggaataattataaagaaatttccaccacgcagtatagaattcacagtcatcagcaaatcccttctttcaccctttgctttcttgttattactgaaacctgactctccctt

SEQ ID NO: 61572 - DNA, 469 bp, Homo Sapiens
tctcatttaaagataactcattctctcttttgtatttgttcttgaacttaaggctacatgtttccacatgcatgcacaaaaacagaatatgctgacaaaagtatgtatgtatgtatatatgtcagttaagaacatgtataccatgcctataatcccagcacttttggaggccaaggtgggaggatcgcttgagctcaggagttcaagaccaacctgggcagtatgataaaaccccgtttctacaaaaaaatacaaaattagccaggcgtggtggtgcgtgtctgtggcttagctactcgagaagctgaggtgggagaatcaacttgaacccggggggcagaggttgcaatgagctgaggtcgctccacttgcactccagcctgggcaacacagcaagattctatcgcaaaaaaataaaagacaaaaggaaaagaccatgttttgtggtatgctttgaaaccagaaaacc

SEQ ID NO: 61573 - DNA, 917 bp, Homo Sapiens
  misc_feature (1)..(1): n is a, c, g, or t
  misc_feature (169)..(169): n is a, c, g, or t
  misc_feature (189)..(189): n is a, c, g, or t
  misc_feature (231)..(231): n is a, c, g, or t
nagaaaatggcaggacagtgggtcaacccataatcctagtactttgggaggccgaggtgggtgaatcacttgagcccaggagttcaatacctgcctgggcaacacagtgagaccctgtctctactaaaaataaaaaaaagaaaaagcsaatagggacagtctagatgtnctgaaatttccaattatgtnatccactgacagaaaaaaagtgtggatatgccagaagtagtnacagaagtctagaatttataaatactgatgtatttttggattgccacaggtcaagcaaattcttaaaagttatttaaagcatattaggttctaatttcagctttgttctaatagctaatctactttttacttcatagaattgtcttgattttgaaaccctggcattcggaaacatcctgacttctagtgtttcaatggttcattcaatacttgttttataattggaaacagacgctggctgcctatctttatttctattgtaaagtttccatatttgcttcaattaatttacatataattactgtacatgagagatsatgttatgacaagaatagtttctgcaacattaagtatgggtcaaaaaaagaagaaatgggccaggcgcggtggctcatccctttgggaggctgaggcaggtgtatcacaaggtcaggagttcgagaccagcctgaccaatatggtgaaacccatctctactaaaaaaaacacaaaacttagccaggcatggtggtgcacgcctgttattccagatactcaggaggctgaggcaggagaatcgcttgaacccgggaggtggaggttgcagtgagccgagatcacgccactgcattacagcctgggcaacagagcaagactccatctcccaaaaacaaagaaatgactttagacmaatggcttgaatggaa

SEQ ID NO: 61574 - DNA, 1358 bp, Homo Sapiens
gcgtcgacttttttttttttgatacgagcaactgggtcagcacttgaaccacttgcagcaggagaaaaaccatgaaatgaccaactaagttaaagactaccaataggctctctctccggataacgagtggctggataacatggaattgggcaagatggcacctcccaagaacgctccgagagatgccttggtgatggcacagatcctgaaggatatgggaatcacagagtatgaaccaagggttataaatcaaatgttggaatttgctttccgttatgtgactacaattctggatgatgcaaaaatttattcgagccatgctaagaaacctaatgttgatgcagatgatgtgagactggcaatccagtgtcgtgctgaccaatcttttacctctcctcccccaagagattttttactggatatcgcaaggcagaaaaatcaaacccctttgccactgattaagccatatgcaggacctagactgccacctgatagatactgcttaacagctccaaactataggctgaagtccttaattaaaaagggacctaaccaagggagactagttccacgattaagtgttggtgctgttagtagcaaacctactactcctactatagcaaccccacaaacggtgtctgtcccaaataaagttgcaactccaatgtcagtgacaagccaaagatttacggtgcagattccaccttctcagtccacacctgtcaaaccagttcctgcaacaactgcagttcaaaatgttctggataatccttcaatgattgggcccaaaaatattcttattaccaccaacatggtttcgtcacagaacacagccaatgaagcaaacccactgaagagaaaacatgaagatgatgatgacaatgatattatgtaaggaatatagtctagtctagatgcatttcaaaaggaaagttggttttgagcccagtatactgaactagaatattctagatcttgttttaccttaaaagactgaaatgtagctgcagtatttttcgtcagttaaaactgttagatctctttagtaaacatacaaatgtgtttttcagtaggcttcaattacaaacagttaagtacttgtttccttaatagtttcattaatgttgagtcctaatatggcaattctgtttttgagacacttttctgccttctatcactgatagtagcatttaagtttcagattctacagcctagtcagcagatttatctttgacagcataatttctgatctacatttaaatactactttattttataagggaatatagtacttactgtcaccaggccaattttgtttttttacccaaatctctcaattggggggacatttttggggg

SEQ ID NO: 61575 - DNA, 561 bp, Homo Sapiens
ttaactgctacaacatgtctttatttcgtctttcaaaaacagtgttttcccctatcatctttaggtagataaactgtccacgaaggagagagtgatcagtttatcttaacataaagattcctaactaggaattcaaaaagatacttcagtgggacgatattgatcatcagaatgacaaacccatgaacgttttaggaaaggcagtttcagatttttctccttagagggtttcaagaaaccccttgattgagaggagggcacatatcctcctcttaccttctttgttcccaaaagagactcaaagaattgtgaaccaaactttcataatataaagtctctaattacctgagaaaactgcagcccaaaaatctaaagtggcttacccaaagtgaggaagttaatactattccttttagtccaagagaataatgccaactggatacagctcaaagactgcaccattcccattattttttgccattagttacgtttaattttaaatataccatctttggcagcaaaactcaagctgggctttccctctcctttataaattgcata

SEQ ID NO: 61576 - DNA, 1350 bp, Homo Sapiens
cgtcgctcccacggcgcccagggtacccccgccgctgtctgcctgtcttcctccattaccgcgcaggcttggtcaccgcattaaggcattcccgctctccgcggaactgctctgccgtctcggcggtgaaagtgtgagagggtccgtagttgggtcaactttgactcctctcgcctgcccggatccttaagggcctcctcgtcctcccggtctccggtcgctgccgggtctgtgcgccggtccgcgcccgccctcgctctgccatgggcgcttccagctcctccgcgctggcccgcctcggcctcccagcccggccctggcccaggtggctcggggtcgccgcgctaggactggccgccgtggccctggggactgtcgcctggcgccgcgcatggcccaggcggcgccggcggctgcagcaggtgggcaccgtggcgaagctctggatctacccggtgaaatcctgcaaaggggtgccggtgagcgaggctgagtgcacggccatggggctgcgcagcggcaacctgcgggacaggttttggctggtgattaaggaagatggacacatggtcactgcccgacaggagcctcgcctcgtgctcatctccatcatttatgagaataactgcctgatcttcagggctccagacatggaccagctggttttgcctagcaagcagccttcctcaaacaaactccacaactgcaggatatttggccttgacattaaaggcagagactgtggcaatgaggcagctaagtggttcaccaacttcttgaaaactgaagcgtatagattggttcaatttgagacaaacatgaagggaagaacatcaagaaaacttctccccactcttgatcagaatttccaggtggcctacccagactactgcccgctcctgatcatgacagatgcctccctggtagatttgaataccaggatggagaagaaaatgaaaatggagaatttcaggccaaatattgtggtgaccggctgtgatgcttttgaggaggcttcagcaaccaggagggattgactgagatcttaacaacagcagcaacgatacatcagcaaatccttattatccagccttcaactatctttaccctggaaaacaatctcgatttttgacttttcaaagttgtgtatgctccaggttaatgcaaggaaagtattagaggggggaatatgaaagtatatatataaattttaggtactgaaggctttaaaaataattaagatcatcaaaaatgctattttgaatgttatcatggctattacacttttacttcctgactttaatattgatgaataaagcaagtttaatgaatcaaaaaaaaaaaaaaaaa

SEQ ID NO: 61577 - DNA, 425 bp, Homo Sapiens
gcgtcgacgccaattgagtagatgaagtatagaaaatatagggggttgataagaagagggtaaaattgggaggaggtaagggagagaaggaaatttagcccttccaaattctttctctagaatttagagaggatggctcacacctgtaattctagcactttgggaggccaaggcggacgcatcgcttgcgaccaggagtttgagaccagcctgggcaacatggcaaaatcctgtctctacataaaatacaaaaattagccgggtgtggtgatgtgcacctgtgggtcaagctactcagaaggctatggtgggaggattgcctgagcttcagaggttgaggctgtggtgagccatgttggtgtcactgcactcaagcctgggtgacagagtgaaacactctcaaaaaaaaaaaaaaaaaaagtcga

SEQ ID NO: 61578 - DNA, 2156 bp, Homo Sapiens
cgcccgggcaggtgtggaagtaaatgagctaaaaagtgaaaagcaagaaaatgtgatacacctttttcagaattacccagtcactaatgaagatgaaagctcaagaagtggagctggctttggaagaagtagaaaaagctggagaagaacaagcaaaatttgaaaatcaattaaaaactaaagtaatgaaactggaaaatgaactggagatggctcagcagtctgcaggtggacgagatactcggtttttacgtaatgaaatttgccaacttgaaaaacaattagaacaaaaagatagagaattggaggacatggaaaaggagttggagaaagagaagaaagttaatgagcaattggctcttcgaaatgaggaggcagaaaatgaaaacagcaaattaagaagagagaacaaacgtctaaagaaaaagaatgaacaactttgtcaggatattattgactaccagaaacaaatagattcacagaaagaaacacttttatcaagaagaggggaagacagtgactaccgatcacagttgtctaaaaaaaactatgagcttatccaatatcttgatgaaattcagactttaacagaagctaatgagaaaattgaagttcagaatcaagaaatgagaaaaaatttagaagagtctgtacaggaaatggagaagatgactgatgaatataatagaatgaaagctattgtgcatcagacagataatgtaatagatcagttaaaaaaagaaaacgatcattatcaacttcaagtgcaggagcttacagatcttctgaaatcaaaaaatgaagaagatgatccaattatggtagctgtcaatgcaaaagtagaagaatggaagctaattttgtcttctaaagatgatgaaattattgagtatcagcaaatgttacataacctaagggagaaacttaagaatgctcagcttgatgctgataaaagtaatgttatggctctacagcagggtatacaggaacgagacagtcaaattaagatgctcaccgaacaagtagaacaatatacaaaagaaatggaaaagaatacttgtattattgaagatttgaaaaatgagctccaaagaaacaaaggtgcttcaaccctttctcaacagactcatatgaaaattcagtcaacgttagacattttaaaagagaaaactaaagaggctgagagaacagctgaactggctgaggctgatgctagggaaaaggataaagaattagttgaggctctgaagaggttaaaagattatgaatcgggagtatatggtttagaagatgctgtcgttgaaataaagaattgtaaaaaccaaattaaaataagagatcgagagattgaaatattaacaaaggaaatcaataaacttgaattgaagatcagtgatttccctgatgaaaatgaggcacttagagagcgtgtgggccttgaaccaaagacaatgattgatttaactgaatttagaaatagcaaacacttaaaacagcagcagtacagagctgaaaaccagattcttttgaaagagattgaaagtctagaggaagaacgacttgatctgaaaaaaaaaattcgtcaaatggctcaagaaagaggaaaaagaagtgcaacttcaggattaaccactgaggacctgaacctaactgaaaacatttctcaaggagatagaataagtgaaagaaaattggatttattgagcctcaaaaatatgagtgaagcacaatcaaagaatgaatttctttcaagagaactaattgaaaaagaaagagatttagaaaggagtaggacagtgatagccaaatttcagaataaatgctatagaatcaaagaatgcagaaggaatctttgatgcgagtctgcatttgaatgcccaagttgatcagcttaccggaagaaatgaagaattaagacaggagctcagggaatctcggaaagaggctataaattattcacagcagttggcaaaagctaatttaaagatagaccatcttgaaaaagaaactagtcttttacgacaatcagaaggatcgaatgttgtttttaaaggaattgacttacctgatgggatagcaccatctagtgccgatcattaattctcagaatgatatttaatacatttgttacaggaactagaaaaaaaaaaaaaaaa

SEQ ID NO: 61579 - DNA, 577 bp, Homo Sapiens
  misc_feature (433)..(433): n is a, c, g, or t
  misc_feature (436)..(436): n is a, c, g, or t
tttttaaaaaggatataagtaacaaaagtaaccagatgggtaatgaacacaccccctagacagtgctggagcagctgaggtggctctgagcgggcaaggagtgaggactaagcaaggggtcctgccgggaagctgctgaacggccacccccagcaccgggaagagccagacaagcagcaagcctgggccgcagcctcgagagtggagctccgcaggaggggctgccgggcaggaacaggcttcatgcgtgggagcaggaactgcactcagctcagacgccagggctaaggtgctttggagctatatgcttcgacgtctaactcacagccacagtcattctaactaaaatgtgcggaagtcaaacgctgtaacacaaatggacttccacacacaaggagatgctgctacttgctatacaggtatgtgaatcctnctnctgacccctcacctgcgcctctcccaggtcattgttcaccacagtgaagttcagcccaagctcctccacatcgtcttcgtagctcttcagaaagagcaaattcttatacaccctcaggtctagggaggcgaggtggtgaat

SEQ ID NO: 61580 - DNA, 165 bp, Homo Sapiens
tttttttttttttttttggagcttatttgactaatctggaagatttgatacttctcttcttgaaacaccgcctttccttggttcttggcacttaaatgcattcactctgacaagtattgtgcattcattgtgctatgtggtgcccttacccctgagttcataaaa

SEQ ID NO: 61581 - DNA, 470 bp, Homo Sapiens
atttcccaaattgacagagtgtgaggcagggaactactctaggaattagcaagccatctcaggaggatatttcaggatatttaagtgagagctaacactttaaagctctcaaaactgctttttccagtattggacattttaaaagttatcacatgtacttatgtgagaaaccctagtgaataccaacaaaagttaaaatgggcctctctgtcaaaccaggctgtttttcttgtcccattatttctagtgtcaaattatcaagttacccaccagaatttctggaaagaaacgatactgctccttccagagcaaaaacttaaaattttagtttccaaagttatagctaaattgatatattaaaatgccatgtaacataaaagtattactgaaagttttccaaaccacaaaaaactctaaaaattttctttaattttcaactgctattatatgctaaatgttttaaatctctc

SEQ ID NO: 61582 - DNA, 549 bp, Homo Sapiens
  misc_feature (450)..(450): n is a, c, g, or t
  misc_feature (468)..(468): n is a, c, g, or t
  misc_feature (508)..(508): n is a, c, g, or t
ttttcatggcaataggaactgaagtacttcaaataatgtgagcttaaacatgttacttcattgaaacaaccaaaactacttgatgttacatctaaaatcctggttaaaataaattttagatttggaaagggaattgcaaaactaacattctttgtagcaaaatgtcccttagtaatagtcaagttgacctcatttcagtagttcataaaggaaaatccaaagccctcagcagtgaattacctggccacatagctgattttggtcactgtgaatgcagaccaatcacctagtactggaagctcacagtggtagacatcactatcacagtactttacggtcatggatttctcgtgaactatttcaggaacaatcacaaagatgacattcttcactgtatttgcatttgtaaccaccaagcaagtaaggatctctgccccagatgcatggttngaggtaaggttcacaggnaccactaaaggggcagagccaagtaaaacatggatgtctncagtggacagtgtaggatttcttgataagcaaagcacctaa

SEQ ID NO: 61583 - DNA, 508 bp, Homo Sapiens
aatttttaattatttaacttttttttttagagacagtgtcttgttatattacccaagctggattagaattcctgggctcaagcaatcctcttgcctcagtctcccaaatagctgggactacaggcatgcaacaccacacgcagctttcttcatattcttttagtggccataacagaaggagcaaagatatgtttttttctttgattataagatcaaaactaggaagctgagataacatgaaaaagcattaaaaaattaaaaaatcacctataagtctaacattcagagtaagcacttgaatatttatctccttgcagtctttccttgatgtacagtatattccatatacagttttacatcttatacttcattaggaacatttctctatttcattatttctagaaaatagttttactgtatgaatgtcttatgactgtccactccattactgttagaaatataagttcactctaagttcttgctgagtatgtctgtccatttcatcagt

SEQ ID NO: 61584 - DNA, 727 bp, Homo Sapiens
ttgaatttaggtgacactatagaagagctatgacgtcgcatgcacgcgtacgtaagcttggatcctctagagcggccgcctactactactaaattcgcggccgcgtcgacttttttttttttttttcccccaagcgtttgtccatcatgtggcatttctgggagctcgggactccactctgacagaggagagaggccatttcttttactgtctcctgtctctgaagagaaggatgaagtaaaagttgaaaaacaacaggaatgaagtcagcagcaagaccagccggtgccaccgatgaccaggcctgaggttaaaagattaccccccctcccactctaaccacatgtgatctcaatctatcacgaccctttcacgtggaccccttagaggtgtaagcccttaaaagggccaggaactctgttttcggggagctcggttcttgagacgcgagtctgccgaagctcccggccgaataaagccaaatccttccttaacctggtgtctgaggggttttgtccgcagctcgtcctgctacatgacctgcctgtctatcctcttacccacggcaacctgccttgattcctgcagctttaaaataaccctatcagggttagtcgacgcggccgcgaatttagtagtagtagtcgacccgggaattccggaccggtacctgcaggcgtaccagctttccctatagtgagtcgtattagaacttggcgtaatcatg

SEQ ID NO: 61585 - DNA, 571 bp, Homo Sapiens
  misc_feature (507)..(507): n is a, c, g, or t
  misc_feature (511)..(511): n is a, c, g, or t
  misc_feature (552)..(552): n is a, c, g, or t
  misc_feature (563)..(563): n is a, c, g, or t
  misc_feature (566)..(566): n is a, c, g, or t
cgtttatgccaacaactttattgagcaccaattagggcaagggactaccaccttcacagttctcttgggcttattaacgtcgtggcccactcatttatttcacaaatgaggaaaccgaggaccctgctgggagagtttggggcccaaccagggctcccactgagtctggggcaccctcagctcctgcaccacaaagcttcggttgacttgtttcaatgtaaagaacgttacttaaacaggtctgagtgctaggcaaactcacaagacctagctcaaagtttgagcacattggtatgaaaaaaagaaaaaaggagaatcagcaccttgtgatatttaagcaggggcatttggcattagccaaccaagcccagaaagtcggcaaaattcttagcctgaggcatccccagaacacctgagactagctcctgcagctgagggttaaactcgtgcacctgcacttgcaccacatcctgtctgactcttgctgacagcccgtctctgggttgngaancttctggcaagggttggggggacttcagaacagaccagccnggatcccaggncanaaggg

SEQ ID NO: 61586 - DNA, 693 bp, Homo Sapiens
  misc_feature (298)..(298): n is a, c, g, or t
ataagaggaaacactttattacatcagtcagaaaattccagaaaatggaaagtactccatcatacagcaaagtaaatcaatggttgtttgaagagcagagagaaaaactttataaaggctccaagtaaatacaaaggtgatagattagataaattcattatggtgactctgatgatggtttcacgggattataataaaattcaagacttatcctacagcctcaaatatgtgtactttattggatgtcatttatatctttattttatttttaagatgggggtctcactctatcacccangctggactgcagcgttgcaatcttagctcactgcaacctctgcctcccaggctcaagcaatcctcccacatcactaagactaaggtacatgccaccatacctggctatttttcctagagacaaggttttgccatgttccccacactggcctcaaggaatctggcctttccaagtgctgggaattcaggcatgagccacgatgctcagcctataccttattacagctattataacacggtttaagagaaaaatacagatttgccatcattgttgggggaagggttggcaattttatgttgaccttaccgattgttttgatgcccctaagtggggaaactagcctatggggctggaggatcagtgatgtacgatctcattactggacaccaacaatg

SEQ ID NO: 61587 - DNA, 491 bp, Homo Sapiens
tttttttttttttttttggaaaaccttaccatgttgaaaactttattgtggagtctctaaagagagagaaacttaccaaatattaatatgatggtcaagacatgaatttgtatgtatagaatgattacaattatgtagaaaaatacaccacacactcgaggcctggggttactggacacgggtcatttcttccctgactacatcatggattccggtccagaacttccagattgtctacaaaatgcctatcttcatttttttcacaaaaaaaaatttaaacaaacacaaacaccccacccccctcctccaggtgctcttatgaagatcaaatgaggtattgatgtgacggctctgggtctcagtttcctcgtctgttaaatgcatatgagaattatctaaggttccttcctgcccttctctgggggacacaggccaggaggagaaccttgcatacaacccctcatttttcagaagaaaaaactgagaactca

SEQ ID NO: 61588 - DNA, 598 bp, Homo Sapiens
ttttttttgtcagcagaggctttattctagtggaaaaggcagacaataaacatataactgcatgatgatttaaaagcaactgtgataagtgctataacaagatgatgaagtctagggtgttagtagaacaattaacagtgaacatgacaagctcagggtcatcttcatcttctgtgcccccaaatataagtgacctgctcaaagttaaccagtaaaagaggggaaaacaaaactgtcttcctacttagggattctctggtctttggaccaaaccttggaatacaactttacatttgggccaatagccttgttttccctatttatactcatagggaaagccagctggaatatgcatgaatcaacattctaacctcagagatatatttctaaaattcaaaacagaagttatcactgatacttggttcagctgaacgactgtgttcatgaaagttgataccattgccattccttgatttttacaagcatagcaaacttaaaacgctcaacacacccagaatgggcaataaatggatgtgttggcatggtcctcctcgtgctggcacttcaacaacacagcaagctatgtacttttgaacag

SEQ ID NO: 61589 - DNA, 168 bp, Homo Sapiens
taagaagctgctacagtataatgtaaggttaagagtttattctttcaaagcaggtctcctcatctcttaaacgctatacatatgaagtagataaaaactggtttcttttttggtagcatttaggatctacaaaagtgatccttcaattacttggaatttcaaaaaatt

SEQ ID NO: 61590 - DNA, 650 bp, Homo Sapiens
  misc_feature (104)..(104): n is a, c, g, or t
  misc_feature (147)..(147): n is a, c, g, or t
  misc_feature (176)..(176): n is a, c, g, or t
  misc_feature (294)..(294): n is a, c, g, or t
ttttttttttttttttttttgtagagatggggttttgccatgttgcccaggcaggtctctgactagtgagctcaagcaatctacctgcctcagccacccaaagngctgcgattacaggtatgagccactgcgcctggccaacactgntgtactttttaatttttacttgatggcanaaatgattatgttgttaaatgtttcttctaaatttttttttcaattttgaaggatatcaatgttttaatgacaaattagccttcatgcaaattcatcttggggaattctagtaactgncctaatttctgggaattctggaaacatcttataatattttcctgacacatacacaagactactatctctccccactcagagaaacatacacatgcaaaaaactattttaatataaatatggaaataaaaaacaactctttcaccatatcaatgttcctcaacaactttttttttttaacccaactggaaggaaaaacctagggcacaggaaaaatagagaaaagtataaaaaaaaacagtaccagcacgtaagtataccaagctcttccagtcctatgggccctgaacttctctacactagacatgtatcataaaactaaaaaaatctagactaccaagaaagttccttcttcagg

SEQ ID NO: 61591 - DNA, 451 bp, Homo Sapiens
  misc_feature (2)..(3): n is a, c, g, or t
  misc_feature (7)..(7): n is a, c, g, or t
  misc_feature (371)..(371): n is a, c, g, or t
  misc_feature (378)..(378): n is a, c, g, or t
  misc_feature (394)..(394): n is a, c, g, or t
  misc_feature (414)..(414): n is a, c, g, or t
  misc_feature (431)..(431): n is a, c, g, or t
  misc_feature (445)..(445): n is a, c, g, or t
tnnttanagacaaggtctcactgtattgaccaggctagtctcgagctcctggcctcaagccatcctcctgtcttagcctcccaaagtgctgagattacaggcatgacccaccatgcctggccaaagacgatatattgtaagacctctatccaattttagaaatgctaaaatattaaaactgtgaaacttaggattcagtgaggtcatagtgtacctttatattttatatttccatcagtcatattaaataatgacattatatagaggcatgacattgtcaattaagggaaaaggcattatccctaacctcaaataggttaataacctaatggggacaaacaggcatatactggcactgcctccaacttccntttcccnatctttggaacacccncaaaaccttaacaccctggnaaaacccatcttgtaanagggtccccgttgnccccgt

SEQ ID NO: 61592 - DNA, 497 bp, Homo Sapiens
ttttcacttgtgtacatatttacatttatttacaaaagtatctacatcatcagtaaaaacaatttactgacaaaaaaagcaagcacctagtcatataataagttgatgacagccaaaactaatgcttgttctttgttagtgggtatttcttcttaaagcagctgcttcaagttacatttccaacagttgttcaaaaattgtaatactcaaatgagaaatcagatggctttttagtttttaaaataatttagttatgctgttgtcttcatcttctgttaccaatcaattggagctacaaaaaaaaatcatattattaacttgtaaaatgcagtaaatctgggctgcagaccaggagtcttaattaccctcctattctaaagtgaatagcccttttgtaataaactcatcaaagccaagggagctagggagcagggatggaggaagaactgccttgagtgctcttgggatagtagtctgagtaacacttgaagaacagc

SEQ ID NO: 61593 - DNA, 415 bp, Homo Sapiens
  misc_feature (36)..(36): n is a, c, g, or t
  misc_feature (341)..(341): n is a, c, g, or t
  misc_feature (374)..(374): n is a, c, g, or t
  misc_feature (381)..(381): n is a, c, g, or t
tttttttttaaatcttcatagagacgccttagcagnaagctatcggctttgacagtacaccgaaatcctggcagtgaaccataaattgaccattaccataaaaagagctgctaaacgagaaaccatgtgctcagtataaaactaatttcatgctttcaaaagcacacagtggcttctagcaagatagtggccctgggacttgccgagacagattggtgaacacaaatggtttgctcctgatgcgtctgcttagccaagctttacgtgtactggcagtaaaagaggttctcgagccttctatcaaacaaatacacacttagctataactttaaagctgaagntattaaaacagctgcctcaaataaaatatagcnggaaaancacatacacttattatacatacacaccccatgtg

SEQ ID NO: 61594 - DNA, 581 bp, Homo Sapiens
  misc_feature (507)..(507): n is a, c, g, or t
  misc_feature (516)..(516): n is a, c, g, or t
  misc_feature (560)..(560): n is a, c, g, or t
  misc_feature (571)..(571): n is a, c, g, or t
  misc_feature (581)..(581): n is a, c, g, or t
ataacaaccgctaatcagtttattaaaatagttgactttgagcatctgcaatggtgacttccacctcaattcctggctcaacactgatggaagtcaactgcttaacaatctcagaaggactgtgcaagtcagtgggtagcttgtggattctcatctggaaacgatcccatgtctctgaaccttcaccacaaggagattttcttatagtgattctcaaagtcttggcaggcattcaaactggtcccttcacttagacattcttttcctttcctcctctgaatccagtcagcacacaccttctccagggattttacgctgcggatcattagagggattcgaatttggtgaatggtcacctccagcttcacaggtgttttctggtatctttaaaagccttggtgcagtgcggcttctggctgacttgttcggaacagcgatgagtgaggagcaggaatggcagactgcaactctgcaccacttatgactgcatctttctcaaagagctgnattgcttcnttttggttggtggtttttttgagacagaaattcactcttggtgnccagcttggantgcaatggcn

SEQ ID NO: 61595 - DNA, 6376 bp, Homo Sapiens
  misc_feature (19)..(19): n is a, c, g, or t
ctgctataataattccagncaaattagcttcatgtcactgagtattccgggaaataaaagggcattttataataaacaaaggctcaaattgtcagaaagacatgacaaccataatgtgtgagtatataataacagagctccaaaatgctaaaaacaaacatcaacagaaataaagaaaaatacagataaatatatggtcttaagtatagattttgacactcctttctccaaaacttatagaacaaatagaaaaaatataatagatacatagaatatttccagaattgacctcattgatacttataatatagcacacccaataacttagaatacaatgcttttaagtacacagtggaccatagatgaatctaaatacatttgaaggtttgaaatcttatagtacctgttttctgatgataatagaattgaaatctggaatcaataaaaataaggtagttagaaaatcaccaaatatttgaaaattaaatagtagacctatttgatctgcagatcaaaaaaagaattgataaagagaacttagaaaatattcaaactgaataacaactcagcatatcaataattgtgggatacagctatggaagtaattgaagaggaatgtatagttttatatgtttatatymcaaaagaacatttaaagatataaaatcagtgatctaagtttctatcttaagaatacataaaaagaaaaaataaaccaaagtagaaagaaggaaataataaggataaargcatgatcagtaagttcaaaaacaaacagtagaaaaaattaacagggccaaaatttgacttttaaaagattaataaaattgatgaacctgtttcaaaactaattttaaaaagagagagtacacaaaataccaatatcagaaacaaaagtggggatatatcactatagacactagagataataaaaaagatattaagaaaatattatttacaaatttatgtgcataaattcaacaatttagggaaatgaataaattccttataaaataaaacttgccaaagtgatatggaagaaaaagaaaatctgcatagccacttatcaagtaattacatttaaattatcatttaaatctgttccacaaagaaactccagatctggctggttttactggtgagctctatcaacattttaaaaagaaattataactcttacacaaactctttctaaaaatagagaaggaaggctcatttctcaacttattttaggagctaacataactcgaacaccaaaacctggcaatgatactgttcaggaaaaaaacaaaagcaaaacaaaaacaaaaaaaattacagactgatactactgtggatatatatacacaagtatctctaacaaaatattagcaaattgaatctaaactacataaaaaagctaatacatcataatcaaggttataataatacatcatacctaatatatctaaggctgatttcataactgaaaataaatcaataaaatgcaacatattaacagaatgaacaggaaaagccatatgatcttcccagtagatgtgaggtgggaggtaggaattgaccctggaggttgtgcccagacactggaccaaattgaggactagctaaaacagggatagtgtggaagcagtttaccataagacatgcctgtgagtgtgccatgtcagtttaccattgtcatggcaacacccagaagttactaccactttccacggcaatgacccaacaacgcagaagttaccacgcttttcctagaaatttctgcataatctgccccttaatttgcatgtaattaaaagtggctaaaaatacacggccgactgcctctgagctgctactctgggcatgccccctatgggatagccctgctccgcaaggagcagcaactctgctgctactgtacactgctgctttaataaaagttgctgcctaggccaggtatgctggctcacacctgtaatcccagcattttgggaggctgaggcagggagatcacttgaggtcaggagttcaagaccagcctagccaacatggtgaaacctatctttactaaaaatacaaaaaaattagttaggtgtggtggcgcacacctatagtcccagttgggaggctaaggtggacggatcacttgaaccccagaggcagaggttgcagtgagctgagattgcgcttctttagtgttaataagctatggaagagaccaaaataaaactatctttgagttgataaactatcttaactctgtgtctgttttattaattaaaaaaaaagcaaattaatgcagctgtgatgcatgtaactggcaaaagcatctttgaatagaaaaaatacactgcacaaatgaaaatggtggcgagagcaatggggaatatgacttgtgtcctaaacctattaatggtaaccacatttcatgtcagaaacagctcattaaactaattttagatttggtgagggaattccgcaaacccctccacatgtgtgtgcaaactcctcagtgtgtgaacccactgcaaactcctccgtgtgtgtaaacccactgcaaaccctccacgtgtgcatgtaaacccactgcaaacccctttgtgtgtgtgcaaacccactggaaacccctccactgtgtgtgcaaacccactgcaaacccctccacatgtgtgtgcaaactcctcagtgtgtgaacccactgcaaaccccagtgtgtgcaaacccactgcaaacccctccacatgtgtgtgcaaactcctccgtgtgtgtaaacccactgcaaaccccttcgtgtgtgtgcaaacccactgcaaacccctccactgtgtgtgcaaacccctccacacttccttttttgtcctgcctgctgggaaaatgagttccctaggtttagattaatgggtggaacttcttgcgtctggcccacacccagagctggctagagcaacccgggagtggagatgtgtggtttccagccggacactgtcttctctccccagctcaggattttattagcctgtgtggacaaacattttgaaggatcagtgttccaaaggaaccatctgtgacaacaccccaggttcctgggacatctctaagggacccaaactcttccttttatttcactagtctgtcctatttatatacaaatgtagtccccttgtttgcacttcttccagcgggaacagactcaaacggcttcccctcaccttgggccttggttggggcctttttgtggctctcttttgagattcttaaagatgctgtgaagggatgggcctggcttccatccccaaacagatgttcttgaccagtctatgtggaattggggtcctgtccccctcccacctcagtcctgctttgtagtccatccctgactctcagcaaatactccaaggcgtctgcacttgtgagtgaagcctgtccattagccttcccccttatccctgtggctggcttcgccttcagcggacatcagtaattgttggccatgaaacccctttgcagaaattgcatttcctccctctagtggcctgtttgcatttgagttctgtgagcccctgcttcatcacttgttacacctgcccctccagggacaggcagccagggctggggtcaccagggtcccctcttgggccctccaacagcaacagtactggcaacagctgggatttgctgagcacagactctgcagcaggctcggttgagctctcttgcctgttccttcataccatcctcacgcccatccatgagatgggtccagctgttttcagatgagaaaatggcacaggaagctggtaagtgacagtcagaaatgaatgctggcagcttagtccttggacccaccgcagtgcaggaccttgctcaacagggatcacccttgtccgccacctgttcatgaggccacccagggtttgtgtggtcatttgtctcctttcatctgctgccttcaaccagctgggtcattagggctggggaacccagaccccacacagtcctcctcccagaggccagacacagcctcacgccacagcaaggactccagtccccgaagcaaatgtccctgggcgtagaagctgcagggcccccaatccctggtgtgtactgctttgcactggtgattcaccctcattgcaaccttccctcttgccaccctaacagtgcttttggctccttaacaccccctcgcctggcacagagcagggcttggtgaggactcactggacacagcccatgtgtcctcctgccagttagcctccatcgggacttttttgaatgtctgttttttaggcccttggcctatattttctcaaggcttttgataaaatatttaaaaataattcacaaggagcctagaaactgcctggaaaaccaatttctgtcttcagttgtctctaattaatgtcttcatgttgcaagaagttccccttttttaatgctggagcatcgtgcgggggattccatggttttccccgtccccggccacctggactgggctggcttctggccgcccacccacgggcccctccgggagctgtttctgtgcgggtctcaggatggagcctgaaattcctcttcctcctgggagcctttcttctgaataaaaatgatatagtaaccaaaaaatctacgcaatagagatatggaaagtcaaggcttccctccctgaccttcagtcccatttgttagaggtaaacgttgttccatcattcatttgctcattcattcttttgttcacttggcaaatacttcttgagcatctttgattcaccaggcatgatgctaggctctgagcatactgcagtgaacaacacagccaccagtccctgtgcctcctggacattctggtgaggtttaacaggagtaaggctgggctcctggatagctttgaactgcaaagtggttgagactggctgagaatccattgaggagatgtcccactgggttgaataagagcagcaagaatttgaaccaggacagcaacttcagaaatgaaagaatgagaggagctctgtattgattcttaaaggaatgctgtaatcctactgcatgtgttagttatgtgttaattcaatctgatttcatcactttgtttgcgtttcttttctttactaacttgataaataattattggctttgaatttttacaatgcaacattgtattctcacttttagagtgtattgtgcattttatttgcatacaatggatttatatatgtgtgttcttttctgttttcaaatgaaatgggagcaagctacatttcgttattgagactgggttttggatatccttccgttctttttattgatgatctcctatgaggaacttttgtgtatttccaaggggttctgctattacaaaccatgctgatgtacttccttgtgcatacaagtggaagtatacacttgtgggagattgttttcagaataaattactaaaattgagtaatctgccacatgaaaaatgggctcaccactgttttggttacatttctttaatcatgatggcattgagcaccattttcacacttattggtaattcatatttctttttctgaaaactaactattcctgtcctttgttgatttttccatttgggtatttgtgtttttcttgttggtttgcaagagctctttgtatattaaggaaaatcacactctgattttcacacagtgttgtaaattttttttctagtttgtcatttgggagtttttaatggagtctctgctctacaaaaatagaatttagcattctgtttatggcttttatgttttgtgttttatttaggaaagattataaaataattcacttattttcatgggttctggaactatttgttttaggaaatgacctaaaaatctcaatggcacctaccattcattttctgcctaacacatagtaggggctctacatgattatctgtaattgttataattacaaggaggtgatggttttcctatttgatagttgatgaagttgaggctcagggaaggcaaagaacttacctaagcaacatagttctaagccagtggttctccaacttgagtatgcatcagaatcacttggaggacttgttaaaatacagatgtctgccgggcgcggtggctcacgcctgtaatcccagcactttgggaggccgaggcgggcggatcacgaggtcaggagatcgagaccatcctggctaacaaggtgaaaccccgtctctactaaaaatacaaaaaattagccgggcgtggcagcgggcgcctgtagtcccagctactcgggaggctgaggcaggagaatggcgkgaacccgggaggcggagcttgcagtgagccgagatcgcgccactgcactccagcctgggcgacagagcgagactccgtctctaaaaaaaaaaaaaaaaaaaaaa

SEQ ID NO: 61596 - DNA, 446 bp, Homo Sapiens
tgagacaagtttttgctatgttgccctgggctcgaattcctggtctcaagcaagccctctactcatgcctcctgaatagcccagattacaggcttgcagcaccacacctgactttggtttagaagattttgacatgacccgcttaaaggaaatgggtcaacaatctttttttttcttttgatagtgtctcttgctttatcaccctggctggaaagcagtggtacaatcatagctcactccacctcaaactcctggactccagtgattgtcctgtctcagcctcctaagcagttgggattatatgtatgagtcactcatcaacaaggatcaacaatttttagatggtattgtaagtaaagttcactgccctagaacatttgtggagggagctaagggaatcaatattatctgtattcaggatcgtgtctgtataaccagaagcaggg

SEQ ID NO: 61597 - DNA, 2971 bp, Homo Sapiens
attttatcaatttgtaatggctaacaaacttggatagcaagtactagaagattttatgattattcagggacatattttctagcactgaatatgtgccagacattgtcctaggtgctagagctatagtgataaacaaatcagatgaaagtagaaatccatgccctaaagaacttaatgtttcaattgggaaggtcaagtcagataggttaaaaggcaaacacagtagcactgtagacattactatataagctttatggcaactagtgtttgtgcagtgctttacagttagtaaacagtgttcacgtaccttatctcacagtggctttgtgggtttgacaaagtagcaatcctcatctcataggtgaggaaactagggctctttaagattagataatctgtctaatagcatccagccaggtggtcatctgactctaaatcctttgaagtcttacttatgctacagtgcctttctttttcctacagatattgttaggcataattcatcatctagcaagtccagaatcatctttccagagttccagctcattcataataacatgtttcagaaatcagggtcctgtattagttacgtttttcttaaatggagacggaatcaaatgtgactgcatgtagtttttctgttctcatttggcctattttccaagagtaaggttagtagatggctatttgtagcagtaactggacagcatctgtccagtgggacagctggagacttgtctttagtatttggtaatgctgacttatgtgctgcttaatcttttgagtcttgatggatgtattagatttctattgttgtgtaacaaattaccacagaatcatcagtttaaacaacacacatgtattatgtgtttgaaacattattatgtatctgtgggtcagaaggatgggcacagcttaactaggtcatctgcttaggtctcactagactgcaattaaattgtcagctgatatgagttcttatctggaggcttgaccatggaagaatctgcttaagctcactcagactgttggccacattgatttccttgccatcgtagtaggactgggggccccagattcttgctggttgttggctggaggctgccctcagtgtctaaaggctgtttgcagttccttgctatgtgggcttcctagcacgcctgcctacttcagcaagccttcaaggagagtctctcgagtgagtcttccagccagcagcagtgctaatgaaaagcatagtcactggagggacatcatacctcttttgccatattctgttggttagaagccagtcacactcaaggggaaggattatataagggcatgaacttcaggaggtgcgggtcacagggccacttttggatctgtttgccacagtaagaaccttcattggtcccacagagatatactgaggaccactatatccctggaacagaagcaccagtgatacaaagatgagttggtcccggcctgtgttaaggggcctgcctgcgtctagggatgaagactctaagcaggtcactaccctaccgtggggaaagcgctctagcagaggtttgtgcacaggcttctctatggggactgtaggaaagaatgcttttgtctggaggagccagaaaggctttgtaaaaggtgtgcttttgagggcctcaaagagcaagtaggagtttgataggtagagaagaggatgggctaccaggtagcaagaagggtgtgtgttggtactaggtctgtgtgagagaattatgagtaagtgcagtgaggcgtaagcagacagtgttagaggattctggggcgtgactgtattctccaagtgtttgcactgttcttcatttttcacgtttttatgtcataggtggagctatatacctttctggaattgacatgatacatggcacacccgtactagacatcaagccctacatagctgagtatgactcaccgcaaaatgtgatggagcctttagcagactttaatttacagaataaccaacatacaccaaacactgtgtcccagtctgacagcaagactgacagctgtgaccagcgacagctctcagggtgtgatgagccacaaccccaccatagcactaagaggaaacctaaatgtcctgaagacagaacttcagaagaaaactacctgacacacagtgacacagccagaattcagcaagcatttcctatgcacagggagatagcagtggattttggtttggaatcaagacgtgatcagagttccagcgtggcagaagaacaaattggcccatattgcccagagaagagcttttcagagaaaggtacagacaagaagctagaaagagtggaaggagcagcagtcttgcaaggaagcagggcagagacacagcccatggcccctcactgccctgctggaagggctgatggagctccccgcagcgtggttcctgcctgggtgacagaggctcctgtggccactttagaagtgcggtttactcctcatgccgagatggaccttgggcagctcagttcacaagatgttggtcaggcgtcatttaaatattttcagtcagcagaggaagcaaagcgtgccattgaggctgtgctgtcagcggatcctcggtctgtgtaccgccggaagctttgccaggaccgccttttctactttaccgtagacatagcgcatgtcacttgctggtttggtgatggctttgcagaggtgctgaggatcaagccggcttctgagcctgttcatatgactggccctgtggggtccttggtgtctctagggtcttaaggagcctccctcatgtctttaaggtagcatcattgatctttggatgtggcttttggattttctgaacaagctaatgttgtgtcgagaagcaacactttgtgatctcatggctttgattgatttgggctgttcaaaatgtttatttgaaaaacgtatacattaataaacttaacaaagagatataaaatacagagaaatc

SEQ ID NO: 61598 - DNA, 1199 bp, Homo Sapiens
gtgaacctggcggggctcttggtcagcctcctgatgctccctctggtgtcaggttgccctggcttcagccttggatgtttcttcttcctcactgccctccacatctacgccaactaccgcgcggtccgagccctggtcatggagaccttgaacgaaggccggctccggctggtcctgaagcactaccttcagaggggagaggtactcgacccaactgcagccaatcgcatggagccgctgtggacaggtttctggccagctccgtctctatccctgggggtccccttacaccgcttggtctccagtgtctttgagctgcagcagctggttgaggggcaccaagaatcctacctcctctgctgggaccagtcacaaaaccaggtacaggtagttctgaaccagaaggcaggccccaagaccatcctaagggccgccacacatgggctgatgcttggggccctgcagggagatggaccccttccagcagagctggaggagctgaggaaccgggtgcgggcaggtcctaagaaagagagctgggtcgtcgtcaaggagacacacgaagtgttggacatgctgttcccaaagttcttgaaaggactgcaggatgccggctggaagaccgagaagcaccagctagaggtggatgagtggagggccacatggcttctgtctcccgaaaagaaggtcttgtgagcagcccagacggaggcccaagcccagggcaggaacctggagcaaggacactttggccacagcaggacaggggaaaggcagctttatttttccttagggcaactgcagcgggtgggccaggccctcatgggaagtgactgccaatcagatgcagtgggccccaggcagaggaaggccgggagaaggggagccaggaccttctcaccccactgccccttccttccacacccagatctcttgtcctgtcctcaccccaccctgccaccatcagccctgcctggagccacctgccctttggcaacaaaaccaaacctttttgtgggcgttcaagatggtattgtgcccaccagtcagatcctgtgttttgagtcccaaaggccatgccaaggattggctttgggaggctttaatcaccaacccatcaacatcaagcctcccccaggccggttcaaataaatgtatttaaataaaaattcttgctcggcaaaaaaaaaaaaaaaaaa

SEQ ID NO: 61599 - DNA, 413 bp, Homo Sapiens
  misc_feature (134)..(134): n is a, c, g, or t
tttttttttttttttttaactttatcaggatacttcatagggggaacttttcactgttcagatgaaaagccatgctattctttttcctaaaagtcaggagaatatctgaaaacactggggtccccaaaacgctntacatttcacatgtaagtgagagaatgttcaagtctttattagtattaacttagcttcagagacttgtcctagagttttagaggcaaattggaaactatttcctggaacaacgcctcacagcatgccttttgatacctggattatattacttaaattctgaagaaatctccgctttttccccccttctgtgcatttttgatgctgagctgtttccgggtttcccacactcttgcctgtcacaaagaagaaaccacaaaaatgctgcaaagcaaagtctg

SEQ ID NO: 61600 - DNA, 1397 bp, Homo Sapiens
tttcatcgtttctgcttaccctacttttctttcccatcctgatccctctcccaccttactggactctgaaacgggcatgtacagagaagaggagaccccaacacgcttcaagctttgagtggagaggacacagcctctgctgggacagggaacagagggatgcggagaccctgaagatgcttttggacagtggtctgaggttgggacagtggcaggagataccattcacccaggatctccaggacaagagatcagcctggcagttacatgtgttttttttcaaactggttgccaggttggcatgagcgatgacatcagagattccgaccttcctgattggagggaccggactctgtcggcacctgggagttcagttggacaacagtaacttctcagagctgttctccactcctgacttctcccagcctcgagaattgataacacactcttctggatcccagcagtgtccagaagaagaccaaggacagaacagagactaggtttggtgagatgggacagattttgggaaagatcatgatgagccatcaaccgcagccccaggaagagcggagcccccagcagagcacctcagggtaccccccccaggaggtggtggatgatgaagtgtcgggaccatcaggtgaggggactggaggaagaagaggtggcataggattgactaagatgaaggaagggggccaggcgtggtggctcacccctgtaaccccaacactttgggaggctgaggcgggcagatcacctgaggtcaggagttcaagaccagcctggccaacatggtgaaaccccatctctactaaaagtacaaaaattagccaggcggtagtggtgtgtgcctataatcccagctacttgggaggctaagacaggagaatcacttgagcctgggaggaagaggttgcagtgagccgagatcgtgctactgcactccagtctgggtgacagagtgagatgctatctcaaaaaaaaaaaaaaaaaaaaaaaaaaaaaaaaaaggaagaaaaaaaagaagggtcagaggtcaggaaggagaacttggggagggtgtgtgggaagaatggagaaattcaggctgggtgcagtggctcacacttgtaatcccagcactttgggaagccaaggcaggcggatcacttgaggccaggagtttgagaccagcctggccaacatggtgaaaccctgtctctattaaaagtacaaaatggagctgggcattatggcaggcacctgtaatcccagctacctgagaggctgaggcaggagaataactggaatccgggagatgcatgttgcagtgagctgagattgcaccactacactccagcctgggtgacaaagcaagattctgtctcgaaacaaaaaaaaaaaaaaaaaaggcc

SEQ ID NO: 61601 - DNA, 592 bp, Homo Sapiens
aagagtctgggtctcactctgttgcccaagctgtagtgtagtggtgcgatcacagctcactgcaacctcaaactcctaggttcaagggatcctcccacttcagcctccggagtagctgggacctagtgtgtgcctccatgcctggctaagtttttaaaaattgttttagagaaagggtctcactatgctgctcaggttcccgaccatttttattagttgcctagtgtgtattctttcagggtttctatatgcagattctttctgtccctctctaatagccaacaggcaggctccctgtaaacatgacaaagccactccaattttgctggccaaaaggaaaagtgtcccgggcacaagggctgagttaatggagagcaagtggtaattatctgctctattagatccctcttcctccagcccaatttcatgggaggcttggtttataaaacactggctgtctgactaaacctcaacaacagattaaccataaatgcattcctggaatttacgttcttcccgcctcagtgttgtgtaaaattatcagggaacacagacccacagggtcaggacaggaagcagcatcaactccgat

SEQ ID NO: 61602 - DNA, 563 bp, Homo Sapiens
  misc_feature (499)..(499): n is a, c, g, or t
aacagcatcagaatttatgaagtaaaagactttatcccaaattaatcctggactcattattctattcttcaagttttctaaagaaggaacaaaacactgtcttcctttagaaacaaaacacaaaacatcaagctttcctaacaaagttttccgttatagccaaatacagagctttcaaacagctgtggaaatctaagtaagcatcatcttactattcagtggaaatggaacaccctcaaataccttctttcctaatctgaaaactgacttataaattaccaacataactagattaaggaaaaactaaaaagcattcagattagtcataacaaaaacttctaagtattgattagtagagtattactaccttcataaatatggctatgccttatattcttactctaaaataagatatccataacataccttactaagtggttattaaaccctaggcttttcatgtattataaagaactgcccttttcctatggctgcttangtaccaaccctctactgatgtgggcccaatttagttctttaatcacttggctattgcattctga

SEQ ID NO: 61603 - DNA, 473 bp, Homo Sapiens
atttggccctcgaggccaagaattcggcacgagggctcattttttttttttttttttttttagctcttcacgtaagtctaatctgcagacacagttgaccactccccattccaacccccaggatgaagcaatgccctaactgccctgaccatatgggttcacccaggggctcgcagggtgaaagcagactttcccctattcaaagggtagtgtccctagaccagagcgtcagcatcacctcgatgccaggtagaaatgcagaaatgcagattcttggcattttcacaagatccccaggggattctgcacaccataagtaagggatgaaaagcactaaacacagattcctgggcctcctaaagtggaatcccagggaactggcctgggcgtctgtattttagcaagctttctgcatcccgggtgatttttcgcgatgaaaatggggaaatgctggagtaaaggaaagtaaaaaa

SEQ ID NO: 61604 - DNA, 1862 bp, Homo Sapiens
gctggcgggcggccgggtggcggcggcggcatggcggagccgagcggggccgagacgaggccccccattcgggtcaccgtcaagacccccaaggacaaggaggaaattgtgatctgcgatcgagcctcggtcaaggagttcaaagaggaaatctcccggaggtttaaggctcagcaggatcagctggtcctgatcttcgcaggcaagatcctcaaggatggggacacactgaaccagcacggaatcaaggacgggctcactgtccatctggtcatcaagacccctcagaaggctcaagatccagctgctgccactgcttcttccccctccacacctgaccctgcctcagcaccctccaccacgcctgcttcacccgccacccctgcccagccctccacctctggcagtgcctcttcagatgctggcagtggaagccggaggagcagtggtggggggccctctccgggggctggggagggatcccccagtgctactgcgtccatactctctggctttgggggcatcctggggctgggcagcctaggcctgggctctgctaacttcatggagctgcagcagcagatgcagcggcagctgatgtccaatcctgagatgctgtcacagatcatggagaaccccctggtccaggatatgatgtctaaccctgatctgatgcgtcacatgattatggccaacccccagatgcagcagttgatggagcggaaccctgagatcagccacatgctcaataaccctgaactcatgaggcagacaatggagcttgctcggaatccagccatgatgcaagagatgatgcggaaccaggaccctgaatctctgctcagggctgactcgtgggcagagaaggaagaatgtggggaacaacctgccctccactccaaccctccacagccatactgtatgactgtaacctacttttatttatgttttaagacatacagggcatcacactgaaaaggagctgtgatctgagggtcaggagtgtgggcctgggtaccagcactgccactgacttgcctctctctcagccttagttgccccttcactgaagacctttccagctttggtgatctacgattctatcacagcaagcaacaggaagacagagcatcatgctaggcacataagaagcttttaaaatactggttaaattgagatcaccacaccaggggaatagtgtccaagtcatgctccagctcctttcccctcttagggatcttggactagaaaaggccaaactttgtttatttcttaaaacttgaatctgagttcacagaaagtaagtgctgtactttattgactacctcttccacaggagaacccagcacaggtcacagtggcttatcctgtaatcctagcactttgggaggctgaggtgggcagatcacctgaggtcaggagtttgagaccagcctggccaacatggcgaaaccccatctctactaaaaatacaaaaaaaggctgggcgtggtggctcacgcttctaatcccagcactttgggaggccaaagcagacggatcacctgaggtcaggagttcaagaccagcctggccaacatggcgaaaccttgtctctactaaaatataaaaaattagctgggggaagccgaggtgggtggatcacaaggtcaggagatggagaccatcctggctaacatggtgaaaccccgtctctactaaaaatacaaaaaattagccaggcgtggtagtaggtgcctatagtcccagctacttgggaggctgaggcaggagaatggcgtgaacctggaaggcggagtttgcagtgagccaagatcgtgccactgcactccagcctgtgtgacagagtgagactccgtctc

SEQ ID NO: 61605 - DNA, 327 bp, Homo Sapiens
ttcgcggccgcgtcgacttttttttttttttttaagccactgctttacttcttcaggttagcaaaatgcttaggtaaatttgttggccatcacaaatgtgattgaggccaccggtttctatcatcaaatgaaatcacaatgacaggtttctgacaataaactcaacctaaggggagcgctaataaattcccttcccagcctcttcttgggtgtgtggtatgtgtgctgcctcctgaaatgcccaggatggccaccctcccacacgggatattctaagccgctgacaccatctaacttttctgaaagaaattgtcgacgcggccgcga

SEQ ID NO: 61606 - DNA, 594 bp, Homo Sapiens
tatgatattggcagctgtagtgcatgagtggactgaatgctatgaaatagcatacttttctgttggatgtctcatgggagagacttgcttagaagttagctgagtaatcatgtgatcttggtatgagtgttaagcattcagcatggctttgagtctgaacaaaagagcaaacaagccctggtgagatgaagaagggagcaggagcctggagatgcctgaagatgttggtgagaatcacaacctggagtgcatgggggtggtctcctcaccaacccttggcacagtgggtttcatcttcaccttgaaggagagcaggccagacaagatctcagcacagcttcgcaactgcgtccaccctctcttctcttctaagagttcacttggaaggcttggcaaaactcagctctcaggtcacttctggcttccaacattctataaatgctctcagaaaacaaaagtccaagaggatttcctatccccaggacctggcccaggctgagagaagctgtgtggagtggaagatggacattgaggaagaagggcaggtgtggtctcacccagaatggttcctgctgcttccgcggtgcccaggct

SEQ ID NO: 61607 - DNA, 562 bp, Homo Sapiens
ttgaatttaggtgacactatagaagagctatgacgtcgcatgcacgcgtacgtaagcttggatcctctagagcggccgcctactactactaaattcgcggccgcgtcgacttttttttttttttttaaggctcgctgcaaataatatggtaccttgcccccaaataaccgccaggacacacacacacacacacaaacacacacacacacacacacacacacacacacccttataccttcaaggaaagaaaatcttactgtcatgaacattcagcgttgatcatcttgttattccttcagattagggtgggttttattccctaacctgttactaaattacataaagtctttaaggtataaaaatgattacaggtcagaaggtggtaagcatcatctcaaaagtatctgtagtggaggcctaatcacttcctcatttcaaaacactttatcagaacaactttagagcagccttttgacttgggttcattagcccctgagggggtacaggggtggaagctggccgtctgagggcccctgaattctattgaccattttgagtggtc

SEQ ID NO: 61608 - DNA, 651 bp, Homo Sapiens
ttgaatttaggtgacactatagaagagctatgacgtcgcatgcacgcgtacgtaagcttggatcctctagagcggccgcctactactactaaattcgcggccgcgtcgactttttttttttttttttttagagataggagtctcaccatgttgcccagggtggtcttgaacttctgggcccaagtgattctccagcctcaacgtcccaaagtgttaggacttacaggtgtgaaccaccatgcctggcacaaaataccatttcattctcagattaattttgtaccatggagacaaggggaagttttctcttttctttgtagatgaagcaacttgaggacagatatttggaggtcttgtctgaggttcatttaaaatggggcagaggccccaggccttctaactctccatccagttctctgtagtagcccttcctaccccagctttggtactgatgtcaaccccagtgtttcctcatttactgagcatgtgtgactttcaaaaggctctgttactctcttgatttctgagaggagcgagatagccatgacttttccctgaccatgtgactggaaacatactgaattttattgggatggagaagttcacagtgttttacaaacacatgacaaggttattgtttacctttttatg

SEQ ID NO: 61609 - DNA, 464 bp, Homo Sapiens
atttttattgtcactggatgtttattaagtattttagtttcataacttattttcataaaccttttgttcactatttgtttgggtaaatctcatcaaatttaaacacccgagactcttaaatgttctggagttttgtgggaaagtaaacacctatttgtaagtattgatatgtaaaaagttcaaattttagtatatgaccaactacaatttgcatttctctaccaagtaaccctctataatggaatttcactgtaaaacagacacttatgtccagcacaaataaagttcacaataattgtttatcacaagtaaacaatcagcaaacttaatgttttacttataataaatacatgccatatacttagattctagaaagtcatcactcactacttctttgtggtaggtagcttcacagagactgtgaaacagatcatggaaagaaactgattttaccatgtgcgaag

SEQ ID NO: 61610 - DNA, 511 bp, Homo Sapiens
  misc_feature (488)..(488): n is a, c, g, or t
  misc_feature (494)..(494): n is a, c, g, or t
tttttttttttttcccatttcctagagctggaataaaatatccatgttttatgggacttgagcttggctttgtcccttggttttgttaatgttaattcctcttaaatatctaaaaacatctctacctatttgagagggccatatgctacacaggcttcctaatactgcttagcaatccttctactggttcctaagtggtttactattgtgttccctggaagaggtattacaaacgttttattcttctcaagcctcttagaactgtcaaagttgactgtgcctcctatttcatagagaaaaaactaaattattagatatgaccattcccaaaacttcttcccatctaccttcaagacttacctcttttcagccatgcatcccccttttctaagacatgcttctctttgtgttcttgacctcattccttcccatctaagaccatattccaccctgtttaatttctagcttcggttcccttttactagttntttccncactctacatagctgca

SEQ ID NO: 61611 - DNA, 556 bp, Homo Sapiens
  misc_feature (203)..(203): n is a, c, g, or t
  misc_feature (254)..(254): n is a, c, g, or t
  misc_feature (294)..(294): n is a, c, g, or t
  misc_feature (342)..(345): n is a, c, g, or t
  misc_feature (375)..(376): n is a, c, g, or t
  misc_feature (409)..(410): n is a, c, g, or t
  misc_feature (485)..(493): n is a, c, g, or t
  misc_feature (495)..(496): n is a, c, g, or t
  misc_feature (533)..(533): n is a, c, g, or t
  misc_feature (535)..(538): n is a, c, g, or t
  misc_feature (549)..(549): n is a, c, g, or t
ttatattacagtgttttatttagataaatttcaaactccattaattaatattagaagttagaatattgaatattttggaaggtgatcgttaggaaacttaaaaattaaccaggataagatacaggaagcattgcattcaaggagagaaactgtaattatttttcatgaataagagaattaaatatttttaaaaaatattttancatgtaaataggggagtttgacataatgaatttggatgttatgcctaattnttcaaatgcatatatatataaataatttatttatgggggnaagttaacatcatcattgaaaacataaaactttttttattatataccnnnntaagtccgggggggccacgtgacgaatgtnnccccagggtttttcctttagttaaaccggcccnnggggggggggggggttttgctgcacccatcaacccatatctcattttagggtataacagggggggggttttctcnnnnnnnnncnncgtggtcccccaccccctgaagcccccgggggggggngnnnnaaagttccctnccccctt

SEQ ID NO: 61612 - DNA, 596 bp, Homo Sapiens
gatttcatttcattttttttttttattaaagagagttctactgtagacaaacaacccagggattgtttgaagaaaagggatatcccctcagacttggggatgcatttctccctcagtggctaaacctctttgtcattattacctccagagagagacacccagggatctgctcacaccacccatcttcaggcaagttgaagcatgtcctggaaagccacctgaaccctggacagctccgcctgactagagaaatggtggcaaaggaattcttgctgtggacccagcggtgagcataacagagttacctctctccaccccaaatattcagactgcaaggacactggctcccaagcttcgacttgcttggagttccattccaggtactctgctgatgtctcggccagcctcagccacagactcccagctgagctgagctgttctgaggagtcaggaaatttgggggattttaacaagagaaacaaagcctggccccccatgtgtcaaagctctggatactagctctttaaaacctagtggggttacggggaaaatcaatgtttgcagttaacccccaatcaaaacttattccctgcctt

SEQ ID NO: 61613 - DNA, 186 bp, Homo Sapiens
  misc_feature (34)..(34): n is a, c, g, or t
ttttttttttttttttttttatttttactggagntttaatcaggaacagtcccagatgatgagatgcgcgctttcccactagcttggatgcaaatcgcgcttgggttttgggagggagccctctgcccctggacctaccaggtaatttttttcccctttcttcttttcgggaagacagaggggctt

SEQ ID NO: 61614 - DNA, 506 bp, Homo Sapiens
aatttttttttttttttttttttttgcattcatagatactttatttaaaaagtacactaattgaagttttacaccattttatgattcatcaaacacagcaactgaatactggcgtatagcaacattacagatgatgttagtctaagataaaactcataacacattttaaaaagggtaaaaggaaggaaaggaaaaaggatccaaggctgtagaaagattttaaaaacaaacatcgtatgtctgaacctttgcctggagtttcttattttgtgaaaagcagtttgtaagtagaggactcgtaagtgcacctagtacactgcaatggcacagacacggcagatagtcaataaaatgatctttaacttctgatctagattatttttgttgttgttcatgtattaacctagtgaatctcagccaatagatggagtggcattgacctgcacaacttccaaaatcccatccaaccttagtgtcctctgaagttctccataacttattgtctg

SEQ ID NO: 61615 - DNA, 606 bp, Homo Sapiens
ttttgatgtctcattttttaaaggttattggtttaatgagcagacctgtattttataaagggggaaagttggccttttaaggggaaagagttaagtacacccctatattatacaaatgctaatgctttgtatttactgggagaatgggaaaaataagcaaagacgacaccagtttttcccccagttttagccgagataccagtttctcctgacttcttgcagacaggtagccataatgatttgtacataatcagagaacattaaaatctttcattctgattaattactagtaagtgtacttaaagtactgagcatgtttcaaataccagaactttttaatttaaaaaatagcctaatcattaacacagaaatcactcagcttactagtattattttacattcacctgttcctgacctcattataaaaccagatgaaatgactgtcataaacaggaaaaaaaggtaaaaattccccaatgaaacataattcagaaaatcttggcttcacctagtgcttgaagcgtaaccctatggagtgtgttcatgaatgcaaagcatagcttcagagtcattactgcttaagtatatacttaatgttgaatactg

SEQ ID NO: 61616 - DNA, 583 bp, Homo Sapiens
tttttttttttttttttctcaaatagctaataatcctgctatgaaagcaaaggtgcctttagaaatatatacaagtgtctgccttcttttcttccttcctccctcctttccttctttccttcaacaacttaggctgaaagaatcattacaaattcactgataacaatatggagcttaactttgggaaatctattcatttcgccgtaaagccttcatcttataggtatgggaacttcttggttggtatctcttgagggtacctggctaatgtgaacagactgcccagcgtcaccttgacattatagtattggctttctaccagtccccctaagacagcagtgtgtccagcaccacgattcctctaaatacgtcattaaaggaaatcattcagactgaccagtgcacgtatatcacatttacattgcaaaacagtccatactactctccaattgtaaaacagattgtataacctacgataattcaaaacatgctataagaaaccactcatttctcagtaatttgctaattattttgagctacttataagcctgagatcactaatattacttaaagatgccctcca

SEQ ID NO: 61617 - DNA, 400 bp, Homo Sapiens
tcatcatctcaagaaatcaaaggcatgcacctggaaaaagaaaacacacttttgaagtcttctaatcactagggctctgtattttgttgcagtcctatagtgtgggtatttaaagaataaggccaggcaactctgtctctagtctttgttcattcatttgatgcgtccttgagcaccttactaagcaccagtcaatgttgtggacaatggggatatagcatgatgaagccagaaaggatactgccaaaaaggcatacattaaactcataattacacccaaatttaccaaatacaggatccttctttgctaccacaaaattcttaatggctttaagtctcaactttctcatctgtaaactaagggcaataacagctgctccttctgtatgttgctgtgaga

SEQ ID NO: 61618 - DNA, 546 bp, Homo Sapiens
ttttttaaggtaaatggtgattttaaaaagcaagatcaccaagaaatagaatcaaaagacagatatgaatgactacacacaagatcaactaatagaaatactgcaacacatttaaaaacatagtagtagctacttaagagaagcaacttcacaaatttctttttgaaactctaaacattttgaaaaagaccaaacaatccgggtaaagttatggagtgcttggccttgtcacacaggtacagacacagtgtagatggtattgtgagcagggtagctaaagaaaactgtattttctgcaaacagcttaatcttccttagataagaaactaaaaataataaataaaacattccccaaataataaattaaaacatttcctaaagtaatactagcccaatcaagtctagcttgaagaatctaattctaacaattagaaagacaggaaggttcaagattcaacatcgtgccacaaacacatgaacatccaaaaatctcatttgaggtcctgattcaaaatactaaggcagatccatataagaaatcctagc

SEQ ID NO: 61619 - DNA, 297 bp, Homo Sapiens
  misc_feature (80)..(80): n is a, c, g, or t
  misc_feature (151)..(151): n is a, c, g, or t
  misc_feature (266)..(266): n is a, c, g, or t
  misc_feature (288)..(288): n is a, c, g, or t
tttttttttttttttttttttttttttactgagttttgacagtaattgcatttataatgcttttattaagtactaactcnctaatgttgaataagatgtaagcacatattaatggcttttctacattctttatatcagtacaacattttcngaagtataaatgctttcctgtgcaataaggtataggaattaaagttttgccatattcttcacacttctgggaagtttctgccagtatgaattatcttacctacaatcaagtgtgncaaccatttaaagggctttggncacatttcc

SEQ ID NO: 61620 - DNA, 432 bp, Homo Sapiens
  misc_feature (355)..(355): n is a, c, g, or t
caagtgacctactattaatatatcctattttttctctgtatttaagaaggccaaatagaaaataatgctgatatgggagtaactgttcacattgagaaatgagaacagaatcccaatctcatttattgtctatacttggacctgtttactattcttaattggaacaagacattatcatttttagtgtaaaacacctaaattctatacactatgttttaattcctgcagctatccgagaagcgaagaaatcttgccaagtgaccaagtcacttacgtgagctatccccatgtaccgagggtaggtatcgcagtttccagcagaaaacccctatctgtcctggctgatcagtatctntaatcctactttctctggctttgacagcacttggtccaaacctaaagggcagagagagcttcagagttccaatgaca

SEQ ID NO: 61621 - DNA, 4432 bp, Homo Sapiens
gggaagcgcgccgcgcacctcatggttccggggacagttagggcggcggatggaggtcagcggtggtgctcgctgcggtttggaatcacttgctaggagtcttgtctctctgccacccaggacatcatggcagctcacctggtaaagcgatgcacgtgcctcctgagagaagctgctcgtcaggcccctgccatggctccagttggccgactgagacttgcctgggtagcccataagactctgacttcctcagccacctcacccatttcccacctcccaggttccttgatggagccggtggagaaggaacgagcatctactccctacatagagaagcaggtggaccacctcatcaagaaggccacaaggccagaggagctcctggagctacttggtggcagtcacgacttggacagcaatcaagcagcaatggtacttatccggctctctcacttgctgtctgagaagccagaagataaaggcttgctcatacaggatgcccactttcatcaacttctctgtctgctcaacagtcagattgcctcggtctggcatggtaccctctcgaagctgctgggaagcctgtatgctctgggcatccccaaggcctccaaggagctgcagtcggtggagcaggaggtccgctggcgcatgcggaagctcaagtacaagcacctggccttcctggcagagtcctgtgccaccctctcacaggagcagcactcgcaggagctgctggctgagctgctcacacacctggaaaggcgttggacagaaattgaagattcccacacattagtgaccgtcatgatgaaggtgggacacctctcggagccactaatgaaccgcctggaagacaagcacgtcctgaacagagcgcaggacatcaccctgccccacctgtgcagcgtacttctggcttttgcgcgtctgaacttccatccagaccaagaggatcagttcttcagcctggtacatgagaagctggggtcagagctgccaggcctggagccagccctgcaggtggacctggtgtgggccctgtgtgtgctgcagcaggcacgggaagcagagctgcaagccgtcctccaccctgaatttcacatccaatttctagggggcaagtctcagaaggatcagaacaccttccagaagctgctccacatcaacgccactgccctgctggagtaccccgagtactcgggtccccttctgcctgcctcggctgtggcccctgggccctcagcccttgacaggaaggtgacccccctgcaaaaggagctgcaggagacgctgaaggggctgctggggagcgccgacaagggcagcctcgaggtggccacgcagtatggctgggtgctggatgctgaggtgctgctggacagtgacggcgagtttctgcccgtaagggactttgtggcacctcaccttgcccagccaactgggagccagtcaccacctccagggtctaagaggctagcgttcttgcggtgggagttccccaacttcaacagccgaagcaaggacttgctgggtcgctttgttctggcccggcgacacatagtggctgcaggcttcctgatagtggacgtcccattctatgagtggctggaactcaagtctgaatggcagaaaggcgcctacctcaaggacaagatgcgcaaagcggtggctgaggagctggccaagtgacttgtgccagcagcatggactgcgtgcctctccgccggaggtctagctgtgggcggccaagaagggtcacccttgaggacaaacctctgtgcaggaccttggccagagtggggagggtggccagccactctgagggacagaacgtcctcttgtgtataataaacctttaattttggtgttggacccctggggccttcccaggcttggtcaccctctgcactgtcagcacttgtctgtctgctttgttgagcagggcgtggttctccagtctgccctgtgcactcccccgccacgcccagcccaagagggctgctttagggacagacctgggttgttacctgcctgtctctcccagcttcttccctccatgagtgcttattcacatatgccggcctcttgcgtaggggtctgtatcagccccagcaggcaggtggagtcctagaattctgaacctccagagcagaggagcttcccagggaagctgattggagattcagtgcatggctgggggttctgatggagctgtggctactgaaccacagccatcctgggaggctttctcccatcagttgtctcacacttagctgagtgaaaggcaccctgacagcatgtggtgacaggtgatgtgagggctgggtgagcacttgggaggcgctggctctgggagaggagaagatcccacttggctgacaccacggcaccaagagccaaactccatcgttgtcttcaccaccctgaccagagccttgtgctgtcatctaggaactggctgcccaaacaggaccctggcagcctccctgctgctgcggggattaccaggtgctgggaggcaacaagctttctaccttccagcctctccttagagacacctattggcagaacctgactaaatagcagtcagggaactgggttgcctccagccatacagaacagagagtaggacagtggggtggagctgagatggagaggcccacagccctcagcactgtaggctcccaaccctaggctgtttccccaaaaagaaaaagtctagtcactgctctgatgcttggccactcacccaagcattggggtagtttgtgctggcttcactgggcaccatcaggcacacccagcctgtagtttttgttttatattacctaagtcggccaggtgtggtgggatcacgcctgtaatcccagcacttagggaggctggggcgggcgaatcgcctgaggccaggaattcaagaccaacctggccaacattgtgaaaccctgtctctactaaaaatataaaaattagtcgggcatgatgacaggcacctgtaatcccagctactcaggaggctgaggcaggtgaatcacttgaacccgggaggtggaggctgcagtgagttaagattgtgccactgcactccagcctgggtaacagagcaagactctgtctcaaaaaatatatatgtgtgtgtgtgtgtgtgtatatatatgtacatgtgtatataagtatatatgtgtgtatatatgtatatatacacgtatatacacacacacccctaagtcatgattttggagcaattgtaagtggtgtagtgcttaattttggcattcacacattgattgttagcatatagaaatgggattgatttttatgtgatcttgctaaactttatgcatttttaaaattcctttggatttcctatgtagatatttatgtcctgaaaacaggaatgtatttatcctttcaaatcaatatgctttttattttgttatttatgaccacttcattaaaatataattcacatgccatacacttcacccatttaaaatgtataattaggccaggtgtggtggctcacgtctgtaatcccagcagtttgggaggccaaggccctcagatcttgagcccaggagttcaagaccaccctgggcaacaggcaaaaccctgtctctattttttaaaatacaagaattagccgcagtggcacgcacctgtcgtcccagcaacccaggaggctgaggtaggaggatcacttaagcctgggaagtcaagcctgcagtgaaccatgatagcaccactgcagtccagcctgggcgacagagtgagaccccatctcgaaaacaaaaatgtataattcagtggtttttagtctctttgcagatacatgcaaccatcaccacaatttgcacattttctaagcctcatatactgatgtgatattttggtgttttgtgactggcttcatttacttagcatattgttttcatgtttcattcatgtcgcatgtatgagtattcattcctttatttggctgaataatattccattatagtttgtgccacattttgtttatccattcatccattgatggacatgtggattgtttccaccttctggataatatgaactgatacagtttggatattttgtcccctccaaatctcatgaaataggatcaccagtgttggagaatggggcctgttaggaagtgtttggatcataggaacatctgtcataaatggcttggtgccatccttgtaatgagtgagttcttgctctatattagttcacttgaaagctggttgttgggaactcctgccctatctgttctgccctctctcgtcatgtgacatgcctgctccttgttcaccttctgtcatgagtaaaagcttcctaaggccttcccaggagccaagcagatgtcagtaccatgcttgtacagcctgcagaactgtgagccaaataaacttctttataaatt

SEQ ID NO: 61622 - DNA, 3698 bp, Homo Sapiens
gcaagatggacgcgggatttttccgcggaacaagtgcagaacaggataatcggttcagcaacaaacagaagaaactactgaagcagctgaaatttgcagaatgcctagaaaaaaaggtggacatgagcaaagtaaatttggaggttataaagccttggataacaaaaagagtaacggaaatccttgggtttgaagatgatgttgtgattgagtttatattcaaccagctggaagtgaagaatccagactccaaaatgatgcaaatcaacctgactggatttttgaatggaaaaaatgctcgagaatttatgggagaactgtggcccctgctgctaagtgcacaagaaaacatcgcgggaatcccttctgctttcctagaactgaagaaagaagaaataaaacaaagacagattgaacaagaaaaactggcatctatgaaaaagcaagatgaagacaaagataaaagagataaggaagaaaaagaaagcagcagagaaaaaagggagcggtctcgtagcccaagaagacgcaaatccagatctccttcccctagaagacgatcttcccctgtcaggagagagagaaagcgcagtcattctcgatctccccgtcacagaaccaagagccggagtccttcccctgctccagaaaagaaggaaaaaactccagagctcccagaaccttcagtgaaagtaaaagaaccttcagtacaagaggctacttctactagtgacattctgaaagttcccaaacctgaacctataccagagcctaaagaaccttctccggaaaaaaattccaaaaaagaacaggagaaggagaagacccgaccacgatctcggtcacgctccaaatcaagatcccggacgcggtcccgctctccttctcacactcgacctagacggcgccatagatccgataagatgtattcacctagaaggcggccaagcccaagaaggcggccatctcctcgaagaagaactccgccaagaagaatgcctcctccaccaaggcatagaaggagtagatctccagtaagacgaagaagacgttcgtcagcatccttgtctgggagtagctcatcatcctcttcatctcgttcacggtcaccaccaaagaagcctcccaagaggacatccagcccccctcggaaaactcgtaggttatctccttcagcaagtcctccaaggcgaaggcacaggccatcacctcctgcaacaccacccaaaactcgggattcccctacaccccagcagtcaaaccgtacaagaaaaagtcgtgtttctgtgtctccagggagaacttcaggtaaagtgacaaaacataaaggtactgagaaaagagaatccccttcaccagcaccgaagcctagaaaagtagagttatctgaatcggaagaagataaaggtggcaaaatggctgcagcagattctgtgcagcagagacgccaatacagacgacaaaaccagcagtcttcatctgactctggctcctcctcctcctcagaagatgaacgacccaagagatcccatgtgaagaatggtgaggttggcaggcggcggagacattccccttcccggagtgcttctccatcaccacgaaagcgccaaaaagagacttcccctcgtggtagacggaggagaagtccatccccaccacccaccagaaggcgacggtctccttctcccgcccctcctcctcgacggcgcaggactcccacaccaccaccacgacgaaggactccttctcctcccccacgtcggcgctcaccttctcctagaagatactctcctccaatacagaggagatactctccttctccacctccaaagagaagaacggcttcacctcctccccctcctaaacgaagagcatcaccatctccaccaccaaagcggcgggtctcccattctccacctcccaaacaaagaagctccccagtcaccaagagacgttcaccttcattatcatccaagcataggaaagggtcttccccaagccgctctacccgggaggcccgatcaccacaaccaaacaaacggcattcgccctcaccacggcctcgagctcctcagacctcctcaagtcctccacccgttcgaagaggagcgtcgtcatcaccccaaagaaggcagtccccgtctccaagtactaggcccattaggagagtctccaggactccggaacctaaaaagataaaaaaggctgcttccccaagcccacagtctgtaagaagggtctcatcctcccgatctgtctccgggtctcctgagccagcagctaaaaagcccccagcacctccatcccccgtccagtctcagtcaccgtctacaaactggtcaccagctgtaccggtcaaaaaggccaaaaagcccaacaccgagcccatcaccgccaagaaattcagatcaggaaggaggtggaaagaaaaagaagaaaaagaaggacaagaaacacaaaaaggataagaagcacaagaagcacaaaaaacacaagaaggaaaaggctgtggctgcagctgctgcagctgctgtgacccctgcagccattgcagctgccacaaccacattagcacaggaagagccagtggcagcgccagagccgaagaaggagactgaaagtgaagctgaagataaccttgatgatttagaaaagcacctgcgtgaaaaggccctgagatcaatgaggaaggcccaagtgtccccacagtcttagggggaaatgtttgttatgatgtaaattttatttggtttgtacgcagttcaatttcaaaattgctaaaatgtgtttgagctttagactataacatttgttgtaataattgctaggttgaagttcaacatgtaaaaaaagggggcatggatttacattgcaaaaggtgtccacagtgtattagtgacattctttcattgacagctgacataattcattgagtgaaatattttaagccaaaaaaaaattccctttttaaaaaagggggtttaaatactgttggcatttttatggttcctttaaatgccctagaattcccagaggggttttttgtttgtttttttggttttgattttctttttgtttttctttcttcttcttatttttttcatttgagtcttagctcccatttaagttatgcttctgaccttgtatggtctgtaagcttgcccagaaataagaccactgttttgaactaccacaaaagtataaatgaatattttaatgccacaatctttcctgttgcctgtggagtctctgctgaaatgaatcaggattcgagctctaggatgagacagaaaatgaaagcatgttgtttgccaggacactgtgggtttatattgatgtgtaacaagttgatttggaacactggactctcattctgttattctggcttcgccccttttgttccccctccttcttttgtaaaggcaatgagctagtcccagaaaggatccttcagttacatacaatttatttaatgaaatgtcatggctctgttcatatttttgtcttgttcttccaattggtatatacaactttcagagcctcttgtatttggaaggctggaagggcccagactttggaatagtgtcttggtttcactgtttttgttttgattttttttttgttttgattttttttaaactaaagctatataaagcttgtggattaaacagaataaatttctaaatttaaaaaaaaaa

SEQ ID NO: 61623 - DNA, 1672 bp, Homo Sapiens
gagtgttcgggacgcgggcctgcaggcgccatggtcttcctcaccgcgcagctctggctgcggaatcgcgtcaccgaccgctactttcggatccaggaggtgctgaagcacgccaggcacttctggggaaggaaaaatcgctgctacaggttggcggtcagaaccgtgattcgagcctttgtgaaatgcaccaaagcccgatacctgaagaaaaagaacatgaggaccgtaagcgtggacccgggacacccgccggccagcgcactcgcggcccctgcgtttctgcgccgcgacccagctagtgtgcagccgcccggccaccctcagccccttcctttcataccttgcttcgaaactccgacaaattatgtcgccccgcaggcaaactgtgggacatccgttctcccgccccgccgccacccccactgtcaccccctgctccagcccctcgcccgggccactgcagagccgccttgacactctccctgcgtcgccagccaccgccctagtcgctgctgctctcatccctccggtggcttcccttccctttggcagctgaagtcaacccagccccttgccaaccctccagggctactatctgctgccgtggtgctcctcgaagagaccacgcctgctgccaagctctgcccacccggaaccccccgcatttctgggaggctggcgcctccactctgtccacgtgccgcctcattactgcgcctcaccactcccgtctcagcctcatgaacctagcatctaacgtaccccggtttttttttcttaccccgagacggagtctcgcgctgtcacccaggctggagtgcaatggcgcgatctaggcttaatgcaacctcgtctcccgggttcaagcgattttcccgccccagtctcccgagtaactgtgactgcaggtgtgcgccaccaagctattttttgtatttttagtagagaccgggttccgccatgttggtcaggctggtctcgaactccagatctgaaatgatctgcctgccttgccctcccaaagtgctgggattacaggcgtgagacaccgtgcccagctgggtttttgctgtttttaattttgaaacagggtcttgatttcgcttaggccagagtgatggcaccatcatagctcactgattttgctatttacttttagaaaaatattctttagatcaattagaggctttgctgggacataacatccagaagtcatttttaagtatcttcatgttttcttatttcagctctggattaatcgaattacagctgctagccaggaacatggactgaagtatccagcgctcattgggaatttagttaagtgccaggtggagctcaacaggaaagtcctagcggatctggccatctacgagccaaagactttcaaatctttggctgccttggccagtaggaggcgacacgaaggatttgctgctgccttgggggatgggaaggaacctgaaggcattttttccagagtggtgcagtaccactgaggactgttgctgtattgattaggaaaagagacagagtaatttgcagtttgtttgatttatacttttgtttatctacaacccaataacagacatgagggatggccctgtctctctgggacagagcctcaaagatgatgtccatgttttgtgtgaatgaaactcaaacactc

SEQ ID NO: 61624 - DNA, 4999 bp, Homo Sapiens
gctctaaggaaaacgacagcacgtgttctttttcactagtagaagtgacgttggtttcatgttgacaactttgaagccatttggaagtgtttcagtggagagcaaaatgaataacaaagcgggctcctttttctggaaccttagacaattcagtacattagtttcaacaagcagaactatgaggctatgttgtttgggactttgcaaaccaaaaatagttcattcaaactggaacattttaaataactttcataacagaatgcaatcaactgatatcattagatatctctttcaggatgcattcatttttaaatcagatgttggctttcaaacaaagggcataagcactctaacagcccttagaattgaaagactactttatgctaaaagactgttttttgactcaaagcagtctcttgtccctgttgataaatctgatgatgaattgaagaaagtaaaccttaatcatgaagtctccaatgaagatgttcttaccaaggaaacaaaaccaaaccgtatcagcagtagaaaactgtctgaggaatgtaattccctgagtgatgtgttagatgcattttcaaaagcgcccacatttcctagtagcaactatttcacagcaatgtggacaattgccaaaagactgtctgatgaccagaagcgctttgaaaaacgactgatgtttagccaccctgcatttaatcagctctgtgaacatatgatgagagaagccaagatcatgcagtataagtacctactgttcagtcttcacgccatagtgaagcttggaatccctcagaacactattttggtgcagactttgctgagggtgacccaggaacgtatcaatgagtgtgatgagatatgcctttcagttttgtcaactgttttagaggcaatggaaccatgcaagaatgttcatgttctacgaacgggattcagaatactagttgatcagcaagtttggaaaatagaagatgtcttcacattacaagttgtgatgaagtgtattggaaaagatgcaccgattgctcttaagaggaaactggagatgaaagccttgagggaattagacagattttctgttttgaatagccaacacatgtttgaagtactagctgccatgaatcaccgatctcttatactcctggatgaatgcagtaaggtggtcctagataatatccatgggtgtcctttaagaataatgatcaacatattgcagtcctgcaaagacctccagtaccataatttggatctcttcaagggacttgcagattatgtggctgcaactttcgacatctggaagttcagaaaagttctttttatcctcattttatttgaaaaccttggctttcgacctgttggtttaatggacctgtttatgaagagaatagtagaggatcctgaatccctaaacatgaaaaacattctatctattcttcatacttactcttctctcaatcatgtctacaaatgccagaacaaagaacagttcgtggaagttatggctagtgctctgactggttatcttcacactatttcttctgaaaacttattggatgcagtatattcattttgcttgatgaattactttcccctggctccttttaatcagcttctgcaaaaagacatcatcagtgagctgctgacatcagatgacatgaagaatgcttacaagctgcatactttggatacttgtctaaaacttgatgatactgtctatctgagggacatagccttgtcactcccacagctgccgcgggagctgccatcgtcacatacaaatgcaaaggtggcagaggtgctgagcagccttctgggaggtgaaggacacttctcaaaggatgtgcacttgccacacaattatcatattgattttgaaatcagaatggacactaacaggaatcaagtgctaccactttctgatgtggatacaacttctgctacagatattcaaaggttgcttacatatatttcatttgctgggctttctgaattaaaatcctaattctaaaagacttcatattaaatagcagtagtaaatctaagacttgatgtttgtatggagcctgcagcacaccaagagacttgtcatccatcaatgtactccttagaaagtgtaaatgtggacgttatggttgaatacaatggactacagtattggtcatttaatgagacagacatttttttaaaattaggttttgaagctatagttcaataaaacaatattaatataattgaaactatcaatgcagtgtagactttggacaagataatataatagtgatcataaagaataaagactcgaggcttctacaaaaatcaaatacccaataaatattttgctctaccaccaagacttttccagaggtagagaaaccgtagttttttaattaaactgtatttgtatgggttagagcacattgaagctaatcctaagttgtttctttggctcacacattacaaatagagtgtctctggggagaaatatgatgctataccatgagagaacatcctgcctcttcagtagatgcataagatcatgccatcattgcacacacccgtgggtcagttaccctttatgtaaaagctctgctacatggatcctgaccccaaggaacttgtatcttctgttaactccactggacacacacacacacataaatatgatagaaacatacaaaaaaatctgtagggatccaagctcttatctgcccatccctcttcattcacacacagttctgtgactttcacctctttctgaatgcatctagcttatttcttggccatcttttcaaccgctgtctttcctattagtgctacccatctcccctcagaagaggctttctctctgacctcattccaagatcagttttctttttcgggtactccgctattctggcataataaaataacagttgttctcagcataaagtcatgagaagtgaagaatgtgagcattcctttaaaaacataaaatttgtcttataacagccagagtataggtgaaggcagtaaggatataaatgtcttttttttttctttctttctcccagtaaacttagtatttccaaagtgccaggaacaatgaaaaaacaaattacaccttccacattttcgttatatttacagattttattttaacagtcttgcctttctcttggtgttttctttcttgtatttaaactcctatttctgttttttaaatgctgctttctctgggagatgatatgtgtaagaagagcatttactatttggtattatttacaccgttactactactggtagaataaataattatactcagatcagaaatcagcactacacagaaaacccttaaaattggtgctttcatgtctgaaaattttcctcttcaaaaatgtagccatccttaaagggaactgagaggtaactgtgtataatgttgtatatttttgatttataaagtagccttgtatagtggaatatctgcagaggccaagtaaaagaagtgaaggactaagacaggaatatcaaggattgtggtcggtggagagctcaacttggaaatctccagagaacaagaatgcagcaagactaaatagtaatatcaataactgttcttgttttgtttatttttgttttcagagtagctgtgctatgtgtttccagatctgcttattgtttgggttcaagccaccccagaggattccttgctatgaaaatgcggcatttgaatgcaatgggttttcatgtgatcttggtgagaaaaaaatgcaaatgaaatattctttaattactgatgtacattctaacagctgccaggaatcttgtggttgagactggttactaggactagaggaattgtcagcattattggaatgagtgctttagttactgttttctttgaaaaagaacattgctagtacacgatttgggttctgctcagctgattactgtcattactagagcttttacaaatgttgttctggtcagctttaatccttttttgctaagaagaagaatgcaaataatatattttcatatttaagatacacaaaaccatatttaatttccaggttatcttgaacaagggaaggaaagatgttaaagctttgttttcatggcctgtgtgaagctgttacaggatgtttgttgccagaaaaggctggatggttttaagaagatgggtctttctcttccctcttatgcttcaattttattttgtaccccacagcttctcttgaacagcctcttctgatgtttctaggtagtaggaaccttacaaatacatttatatatatgttgctgttggaatctatctaaatgccactcatttggtcctgcgcataatgtaagatgtaaacattccaagtcttctattattatactttagtattggaaatggattacgtgtggactattgagattaagatgactcctttctcttagtgggctactatttaagactttgttttttatattgctgattatatatattctaaggaagattttctcaagaaagcagtttttgcaccatttagaggacctttaaaatttgtataattttcacagttaaagctttcttaaaccctagcatgtagtcttattatgcctttaaaatatgagtagttataaggtcacatttgctttcaaaaagctattgtcctcatgttactttactatgtttggatctctaaactagctcttttgttagtatcgtctcacaaactgattattttcctctttctttggtaaggtcaataactgggagatggacaaactagagatggaagatgcagtcacatttttgaagactaaaatctattcagtagaagctcttcctgttgctgctgtaaatgtgcaaagcacacaataaagtgaaaatcaaccttttcatattaggagacatgcatttgtaaaaattaataaagatgacaagtcagttgtcaatggaattgagctatctgctaagacaaaaaatgttacctcagttcactattaaaattaattttaggagtgg

SEQ ID NO: 61625 - DNA, 1670 bp, Homo Sapiens
aagactttttgctcaggtcaggattactccagcaagaggccactcacactgggaagtcaaacagcaaaactgagtgtgtgtctctgtttcatgggggaaaaagccattacagctgtggaggatgcatgaaacattttagcaccaaagatatactcagtcagcacgagagactgctccctacagaagaaccttctgtgtggtgtgaatgtgggaaatcctctagcaaatatgacagcttcagtaatcatcaaggagttcacactagagaaaaaccttatacgtgtgggatatgtgggaaattatttaacagtaagtcccacctccttgtacgccagagaattcacactggagagaagccatatgagtgtgaggtttgtcagaaattttttaggcacaagtaccacctcattgcacaccagagagttcacactggagaaaggccatatgaatgcagtgattgtgggaagtcatttacccacagctctacattccgtgttcataagagagttcacactggtcagaagccttatgagtgcagtgaatgtgggaaatcttttgccgaaagctccagtctcactaaacacaggagagttcacactggagaaaagccttacgggtgcagtgaatgtgaaaaaaatttaggcaaatctcttcacttcgtcatcatcagagagttcacaaaagaaagggcttatgagtgcagtgagtccagtctcattaaatattggagaatacacacctgagtaagatcctgtgattgcagcaaatgtggaaaatgtttacccaaaggtctgctctccttggatattggagagttcacactagagaagagtccttacaagtaaaataaatttgggcagttttgtagccacacctctgtattccttcaggattatagttaacactgaatgaaggccttactagtgtgacaaatacaggatatttatccagaagtctggctgcataactcacaggagagctttcatgtgggaggattgctacatgggaggatttgcttgagcctgggaggcagaggttgcagtgagccgagattgcaacactgcagtccagtctggaccacagagtgagaccctgtttcaaaaataaaatatataaatgacatccaataaagtatgcatatttgagctgtaggataagtcttgaattttctttttcttttttttgagacagcctcgctctgtcacccaggctggagtacagtggcataatctcggctcactgcaagccctgcctcctgggttcatgccattctcctgcctcagcctccctaatagctgggactacaggcaaccaccaccactcctaccttttttgtatttttagtagagatggggtttcaccctgttagccaggaagttctcaatctcctgacctcgtgatctgcccgccttggcctctcaaagtgttgggattgcaggcgtgagccactgctcctggcttgaattttcttataatcccatgaaaccatcatcagagtcacaataatgaatttatctaatctatcacctttgtattcacctggagcctttataaagtttttctctatgcagacaaccattgatttactctgctgtataatactttccattttctagaattttctgactgatgtaataaagtgtttcctcttataaaaaaaaaaaaaaaaa

SEQ ID NO: 61626 - DNA, 1441 bp, Homo Sapiens
ttttagattctaaagtttcacagtagaaaggatgtcggggtctcaattccaagccctgtctaggaaggaagcccccctgcagcctcctgatggcttgatggtatctggcacctgactgtacatacccccactcctactccagataggtgacacacttccaacactgtgaattgctcagcccaaagggcatctgacttcacactgagctgagcctatcctgtgtccctggacttgcccgttggtgccagctctgctttgaggatccacagagcctacctgccctcagacctgccacagcccttcaaagggcaagaggcacaaccatgaccctcaggctagctcttgattccaggccagagacccagtcctttcaattatgctttaatgctttacagaccacagtgtgggaacccgccctcatccctgccaccttctctccaatttttctgtaactcgggagcatgcagtggcaggcctgtgccgaaggacccatccccatctcatctcatgcttgttgcctgccgctatgatataatccctgggcctttggagtttcttccatatcctggtccttggcatctgggctgggggggtccatggacagtgctggacatttcctgattcctggaactcagtcccaggattagggttttctgttccccttggcggtaatcccacgctgattcccataagcagggccagttcttggtcttcttaaaggcagtgctggcctagcagaggccttgctggttgcatctgttctttctggccagagaccttggtgggtaacagctggtgcagcctcacagcccatgtgctcagggcctcagagccatgtgtggtgccagtggccagcaccccatgagatgcaaacatcaggggatccagctaatgcctcattcccccttggggcctggcctagactgggtatgtggggtgtgtgtgtgtgtgtgtgtgtgtgtgtgtgtgtgtgtgtgtgtatttgttcatctatctatccatccatccatccatccatccatccatccagggattcattcattctacatgccaaatgtgggccaggctcaagggacccagagaggagagccctctgggagtccccagtctggtagaggaagcaggagtagacacaatgagagcacattagaaacaggcacaatcacagatggaagccaggtgctgtgggtgccccaaggaggaattgcctcgggtggattagggaagacttcccagctaaggcttggagcacaggtaggagttcatttggtgctaatagtagaagtcgtggccaggtgcagtggctcacgcctgtaatcccagcttgtgctttgggaggccaaggcaggtggatcatttgaggtcaggagttcaagaccagcatggcttacatgctaaaacccagtctctactaaaaatacaaaaaaaaaaaaaaaaaaaa

SEQ ID NO: 61627 - DNA, 1977 bp, Homo Sapiens
aaaacctgtgggtgcctcagaccacagcagagctcacagaacctgcgggagccaggctgacccgccagcatggtagagttcgcgcccttgtttatgccgtgggagcgcaggctgcagacacttgctgtcctacagtttgtcttctccttcttggcactggccgagatctgcactgtgggcttcatagccctcctgtttacaagattctggctcctcactgtcctgtatgcggcctggtggtatctggaccgagacaagccacggcaggggggccggcacatccaggccatcaggtgctggactatatggaagtacatgaaggactatttccccatctcgctggtcaagactgctgagctggacccctctcggaactacattgcgggcttccacccccatggagtcctggcagtcggagcctttgccaacctgtgcactgagagcacaggcttctcttcgatcttccccggtatccgcccccatctgatgatgccgaccttgtggttccgggcccccttcttcagagattacatcatgtctgcagggttggtcacatcagaaaaggagagtgctgctcacattctgaacaggaagggtggcggaaacttgctgggcatcattgtagggggtgcccaggaggccctggatgccaggcctggatccttcacgctgttactgcggaaccgaaagggcttcgtcaggctcgccctgacacacgggtatcaagcctctgggaagagcactctgggttcagttggcaattggcaaggattttattttggtgggaagatggcagagacgaatgcagattctattttggtagagattttcagtccattcacaattaagattatattttggtgtcttatgcccaaatacctagaaaagtttccacaacggagactcagtgatctaagaaactaggtggcaatgaacatattccacaaagctggcatttgatctgagatctgtggtatctagaagagtgatatttggggtacatttcagagctgttctccctccttggggtgaggcatccttgagaaacatgagccagctgaggtgggagatatttttctaggaaaaacaatgcagatttttatatctgggaggactctctgaagcattctggtctacctctcatggtgcaactgggaagttgtggccctgcaagggacctgcccaaggtcagagaatggggctgtgaaggtctgggagataacccaggcctccacctccagcccaggtggctgacctctgctccatttcttggtcactgagtccctgcaggaagctaaagggcctttcagctcgtgccttctctggggcctcccacatgccctctttcctctatttgtctccagggcacccctggtgccaatcttctccttcggggagaatgacctatttgaccagattcccaactcttctggctcctggttacgctatatccagaatcggttgcagaagatcatgggcatctccctcccactctttcatggccgtggtgtcttccagtacagctttggtttaataccctaccgccggcccatcaccactgtgggtaagtccaggaccaggctgggagggaggaggccaaagggacagggcaggttgtgtgctgcaaggggacatggagatgagccagatttattcctgccctaatggggctcacattctagactgggaaacatacacatacaagcagatagaatagaagacagtctgggataggaactatagcagaggtgccaacagcaatagttgtgactaattgctgagcacctgctgtgtgccaggcactacactagctgccctacatgaagcaactcagcttatcctaacaatcttcatggcaggatttttttttaagagttttgctcttgtcgctcagcctggagtgcagtgagctgagattgcgccactgcactccagcctgggctacagagcgagactctacctcaaaaaaaaaaaaaa

SEQ ID NO: 61628 - DNA, 2205 bp, Homo Sapiens
aattgaatcatgggtgcggtttcccccatcctattctcgtggtagtgagtaagtctcacgagatctgatggttttataagggattttccctttcacttggccctcattcgctcctgcctgccaccatgtaaggcaaacagattaccagaaatacagcagccactttgcagaaaggaaggattatgtcaaatagttagaagattcccagaactgcaacttccagtgagtccctctgtgtgtctggatcagggaatgcaattaaagccgagtacttcgagtcaccttttaaaaacagtgaagccacgtgtgtggaaaccaggggactggagtcgtgaacagctgaatgaaacgacagtccttgctccacatgaaacaatctttcgagccgaagatctatctgtgattcttaaagcgtatgtgttggtgacgtccttaacccctttgcgtgcattcattcattcgactggcacagtttggaatccaccaaagaaaaaacgcttcactgtcaagctgcaaacattttttgagacattcctgagagccagttcacctcaacaggcttttgacattatgaaggaagcaattggcaaactactgctagccgctgaagtattcagtgaaacatctactctgggaccaaagaccttccatagatgcagattctgctttcaacttctaacttttgatattggttatggcagtttcatgtaccctgtagtgctccaggtacacgagcatttaaattttcaagattatgataatatggattttgaggaccaaaatacagaagaattccttttaaatgacactttcaattttctcttccctaatgaatcatcactttccatattttctgagatatttcagagactttatagatcagatgttttcaagggtgaaaactatcaaaaggaactaaatcagtgtctgtccttagaagaaattaactcaattatgactttcataaaggaacttggaagtctgggacaattccaactgctcttcccatctactactcctgggattcagtcactgatgcatgaattttatgatgtggcaaatcctgtgggaaatcctggctcagtcctgacccaatactggtctcttttaaatgtatttgaacaatttcagttcatgaataaaaagacacagccacatccactggaatggaattctttcacagaagataagaacattgaaaaaccacaagtgccatttgatgcaatagaaaataaaaaagctggagttccacaaattaaaaatgaaaataaagaaatacattgcagtgatgatgaaaacacaccatgtcatatcaagcagatcttcacacatccacatttggaactaaatcctgactttcatccaaagatcaaagattattactgtgaagtcccatttgatgtggtaacagtgacaattggagtggaaactcctaagtgtctgtgcaaggtgcacctgtacgagcaggcagggccaagctttgccagctaccctctgggcttaggaatgaacaaaatctcaatatttgttgtggatgaatctccagcacacggtgagactctgatcacgtacaaactcaccatctatagagaagaccgcccaagtctgcccttgtttgaggccttcacagcatgtggttttgtgcaggattgtggtttgctgattcatccagaggaaacctgtgggttacagcctatttcttctgactacattgaagccattttacagtctgaactaaaaagatgtccatctggggacatgaaaggccagtggattgtgccttgccttagttgttcggacaacaggacgtgtgactggagagaaataacctggcagccccacaactgccaatatggtgtcctaactaagcctcaactccagcagtgcctgggaggaagggagttgggtgtcgatgtccagagagttcctagaagccgtaattgaagacacaatccagtcatcctgggaccctaaatgacctccctgccccacccctgcacataaacctgacttgaatcacctggactatttttctgagagagtaataaactttaattgggtttgacctattccaagttttttgggctatctgttacagtgcttagcttatctcacctaatacagggactatgcaaccaagaaactggaaataaaaacaaagataattaaaccattttataataagcctaaaaaaaaaaaaaaaaa

SEQ ID NO: 61629 - DNA, 1681 bp, Homo Sapiens
gcactcaaaggctcaactccccacaggcgtgtgttgccaggggcagaaggcttggcccctgggtcagcatactctccggacagctcatccctgccagcccaggtccctgcagccctggggctagcacaggggatgcggacctcggcctaggtccccacagctgtggggctggctcgggggacggatctctgctaagcatggcccctgccagctcaggtccctgccactcagtggatgggactttggcggagtgtggggcccctgcagggagggtctagacaagcaacaccaggaacctgaagcctccctggccggggctcagctgtcgccaggatcgcaacagttaagctgcctgcagcaggataagtgagccgatgctgctccttaatcagggacatcgaatcggaggccttgggaggagcagccggctggctgccctgcagaggccaggtctgcccagcaaacccaggaaggtgtggcgtccccgcttcgcggccaagatggtgctggtgctgcgccatcctttgtgtgcccgggaagggcgttccgggagccgggtcgggggctcctgactcgcattgggcagcatgacggtgcgccggctgtcactgctgtgccgggacctctgggcgctgtggctgctgctgaaggccggcgcaggtgcgtggggcgcgggcgggtcctcgcctccccggaaggtgttgtggggcgacagtgcggggacgccgggcgggggtggacgttctgggcccagccctgtcctcagaggctgctggggcagaagcccggggctgggggatgccggggatggatgttggggtgggtgcctccgagaccagaggagccctgttccttggcagggaaggtgtgcacgggccttgcccgatggatggtttagggccatggccctggggtccctggtgagcagtggggccgcctctgcccttggcctgtgagggactgtctgtgctggtcccagaaggctgggatcacctttccactggctcctttgttcgaggtttttcatagacaggctatgtggacaaatgagggcagcgcccacgtctggctggtggaggggctgcggctcctccttggaggggacgcctggccactgctgtccccacaatggggccacccgtggtgcaaggcgtgacaagctgccctctctaggtaagcaggacttgggaggcccctggccaagcctgtggacccggctgggcggcctctgtggtctcaggtttgggtgtgtttggtctggtcagggctcaggggctgctggtccacactggccccatcctgacaattggagctttggggcaaggtccctggagaaggggtcacgtggggaggaaacagcctgggttttgttgatgcttttctaagaatggagtactcgttttcaagagatttgtcctaattatattttccagcgggtacttatgccaagtattgatgaataattcataaaataagcatctttgtgaattttagtgaatcagaccttaactatcaacggcaatgaatgaacatctaaagtttccaattttaaagtaaagaactggctgggtacagcagttcacgcctgtaatcccagcactttgggaggccaaggctagaggatcgcttgagcccaggagtttgagatcagcctgggcaacataccaagacctcatctgtt

SEQ ID NO: 61630 - DNA, 2316 bp, Homo Sapiens
tcaaaataaaattcctgaatttgtacaagccacaggaagctagattgagatcattatatgacaactggaaggccaaggctatgggttacctcaaattgaggaattttggcacctactcacaggctccatgagcagatgaagtagacagctttactcagtatctcagaccaagaacttcatctccatctccaactagctgaaacatcttccctcctcaacctggaaaattctctgacttagaaatttaaacaaaaccctcccctttcattgaatctccattgtctggagtttgcttgttttaatctagcctgttcctccactatgggctccctttcaaactatgccctgcttcaactaacccttactgcttttttgacaattctagtacaacctcagcacctgcttgctccagttttccggacactatctatcttgactaatcagtctaattgctggttatgtgaacatctagataatgcagaacaacccgaactagtttttgttcctgccagtgcaagcacctggtggacctattctggacaatggatgtatgaaagggtgtggtatccacaagcagaagtacagaatcactctacttcctcctatcgtaaagtgacttggcactgggaagcctccatggaagctcaaggtctatcctttgctcaagtaaggttattggagggaaatttttctctttgcgtagaaaataaaaatggcagtggacccttcctaggtaatatacctaaacaatactgtaatcaaatactatggtttgattctacagatggcaccttcatgccctctatagatgttacaaatgaatccaggaacgatgatgatgatacaagtgtttgcctaggcactagacaatgttcctggtttgcaggttgcacaaaccggacctggaacagctcagctgttcccttgattggtctgcccaatacccaagactacaaatgggtagatcgaaattctggattgacctggtcaggtaatgacacctgtctctatagctgccaaaaccaaaccaaaggccttctgtaccagctatttcgcaacctattttgctcttatggcctgacagaggcacatgggaaatggagatgtgcagatgccagcataactaatgacaaaggtcatgatggacaccggacccccacctggtggctcacaggttccaatctgaccttgtctgtgaacaactctggcctcttttttttgtgcggcaatggggtgtacaaagggtttccacctaaatggtctgggcgatgtggacttgggtatcttgtaccttccctcaccagatacctcaccttaaatgctagccaaattacaaacctgagatccttcattcataaagtaacaccgcatagatgcacccaaggagacacagacaatccacctctgtattgcaaccccaaggacaattcaacaataagggccctttttccaagtttgggaacttatgatttagaaaaggcaattctaaacatttccaaagcaatggaacaggaattcagtgccactaagcagaccttggaagcacaccaatcaaaagttagcagtttagcctctgcatcccgaaaggatcatgtcttggatataccgaccacccaacgacaaacggcttgtggaactgttggcaaacagtgttgcctctatataaattattcggaagaaataaagtctaatatacagcgtctccacgaagcatccgagaacctgaagaatgtaccgttacttgattggcaaggcatatttgcaaaagtgggagactggttcagatcatggggctatgtgcttttaattgttcttttctgcttattcatctttgttttaatctatgttcgtgtctttcgcaaatctcgcagatcccttaactcccaacctctgaacctagccttatctccacagcaatcagcacagctccttgtcagtgaaacttcatgtcaagtttcaaatagggcaatgaagggactaacaacccatcaatatgatacaagtctactttgagaatatctgaacaaacagcagctgcagacaaaaagccttagctaaactttgatgagtaaagcaggtcttaccgagaattcagctgccaaaaccctcctctgagtgttcctcttataagggcacttagcactaggacctcccaaggtattgtaaataagccttatcagaactttttgtagtttcattctgaagccttaagacacacaccataaagctgatctgtaaacccttaccccttgctgttcagagagctactctttgtagtgttcttgcatgcatatataataaatgttttttctattg

SEQ ID NO: 61631 - DNA, 2519 bp, Homo Sapiens
gaaaatgtgtatgtgtgtatatgtgtgcgagtgtgcgtgtgtgcgcgcgctgtacctctccctgcgtggtgaagccatcagattgtgcgctcactgatccctgttgttgagtctgataagggtgagctcagaagccatcagatcgtggcctcactggtcccagttgtggagtccgatgagggtgagctcagatgctctgtggtcactccctgtgccgtgcttcggggacgctgagatgctgcaccagccaggcagggcggggtgggccccacttccatcgagctcctgcggatgatgagcaccacccaggagccacctggggggcagggcaggggctgaatcccactgggggtgactgtctctcacatgacaggagtccagggcatgcatggaggctcctccgtgtcatctagcgccagctccttctgtcactcctctgtggcctggagcggcctgctgtctcccggtcacgagccagcccgtgggcatcagcaccgcaagagcagggtccgtccatcttttgaggcacccccacccccgccacacagtgccttctgtttcctctcattgggcagaatcgtgtcatgtggccgcccagttgcaagggagcccgggaagggtgcgtgggccctgtccagcagacctggctgcttgtgataatgccatcagtggccctgttgtcactttggccttgcttacgttgccgattaggttaggaaatggtcttgattctgggatatgtgagcctgaagttaccaatgtaaagcagcacctaatacatgttttggccaaatgggcatttgttaaaaaaaacaacaaggtttggtcagagctcaatgtcaccatctttggacaaatttatgtgatataagaatacatcagagattttattgaaaaatatattgcaatttcatcattacatactttaatggcaaaatatgctattaacagtgcaaggccaatatgctccctgttgcagctgcccgtgaggtggccttccccagggacgctgacatgtctgccacctccagcatggccgtgcagaagcaagacgtccatgggcagctccaatggtgacgttgcctgcacgccacctagctgagcaggaacagttgtattggaggcgtgtgggtgacgagagagaggttaacggctggtgtttgtgtgaaactggagacaaatgaggactgggcattgtgtctacgtgggcgtgtgcaacaactgcgtgcatgacagctgctgtggatcacatgggctcatgagtgtgcctggtgtccacagatgtgcacagtggtcataagtgtgcagtgttggtgtgtgtgcacagtggctgtgggtgtgcgtagtagccataggtgtgcacagcggccatgggtgtgcaaagtagtgggtgtgcacggtgctgggcgtgcacagtggccgtgggtgtgcactgtggtaggcgtgcacagtgcctagatgtgcacgctgttggtgtgcatggtgatgggcatgcacagtgggtgtgcacagtggccgagggtgtgcatggtggtggtgtgcagtgtctgggtgtgcactgtggtaggtgtgaacagtgggtgtgcatggtggtggccgtgcacagtgggtgtgcatatcggtgtctgtgggtgtgcacagtgtcttgggtgagcatagtggtgggcacgctgcatagggtgggtgtgcgcagtggtggtgggtgtgcacggtggtgggcgtgcacggtggtgggcatgcacagtgggtgtgcatagtgactgtgggcgtgcacagtgtgggtgtacactgtggtaggtgtgcacagtggatgtgcacagtggccgtgggtgtgcacagtgtctgtgggtgtgcacggtggtgggtttgcacagtgactttgggcatgcactgtcttgttctgctgcagtgctggtggcgtagtgtccacaggctggctgagcactggtggcagctgcggtgagtgttgcttcttgcctgatgggacttctttggtgttgctgctcctcccttggttggggttttctagagccctgagcgccctcacactgaggtcagcgctgttatctgtgagaagaagctgtgtcaggctctggtgacacacacttcaccctgccaagccccccagtaactgctgtggaccaggcagcaagaagatttgccctgagcggcgcaaggggcaggacccatggctggggctccacactcagggtgtctggctccttcattaggtgatggcttcgccgattcactctcacttgctctccttttcctgtttcttgggcctctcctcgcctggccacctgaccaaaagattgctttatgtgatgtgattcatgtaacaagtgcttctgccttaaacccagagtctgtgccttggctcacgcctgtgatcctaacatttcaagaggcccaggctagaggatggcttgagcccaggaattcgaggctgcagtgagctatgatcacgccactgcactccagcctgggtgacagagcaagaccctgtctctaaattt

SEQ ID NO: 61632 - DNA, 1570 bp, Homo Sapiens
aaggttccgcgccgggcgtggacggtgtggggcggtcccggccccgcagatcctcgttcctagctgcctgccagcgtcctcggcccggccctgaggatggacccaggagatcccgctggtgaccctgccgctggcgagcgccaccgcatgggcacccacaggcttctacagcctcttctccacctaagcagagtgggatgttttcaaagtgcaacaccccagctagcagggcccctggaacagcctcggcgccccctggaacactaatggccctccctggaacagacacggcacccccaccgagaacagcctcggtgccccctggaacagcctcagcaccccctggaacactaatggccctccctggaacagacacggcacccccaccgagaacagcctcggtgccccctggaacagcctcagcaccccctggaacactaatggccctccctggaacagatacggccccccgccagaacagacatggtgcccgctggaacactaatggtcctccctggaacagcctcggtgccccctggaacactaatggccctccctggaacagacacggcgcccccccacagaatagcctcgatgccccctggaacagcctcggtgccccctggaacagcctcggtgccccctggaacagcctggtgctcctggaacagacacagcccccccagaacagacacagcaccccctggaacagcctggcgcttcctggaatggccacatccccccatcctttctgtgctgctttaggcatctgcccttacgtggttcgtgtccagctctgtcaacaaggccagctccacaagaggccccagctcagccctccccagtgggctcccctactcaggctctgggtcagcttcttcccaggaggtgtcctggcccctgtgctggccccgcctcgctgcctggacacctgtccgtgccaccctggtcactgagcaggacatccgcgtctgtggcccctgggaccctgcccccgacagccaggcctgggtttgtccttttaggtagagtgcctggtccaggtcattggaggagagtccacatggccacctctggcgtgttctagagaggccctcccgcgctgggtcaggaggcagcatcgggacaggagaagggggctgagctcctgttcctctctccctcccccgaggccaagaaacattcccatccgaatgtccactgcgctcacagattcctttcctcctaaaacttcagccttggccaggctcacggccaggattatggtggctcacgcctgtaatcccagtactgtgggaggccgaggcaggaggatcacgaggtcagaagatcgagaccatcctggccaacatggtgaaactctgtctctactaaaaatacaaaaattagctggacatggtggcgggcgcctatattcccagctactggggaggctgaggcaggagaatggcttggaggcagtagaactgcttgaaccctggaggcggaggttacagttatccgaggttgtgtcattgcactccagcctggggaacagagcgagactccatctcaaaaaaaaaaaaaaaaa

SEQ ID NO: 61633 - DNA, 1076 bp, Homo Sapiens
catgcgccgggtcgtacacggcggccgcgcgcacgctgggggcgtggctgcgcgatgtaatcggtctctggacgctgcgcggcgctcctaggagcaggcgttcccgactccggcaagagggtggcgcctggactctcgccctcagagggaggcccgtcccacggtctgtggctacggatcccaggaccctcttcgcgggcgattcgcgtagcctcaggtaactgcatcctgcccagcatgacggccccctgcccgccgccacctccagacccccagtttgtcctccgaggcacccagtcaccggtgcatgcgctgcacttctgcgaaggagcccaggctcaggggcgcccgctcctcttctcagggtctcagagtggcctggtacacatctggagcctgcagacgcggagagcggttaccaccctggatggccacggcggccagtgtgtgacctggctgcagacgctgccccaggggcgccagctcctcagtcagggccgggacctgaagctgtgcctgtgggacctcgcggagggcaggagcgctgtcgtggactccgtgtgcttggagagtgtgggcttctgccggagcagcatcctggccgggggccagccacgctggacgcttgccgtgccagggaggggcagcgacgaggttcagattctggagatgccctccaagacgtcagtgtgcgccctgaagccgaaggcagatgccaagctgggcatgcccatgtgcctgcggctgtggcaggccgactgcagctcccgcccactccttctggccggctatgaggatggatcggtggtcctgtgggacgtctctgagcagaaggtgtgcagccgcatcgcctgccatgaggagcccggcctctgaggaccagcaagtcatggcccaaggaccatggagtccccgctgtcttcatgaggttggtatttccttttgtggagtgcctcatcacaggacggtgactctgggggccagccagagccctggccgtccgaggcctgcaggagacgttggcttgggcctgctgtgttgccagctgagggtattttataataaatttccattgc

SEQ ID NO: 61634 - DNA, 1590 bp, Homo Sapiens
cccgtccgagccccggccccaagtaacgccgccgccccggagccgccttggaggtccccctccccactaagtgcctctttgcatagcaccagtccccacccgcacgctctctggaccactacagctggacgggcaatggcgggtcggggaggcgcacgacgacccaatggaccagctgctgggaacaagatctgtcaatttaagctggttctgctgggggagtctgcggtaggcaaatccagcctcgtcctccgctttgtcaagggacagtttcacgagtaccaggagagcacaattggagcggccttcctcacacagactgtctgcctggatgacacaacagtcaagtttgagatctgggacacagctggacaggagcggtatcacagcctggcccccatgtactatcggggggcccaggctgccatcgtggtctatgacatcaccaacacagatacatttgcacgggccaagaactgggtgaaggagctacagaggcaggccagccccaacatcgtcattgcactcgcgggtaacaaggcagacctggccagcaagagagccgtggaattccaggaagcacaagcctatgcagacgacaacagtttgctgttcatggagacatcagcaaagactgcaatgaacgtgaacgaaatcttcatggcaatagctaagaagcttcccaagaacgagccccagaatgcaactggtgctccaggccgaaaccgaggtgtggacctccaggagaacaacccagccagccggagccagtgctgcagcaactgagccccccttgcctgcccgctgcccccgcctcctccgcctgaatgacccgactggaatccactctaaccaatcgcacttaacgactcgggccaccactgggggggcagggggaggggtccaccatgatttctccatataattttgatcataggccggagtgagtcattccacctgcacctttctgtacaaatactaattcaattttaagtcttaagtcacttttttaatatatatgatcttctgctcttcccacttcctcccctttctactgctctcccattttcccttgctgggagtagccacatgctcttgccccccaacccttgtatatggggacagtggggtcagtgcagctaccctttctttcctctcggacagcgaccagaagagcatcacatctcactttgttcggagtggtctttggtttgggcggtggggtagaccttgggaaggggttaggaagggagaggcagctcttccttcagctggctctcatcaggctgcagccccctccccgctcccacctccctgctgggaaaccacagcattatcacagcattattgtgacagccacgaacccattgcccacaacccctccaccctcggtcaccccaacctctggctctgagccctgttctgaccaaatcatgatgatgagtatttgggggtgggtgggtaagggggggagtgggaggggacggaaccaactttttctgtattttgtattgtatgttttcttcaacatgtaaccaatcagtatcttgtcaatatagtcagccgatcgatcgacctcaaaaaaaaaaa

SEQ ID NO: 61635 - DNA, 1041 bp, Homo Sapiens
ttcaatgtaaatgctgtgtcagtagttgtctagggaataatgacaagaagaaaattttgtacatgttcagtacgtaggaaaaagaaagagagatcagactgtcactgtgtctatgtagaaagggaagacataagagattccattttgaaaaagacctgtactttaaacagttgctttgctgagatgttgttaatttgtagctttgccccagccactttgccttagccactttgacccaacctggagctcacaaaaatatgtgttgtataaaatcaaggtttaagggatctagggctgtgcaggatatgccttgttaacaaaatgtttacaagcagtatacttggtaaaggtcatcgccattctctagtctcaataaaacaggagcacagtgcactgcggaaagccgcaggacctctgcccttgaaagtggggtattgtcaaggtttctccccatgtgatagtctgaaatatggctcgtgggatgagaaagacctgactgtgccccagcccgacacccataaagggtctgtgctgaggtggattagtaaaagaggaaagcctcttgcagttgagatagaggaaggccactgtctctgcctgcccctgggaactgaatgtctcggtataaaaccgattgtacatttgttcaattctgagataggagaaaaccgccctatggtgggagcgagacatgtttcgagcaatgctgccttgttattctttactccgctgagatgtttgggtggagagaaacataaatctggcctacatgcacatccgggcatagtaccttcccttgaacttaatcatgacacagattcttttgctcacatgttttttgctgaccttctccttattatcaccctgctgtcctactacattcctttttgctgaaataatgaaaataatagtcaataaaaactgagggaactcaaaggccggtgccagtgcaggtccttggtgtgtcgaatactggtcccctggacccactgttgtttctctaaaaaaaaaaaaaaaaaaaaaaaaaaaaaaaaaaaaaaa

SEQ ID NO: 61636 - DNA, 2051 bp, Homo Sapiens
acatgacgaagcaacatgaattagggggcctcttggccttggtccaaaattgtcaatcagagatgaacataaaggactccagagcagtgggactgtctgtcaaaagactctgtatatcttttgtggatgagttttgtgagagaacagagagaccattgtacctggcacaagggctcttcatgaaaagggagacttactgggaggtgcaagacagtggcatttctcctctcctcttgctgctcagcacagccctggattgcagccccgaggctgagaccagacaaagcccgggaggcagaaagatgctccaagaaccaacactatcaatgtctttgcaaatcctcacaggattcctgtgggtccagctttggaactgggaaacctttcttcggatccgcactcattccactgatgccagctgcccctgaaggatgccagtactgtggtgtgtgagtctcagcagccgcccacacgctcctaactctgctgcatggcagatgcctaggtggaaatagcaaaaacaaggcccaggctggggccagggccagaggggaaggccctggattctcactcatgtgagatcttgaatctctttctttgttctgtttgtttagttagtatcatctggtaaaatagttaaaaaacaacaaaaaactctgtatctgtttctagcatgtgctgcattgactctattaatcacatttcaaattcaccctacattcctctcctcttcactagcctctctgaaggtgtcctggccagccctggagaagcactggtgtctgcagcacccctcagttcctgtgcctcagcccacaggccactgtgataatggtctgtttagcacttctgtatttattgtaagaatgattataatgaagatacacactataactacaagaaattataaatgtttttcacatcaggctgttctttttttttttttggaggcgaggttaaagcattactatttgcaaagcactctgtagctccctgttatggggataggtaactaatcagaataataatgtcactcgcatccacttcttagaacctggctccaaaggaaaataagctgatagactcaatcactttcctgaggatggaggcctatggcatgtgtggctgcaggtcgcgaagctgcttaatggtgctgggaagcctagaggaattaaataaagaccctggaggaggtgggatcggagctgcaccttgaacaaatagctcagatttgaacagatggatggaaaagagggaggtgttcccaaccaaggggacatgatacagggaacaggtcctatgtctctttactcctgagagtattaaacctagtaggtgggcagcccctcttggttgcctgttaccttattttgaattctttttgcaaaacatactatcacccgtccaaataatcttttgtctaaatccagacttcacattctgactggggcaaaaagaggcagtccagtaaaggttataaaataggtaccatcattgtttgccttatttagaaaagcttccaattttcactataatcaccctaagcctgagagaggtgaactgttcaagggtactttggctccagtgggtgacagtacctggcccagctttggaattgaaacatttctgatggtctgtactctgctagaacacaggatgcttctgctctccctgctctggcatcctgccaggtgtcatggccacgcacaggcatgaagacagccgggaagccagagttcccacgaagcactcactccttggacttgctcccaccccactggggagagcactcctggagcaggaaatgagcatctctcatctccctgaattccacatccactggctgaatgatcagggaggcatagcagtgagagccataggtcggcagagggaactcaggccctcctttaggatggccatcacctcatctcaatccagccaaatcaaccatctagagcacacaggccgagagaaatgtaataaaatataacatgagacacgtatgaaatttaaactttccggtagccacactagaaaaaaaaaaaaaaaaa

SEQ ID NO: 61637 - DNA, 2539 bp, Homo Sapiens
gtgaaatttaaactccagtcctgtggcgaaaatgctaattgcactaacacagaaggaagttattattgtatgtgtgtacctggcttcagatccagcagtaaccaagacaggtttatcactaatgatggaaccgtctgtatagaaaatgtgaatgcaaactgccatttagataatgtctgtatagctgcaaatattaataaaactttaacaaaaatcagatccataaaagaacctgtggctttgctacaagaagtctatagaaattctgtgacagatctttcaccaacagatataattacatatatagaaatattagctgaatcatcttcattactaggttacaagaacaacactatctcagccaaggacaccctttctaactcaactcttactgaatttgtaaaaaccgtgaataattttgttcaaagggatacatttgtagtttgggacaagttatctgtgaatcataggagaacacatcttacaaaactcatgcacactgttgaacaagctactttaaggatatcccagagcttccaaaagaccacagagtttgatacaaattcaacggatatagctctcaaagttttcttttttgattcatataacatgaaacatattcatcctcatatgaatatggatggagactacataaatatatttccaaagagaaaagctgcatatgattcaaatggcaatgttgcagttgcatttttatattataagagtattggtcctttgctttcatcatctgacaacttcttattgaaacctcaaaattatgataattctgaagaggaggaaagagtcatatcttcagtaatttcagtctcaatgagctcaaacccacccacattatatgaacttgaaaaaataacatttacattaagtcatcgaaaggtcacagataggtataggagtctatgtgcattttggaattactcacctgataccatgaatggcagctggtcttcagagggctgtgagctgacatactcaaatgagacccacacctcatgccgctgtaatcacctgacacattttgcaattttgatgtcctctggtccttccattggtattaaagattataatattcttacaaggatcactcaactaggaataattatttcactgatttgtcttgccatatgcatttttaccttctggttcttcagtgaaattcaaagcaccaggacaacaattcacaaaaatctttgctgtagcctatttcttgctgaacttgtttttcttgttgggatcaatacaaatactaataagctcttctgttcaatcattgccggactgctacactacttctttttagctgcttttgcatggatgtgcattgaaggcatacatctctatctcattgttgtgggtgtcatctacaacaagggatttttgcacaagaatttttatatctttggctatctaagcccagccgtggtagttggattttcggcagcactaggatacagatattatggcacaaccaaagtatgttggcttagcaccgaaaacaactttatttggagttttataggaccagcatgcctaatcattcttgttaatctcttggcttttggagtcatcatatacaaagtttttcgtcacactgcagggttgaaaccagaagttagttgctttgagaacataaggtcttgtgcaagaggagccctcgctcttctgttccttctcggcaccacctggatctttggggttctccatgttgtgcacgcatcagtggttacagcttacctcttcacagtcagcaatgctttccaggggatgttcatttttttattcctgtgtgttttatctagaaagattcaagaagaatattacagattgttcaaaaatgtcccctgttgttttggatgtttaaggtaaacatagagaatggtggataattacaactgcacaaaaataaaaattccaagctgtggatgaccaatgtataaaaatgactcatcaaattatccaattattaactactagacaaaaagtattttaaatcagtttttctgtttatgctataggaactgtagataataaggtaaaattatgtatcatatagatatactatgtttttctatgtgaaatagttctgtcaaaaatagtattgcagatatttggaaagtaattggtttctcaggagtgatatcactgcacccaaggaaagattttctttctaacacgagaagtatatgaatgtcctgaaggaaaccactggcttgatatttctgtgactcgtgttgcctttgaaactagtcccctaccacctcggtaatgagctccattacagaaagtggaacataagagaatgaaggggcagaatatcaaacagtgaaaagggaatgataagatgtattttgaatgaactgttttttctgtagactagctgagaaattgttgacataaaataaagaattgaagaaacacattttaccattttgtgaattgttctgaacttaaatgtccactaaaacaacttagacttctgtttgctaaatctgtttctttttctaatattctaaaa

SEQ ID NO: 61638 - DNA, 2490 bp, Homo Sapiens
gtcgcctactgtcacggtgttaacctccctctctgtctctctgagtgcgttctctcgcccgtcacccctcttcctttctcggtctcctcctctcccttcgtccgagccgctccttagcgcccagttgcgcaaatcaaattctttcccgttctatttactcctgatcaagaggggctgtcagtccaaccctccagctgtaggctcgtgcatctgccagtctcttggcgcgtggggaccgcgtggaagtgccctcgcgtgtgcgtgccagctgagatgagacgtggaagctggaggggtccggcatcccagagaggcgtgaggctcccaaaccaccacctgctcaggtccaccctaataacatcagccaaggcctctacagcagcccccaagctgcctctggatagttcagacaaggcctctgtgctgtgatggaaccaggtgacccgcagcctccgggccagctactctggcttggctgaggtcttcctagataatcaacatccctcaacagccttggcggtgagaaggcacgtgaaagctgccagcacatcccaggagccttggctgtggcggcttctccttggaaagctccacgcacccttctgccagggatcctgtcctgcagggatgacagacccagcagcctcggcagagggaatgaggctccagcagcttcatcagcaagtggccaggcccagccctaagtcacagactgtcagaaggggacaatggtaggagagagctgggctcagggtctggagcctgccacatgccacctgcacggctttggatacactccctccttcatctgtggaacggggaatggggataacaccctggcccaagggtcacacagaaccaaaaggaagctacagcctaaggaagaaaccctgctatgggactgtggctgctctggactgcgcaggctgccaggaaggaatggcggaggcagcctccgtgggccttgcacagagtgagagcaccacaattatgggccatgtgtgcgcagagagacacacccatgaccgatacgtaacaagcatgtgcccctacctgccgctgccgatggatggaaatgcaatggatttcagcttcttatcatcagccagggccaagcagtttttcactgtcttttccagaagttcttcacacttgtctgcaccccaaactggactattacagtggatcacaaacttggcaggcaggccatggcctgcgctgacagcagctagtggtgcggggatgaaacagaaacagtgagctctggttcactgcaaagcacaagatgccaaacacagacccactcccctgccacggtatatcttcctgggccctccaatgccctgtgtctgaggagttccacagctgtctgctgcgttgtgattccaacgtgagctggagccaagccacacccttggaaagttggcattatgatgtgtcaccaccaggaattttgaccaagttcgtagtaagcctctctccactctcagaaagcatacacggttctcccagaggcagagccttatccatcaaaactcaactgaacgcaaactcaacgtgtcagaacatttgcagcctcaaaataattgttttgggtttccaacccttcttcttcaagtcgactggtgtgctaattatcgacttgcacaccaatatgatatatttgtctctactatgatgtattctctaaatctcccaaacccaattcaggacaaagctactaggaaagcaactgctttaaatgatctgctaagcaacctgaccagcatctccactctgccattgtcttctccctgctgaggatggcctcactgtgtgaataacggatcctgtttatttgtggcagaattagattagtttttaaggaactgtgtttttcttttcctagaagaggggcccctttctagctatacatctccaccaaagacttgcctttcccttgccagatctaaggacacaggcctggggtctgccacaaactgcaaagtaccatgtctcccagagcatgttccagaacccctgtccacagatgctctgcaaagaaggtttccagggcactgggtttagctgcatgctacgcttctatacaagagcacaccagagtctccacaccactgctaaagtaaaacatccaaactttttgcatttggttggctatttctgaaactttttttttttttaaggaatatctgtccaaggggtatggtttgttatggtcgtgtcatagatactggagaaggagcgatttgtgggtagtgtctcatggtacagtggaaacagctcagtcacagggtgtgaatttgagtcctggctctgctttgtgactgggcttgagaactctgggctgacctataaaaacctgacattgggggttgaattaaaccagtgggtttgtccccatgagaagtcatggctaaactatgcatagaaaacgactggaaagaaacattaacagtgactatctttgcacagtgaaaaaaaaaaaaaaaa

SEQ ID NO: 61639 - DNA, 2273 bp, Homo Sapiens
ttttccccggcgtggtctcactcgcgatttaaggcataggtgtcgccgagccgggaggctgggagtcgccaggcgtgcgggggagaggcctgggccgcgccgcggcggggggtggaggaagagggcaggcgaggcgggaaggtgggctctggccgccgggagccggggacggagccgccgccgttgcccctagcggggagcagccgggaggagggggccgcagtcgggagaggggaccccaccatgcccaaagtcttcctggtgaagaggaggagcctgggggtctcggtccgcagctgggatgagctcccggatgagaaaagggcagacacctacatcccagtgggcctaggccgcctgctccacgacccccccgaggactgccgcagcgacggcggcagcagcagcggcagcggcagcagcagcgcgggggagcctggaggagcagagagcagctcgtccccgcacgcccccgagagcgaaacccccgagcccggcgacgccgagggccccgatggacacctggcgaccaagcagcgcccggtcgccagatcgaaaatcaagttcaccacaggcacgtgcagcgactcggtggttcacagctgtgacctgtgtggcaagggcttccgtctgcagcgcatgctgaaccgtcacctcaagtgccacaaccaggtgaaaagacacctgtgcaccttctgcggcaagggcttcaacgacaccttcgacctgaagaggcacgtccgcacacacacaggcattcgtccctacaaatgcaacgtctgcaataaagccttcacccagcgctgctctctggagtcccacctgaagaaaatccatggggtgcagcagcagtatgcctataagcagcggcgggacaagctctacgtctgcgaggattgcggctacacgggccccacccaggaggacctgtacctgcacgtgaacagtgcccatccgggcagctcgtttctcaaaaagacatctaaaaaactggcagcccttctgcagggcaagctgacatccgcacaccaggggaataccagcctgagtgaggaggaggagaggaagtgaggagaaggaaggggaggacagacgttcacactgccacgtatgtctacgtggatttttggttttcagcttcccccaccccactggctcttcttaattagaagtgaccagttcacctctgtgtccttttgaaacatcagcagtagggtccattccaagattgtcagttaccgttagtgacgtcaggccctgtaacctgtgtcctgtctggcgcagttgctcacattcaccaaagtttgttttcatgatcctgatggccaagaacaccgtgtgggatttttttttcccccaaggattttcacacacggaaggagaggtatttcttagagagatcatcattttatggtgccttgaaataaaaatacttctacttgaaatgctgtttaagcaaggcaagtgaattttgttattctgaaagagtttacagaaactattttaataaatgaaatgttcttgtgaagcttttaaaagcaaaatggaacattgacctacagctctctgttcagggcttattgtgtgatgtttaacttcaggttattgaggtggggaggttgattactttatattagttgtgtgggtttgaagaagcagatcttcctctctttttttgtttttgagacaagttctcactctgtcacccaggctggagtacagtggcatgatcatggctcactgcaaccttgacctcccaggctcaggtaatcttcccacttcagcctcccgagtagctgggactataggtgtgtgccactatgcccagctaatttttgtattttttgtagagatggggttttgctagaatgtgtgtattcttgctgtccactgtttcttcttcttttagcattttaattagcagatagcatattatacatactgtttggaactttgcatttttcttttttttaattttaaattttaagtgttgtgggtacatagtaggtgtatatgcatttttcttttaatagtacatctagtggttctttccaaaatagtacaaaaaagtgttctcatacaaaaaaattagccgggcatggtggtgtgtacctgtagtcccagctacttgggaggctgaggcaagagaatcgcttgaaactgggaggcaggggttggagtgagccaggactgtgacactgcactccagcctgggcaacagagtggactccatcgcaaaaaaaaaaaaaaaaagtgttttcattcttctttac

SEQ ID NO: 61640 - DNA, 2209 bp, Homo Sapiens
acagctagggctgctcagtaactgccccaaccactaccacgtccccaagtgcaacgggacccacggaactacaggtgtggggcagggtgagcgtggaagaagggacgcggatgggggtgcgctttgcagacgatctggagactgctgtgtgttgagggaagatacgaagtcgcgggagcagttggggactcaatgtgtgggcaacaagggtcctgctgagctcaggagctgcacggaatggtggcagtcaccttgccagtgcagcaggcatggatcagactgcaagctaggggcacgaggcatcagttgggaagaggggacgcacagctaggcttgaggcctcttcatcgggatgtccccaggccccccagcccaggcccagcataaaggccgtgttggggggcccccctgacccaaggggggcttcatgcgccacgtgcaggcggagccgtctccatcctcagagccggaggctggcccttcacagcctccagtcaggcagggggccctccagggtggcctgctcatgggctacagcccagcagggggggcgacatcccccggggtctaccaggtatccatcttttcccctccggctggtacctctgagcctcatagggccctgaaacgacaagccccatccactgagggtccccgggagctgaagagaggccctgggctgggggccagagagggactaccccctgaagaaccatctactgtggggctcttaggcccagagggaccggggctgggactaggtgtggccagccagcatttctcccaccgtggcctctgtgttgtggaacagagaagtagtgtcacctcatcttggacttcaggggcctggagtcccccctgccccccatcaaatgcttcctgcaatactttgcacaccagagactgggcctccccagatccagggggacaggggtccctgggggagtccccagggccagcccctccaggccagctgcacacacttgacactgatttgcacagtcttgcacaaatagggggtaagagcccagtggctggggtgggcaatgggggtagcctctggcctagggagtcccctggcactgccaatgggcacagtcccgagcacacaccccctggccctggacccccaggcccctgccccaccaagcgaaggctgcttcctgctggagaagccccagatgtcagctctgaggaagaggggccagcccctcggaggcgccggggatccctgggccaccctactgctgccaacagttctgatgccaaagccacacccttctggagccacctgctgcctgggcccaaagagcctgttttggacccaacagactgcggtcccatggggcggaggctgaaaggagcccgtcgcctgaagctgagcccccttcgaagcctccggaaggggccaggcctgctgagcccccccagtgcctcccctgttcctacccctgctgtcagccgtaccctgctgggcaactttgaggaatcattgctgcgaggacgttttgcaccatctggccacattgagggcttcacagcagaaattggagctagtgggtcatactgcccccagcacgtcacgctgcctgtcactgtcacattctttgatgtttctgagcaaaatgccccggctcccttcctgggcatcgtggatctgaaccccttggggaggaagggttacagcgtgcccaaggtgggcaccgtccaagtgaccttatttaaccccagtcccttcacttcccctaccctctgacctatctctgaaagccaagttatgcgtatgtgtgtgtgcacaagcttgtctttgtgtggtatgtgtgtgtgagtgtgcatgtatgcacacacacaggggttaaccacccctcacctagggctccagactccagttgtccctctcctcctacctgtgtctccttgttttggggtcctgactgaagaaggtgtccagggggcagagtcagggccaagcactggggtgcctcctctcacctggccagactctgacccacctacctcagctggggtgaggggcacccctcaaactcagtcatgtggttccaaactaccccattccccactccagactctgacccagcctcagtcctaactcctggggctgggctgaggggaacaagcatttgctgaaacttgaaaaaacaaagcaaatcaaaaacaggaaaaaattgtacctggtacttttttttag

SEQ ID NO: 61641 - DNA, 2134 bp, Homo Sapiens
agaaggaaagttcctcaacataacagaagccatttatgaaaaatctacagctgatggaggaatattttccaagcaaatggaaagcaaaaaaaaaaccagggattgcaatcttagtctctgataaaacagactttaaaccaacaaagatcaaaagagacaagggcattacataatggtaaaaggatcaaagcaacaaaaagagctaactatcctaaatatatgtgcatccaatacaggagcacccagtttcataaaaaaagttcttagagacctacaaagagacttagactcccacacaataatagtgggagactttaacaaccccgtgtcaatattagacagatcaataagacagaaaattgacaaggatatccaggacttgaactcagctctggaccaagcagacctaatagacatctacagaaccctccaccccaaatcaacaaaacatacacttttctcagcaccacaatgcacttattctaaaactgaccacttaattggaagtaaagcactccttagcaaatgcagaataagggaaatcataacaaatagtctctcagaccacagtgcaatcaaattagaactcaggattaagaaactcactcaaaaccacacaactacatggaaactgaacaacctgctcctgaatgactactgggtaaataacgaaatgaaggcagagataaagatgttctttgaaaccaatgagaacaaagacagagcatatcagaacctctgggacacatttaaagcactgtgtagaaggaaatttatagcactaaatgcccacaagagaaggcagagaagatctaaaatcgacacactaacatcacaattaaaagaactagagaagcaagagcgaacaaatccaaaagctagcagaagacaagaaataactaagatcagaacagaactgaaggagagacacgaaaaacccttcaaaaaatcagtgaatccagagttggttttcttgaaaagatcaacaaaataaataggccactagccagactaataaaaaagaaaagagaagaatcaaatagatgcaataaaaaatgataaagggaatatcaccaccgatcccacagaaatacaaactaccatcagagaatactataaacgcctctacgcaaattaactagaaaatctagaagaaatggataaattcctgtacacatacaccctcccaagactaaaccaggaagaggtcgaatccctgaataggccaataacaagttctgaaattgaggcagcaattaatagcctattaaccaaaaaaaagtccaggaccagacggattcacagccaaattctaccagaggtacgaagaggagctggtaccattccttctgaaactattccaaacaatagaaaaagagagaatcctccctaacttattttatgaggccagcatcatcctgataccaaaacctggcagagacaatagaaaaaaagaaaatttcaggccaatatcactgatgaacatcgatgtaaaaatcctcgataaaatactggcaaaccgaatccagcagcgcatcaaaaagcttatccaccacgattaagccggcttcatccctgggatgcaaggctggttcagcatacacaaatgaataaacataatccatcacacaaacagaaccaatgacaaaagccacatgatatttacctgtatacctttttaagtacaaataaatctgggctgtcattatttatgctaacactggttttgtgtccctggaatctatctatctaagtttttttttctttttttctttttccattttccagtacctattagacagaatggctttcaattttttctcttacttccaaacttagtcattataagaagatgtaggccaggcgcagtggctcattactgtaatcccagcactatgggaggctgaggcaagtggattacttgagtccaggagttcgagaccagcctggccaacatggtgaaaccccatctctactaaaaatacagagattagcagggcatggtggtgcatgcctgtaatcccagctactcaggaggttgagtcaggagaatcacttgaacccggaggcagaggttgcaggcagattgtgccactgcactcctgcctgggaaacagagcaagactctgtctcc

SEQ ID NO: 61642 - DNA, 1214 bp, Homo Sapiens
cacccagaggctgatgctcaccatggggcgcctgcaactggttgtgttgggcctcacctgctgctgggcagtggcgagtgccgcgaagaccccatgctgcactatgtgggcttcgtccctgtcattgatggagacttcatccccgctgacccgatcaacctgtacgccaacgccgccgacatcgactatatagcaggcaccaacaacatggacggccacatcttcgccagcatcgacatgcctgccatcaacaagggcaacaagaaagtcacggaggaggacttctacaagctggtcagtgagttcacaatcaccaaggggctcagaggcgccaagacgacctttgatgtctacaccgagtcctgggcccaggacccatcccaggagaataagaagaagactgtggtggactttgagaccgatgtcctcttcctggtgcccaccgagattgccctagcccagcacagagccaatgccaagagtgccaagacctacgcctacctgttttcccatccctctcggatgcccgtctaccccaaatgggtgggggccgaccatagagatgagatccagtacatctttggggagccctttgccaccccactccgggctaccggccccaagacaggacagtctctaaggccatgaccgcctactggaccaactttgccaaaacaggggaccccaacatgggcgactcggctgtgcccacacactgggaaccctacactacggaaaacagcggctacctggagatcaccaagaagatgggcagcagctccatgaagcggagcctgagaaccaacttcctgcgctactggaccctcacctatctggcgctgcccacagtgaccgaccaggaggccagttccatgccctccacaggggactctgaggccactcccatctcccccgacaggcaactccgagtctgcccccgtccctgcaacgggtgactctcaggatgcccctgtgcccctcacaagtgactctgaggctcccccgtaccctacgggtgactctgaggcccgtgcccaccttgggtgacactgaggctgcccctgtgtcccccacagatgactccgaggaagctcagatgctgcagtcattagtttctagtgtcccatcagccttggtctcaagaggccgagagggtgcaaccccaggggctcccctcccatcttgagctcttcctgaataaaacctcattcccc

SEQ ID NO: 61643 - DNA, 6834 bp, Homo Sapiens
  misc_feature (4613)..(4614): n is a, c, g, or t
ctcacacatagacacgcacacacaccctttctcgcacacacacacacacacacacacactctcacacattctcacatgctagacccttctaagcagcttgtccgtttttacacatgtatctgaactctcctgcatcactcttggccattttctcgcattcgattgcttttgccgttttttatttagatcagtacttgatttcattttcattttccagtctactttggggttctcgcagtggataatttagccaaaatgtttttcttgtggagacattagctgacaattcccaccacagactggcttgtacgtcctcccagggagacctaaacctggctcccctcccaccgcagttcttaatattgtggataagagatccatctttctcattctggatacctacttagtgctcatggaagaaggggtgccctgcccagccccagctgctaagctcacacctcctgtcaaaaagtcccaggacatgcacgacgagaggagcaagctggtgaatgagtatgcgtgtcgagtgctggaacttctggggatggggcatcgtctgtttgtgcctcggcttctggcgacctcaaaggaagaccttctgcaggctgattttgaaggtgctttaaagttctttagagttcagcttccaaagagatacagggcagaggaaaatgcaagaagactgatggagcaggcttgcaatattaaagtaccaaccaagaagctgaagaaatatgagaaagaatatcagacaatgcgagagagtcagctgcaacaggaagacccaatggatagatacaagagggagaaccgaagattacaggaggccagcatgaggttggaacaagagaatgatgaccttgcccatgaactagtaacaagcaaaattgctctacggaatgacttggatcaggcagaagacaaggcagatgtgttgaataaagagctccttttgaccaaacagaggctggtggagactgaagaggagaagaggaagcaagaggaagagactgcccagctaaaagaagtcttcaggaaacagctagagaaggcagaatatgaaataaagaagactacagctatcattgctgagtataaacagatctgttcgcagttgagtaccaggctggagaaacagcaagcagccagcaaggaggagctggaagtggtaaagggtaagatgatggcatgcaaacactgcagtgacattttcagcaaggagggtgctttgaaactagcagccacaggcagagaggaccagggaattgaaacagatgatgagaaggactcacttaagaagcagctgagagagatggaactggaactggcacaaaccaaactgcagttggtggaggccaagtgtaaaattcaggaacttgaacatcagagaggagcccttatgaatgaaatccaagctgcgaaaaactcttggtttagcaaaaccctgaactctatcaaaacggccacgggcacccagccattgcagccagcaccggtcacccagccacccaaggagagcacatagttccagccttacccaagcacaagagcacaatgttcaaaccaatggaaatctgggaggattcttcctggtgtccctttgaaggaaagtcaaggaggccagaaaacaagccagaatttttcagtagctctcactctttcttgtatgacacttttcaaagggatgctatttaaactgacctgttctatgttgaatacctattttccagcttctggaaggccatgttcagatccatcatagtattacacattattttgtttgcctgatgtttagttggaaataagtaattcagaactaaatgcttttttatttagaattattcataattatttttatcttacataaaaatggagacatctgttattccaaggttgaagtgataagaagatctttgtcacaggaaaaaaaaaaattgaaacctaaacatcttaagttttcaggatttattcagataaagcacactgtggggccaggcatgaccactctcaggtttcctcctgagcctgattcccagggaagtgttaatcctgtccaaaggaaagaaccaatcagcgatcattggtttactttcattttctgttcggtacatctggaaatgaagtgccaggaatagacgggctgttcagattatacgctaggtaaaaggaactgaaattttaataagtgtaggtcaggatcatttgggctgtggtattctaacagatccttttaagaatgccacataggacttgtgagttcctaagtacaccaaagtatggacacagatgtgacttctggcaattataaagttaaaggtggatattgcaccttacagacttagggagcctttaccagagacgcctaaaaagccccaggttcagccattgtgctgaatagagtggaatatagaaccagggacagagtatttcatttaacgttgatatatacttgctaaggaaacactaacaatactgtaactttgttaaaggacatagtattgaaatgggaaatagaggtcaggctcacatcatcttagtttaatgctgggcaacttttttctgatttctgtagttccctgaaaatgtgtccttcgtacccataaagagatacaaatgcatttgtaacatttttgattgaatataaaacctttacagaaatacttatctcatggaaaggtaaagctattgtttaaaaattagtggaaatattttttcaattatatttaacatgcctataaaaatagtccttgcaggaaattatttgataagagcaaaactatttttattttataaactattttggaggcctctgatcctttcaaaccaaccaaactactattagatatgtacaataacatttgttgatattaatcattggcctcattgttgaacatattatttgcaaagaatcttaaactctgtagtgccagaatgattctcatctgtgccatattttgcaattaaaagtaacacacccttagaagaatcaaataagagccatctacatcccaggaggatgcaccaagttgctcacagtggatcttttcctctaaaatgatcttttatgttctaaaaagtgaaatcccctttatctgtgtttatattctctacagcccataaaactgatgtgattgttatgttatactcatcagataatacttttcttacataaatctttcattgttgttctgacatctttcattacaaaatttattttcttaacaaaaaggaacataacccagcattccaagtgtctgtgttggctttaacattctctacatggtggtctagataagctaattttttttttttttttttttgtaaaatgtaatagctagaaaatgttatcttcgcgcttgtttttgtaaatcatttagtataggctgttagctttactggtactttacgctttgattccaagaagccttgtgcagttgccttatcaaatggccagctaaattaaagatgctcttttgtgttgtgaatttcatagttctgtacagagcttgtttcaatttacaaaaataagtacattccacagaatgcctaaattgtgtaattttctttaaataatagtaggtgagggagaaacataatggctctaggtcaatcccttatctaaagaccttgttcaacttcatagtccctttccttttaaagaggagaagagaaaaatcccccctggccaggcatggtggctcacatctgtaatcccagcactttgggaggctgaggtgggtggatcacctaaggtcaggagtttgagaccagcctggccaacatggtgaaaccctatctctactgcaaaatacaaaaattagccgggcttggtggcgggtgcctgtaatcccagctactcgggaggttgaggcaggagaatcacttgaacccaggaggcagaggttgcagtgggccaagattacggcattacattccatccagcctgggcgacaagagcaaaattccgtctcgaaaaatcaccaggtacatacctctcaagtttgataagtccatcttttgagttttcttttagctctttcaaaagattacgagggcaatacatattttttttttttttattctccagccccatatcatacttgggtatgcctgttggtaccataagcctaaactctccttcactgcaatgcctttgagtcagtagcaatagtaaagactagaaacaaagaaaattcagaatttggtatgtgatatgattgttcatacaatatgttataatagcaatattccaaacaatatgtccttcactgtctattgttggaaaactcatgcatcccagcatgaagtaactcctagttttaattttagttattttgagatatatttgagaattgcatctcttctcttgaatttcacttagaagagattaaccagccaaatatccaggaaagtttcaaaacattctagtgtttttcatcctttgctaggatgcactctgtacaaaacattcctctgaaaatctaatatttgcagtatctaagaattgatcatttctattttcattaaattctgtggaaaaaattaaatgaatgaaattcaacttcataattcagttcatcagcttttgtatcttgagaatctaaacacgtctnnaaatctgaaagaaaccaagctggattttgcagtgcatatgtttgctagcttcccacatcctgaaccatgtcaaaatttggttttatttagttacatataatttaatgcaaagaaattctgttacttaatgttctgtttatttatgagtgcctatcaggaacactaataggaatgccattcaaccagtgtcttctgcccctctcccagctgttaaattagtacttcttcattggctttctgaaatgtcctgagtaaagtagaaaagcaacctttgtatggatgtggggatatttaatagtatgtatcttgtttcatttttttcctatgatgtattaatatttatttttctccaacccctgctccattttcttaaaatattttccagttaataactagttgctttatttcctagctgaagtgagaaaaccaacggaaaacaatacagatttgggcagaggagatagagttacatctttaaaggagtgagccagtcacccaggagaatcacatgtgtaactgatgtaggggtttaagtcttcatactttcactaaaatctgtctactaactctcccaccaacctttgcatcaaacacttaggtacctgcctgattaggggggcccctttaagggaaaaaacttttaaaaaattaaatgccttggttttgttttatcttctgggaaagaacacttttacttgattagcaagatgattatattatataacttgcccttaaaaacactccaaaatactgactccttttctccaattacaaatgagtgtgaagaaattctgttgtatgatttgaacactattaggtttgtatgtgtgtttaattggaagaattttatatagagtatctctgctgcttttgtttacctgggtaccacacaaccaaatacacattgagatttcaagaaatgatgatgaaagccagaaggccagaccacagctctgcagcctgtttcctacaaccagatataaaactctttctcgtcgccatgctgatagtcacactgaactagaactgtcccaacacattcttcctctctcataatggcttccatttaatacaggcaaagccctttaccttagcaaattctttatctttcaaaagtgaccaaaatgaggacttcaaccttggctgcacctcaataggagatgctgatcttgagttgtaatgagaaaagtgggcatataggagattttagtgactgcagtcagctgtctggcattcctttctcagtttgcatctaaaagactacatatgtcaagcttatctccacctgaatttgctgcctgctataaaaacatttcattaatatatcccattcttcctacctccatctctggtttgtcattagtggtattctgaaaagcttaagaaaaaagaatcattgagtagaaagtgaacattttaagttattttcctttttcattggcaattagttaacatgtaaaatcttttccattaaactgtataacttttaataactatatattatatatgggataaaatatatggactgaattgtgagaatataaatgcatcgaaagactctggtgtcatgaaagcacaagaataaggctggagatggtcccagatccaagatgtcccaaaagccttttgtatcagtttctctatttttggtattttgcataatgcatggatccttagttcaaatgagggacaaagtttctcagtcagccccacttcctttctttctaactcctacctttcccttgcagaggaggtagtagagattctggaattgtctatttttatgaattccattattttgtccatggcatctctaatgaaaacaggttctagaataaaggagttgattagtctgaacagtactaattaactacaaaataaacgttagtgatcagcctcttcctctataaacaatgaccaattagacgtttccgtaattccatgtattatgtatagtacactctataaatgtaaatgtaatgcttgtctaaaaagtgcaatttattgtacattgtcccaacaaatgtttacttttataatcgttatgaacttgaattggattagtatcttgtttttatgtgtgaatgaagccttgtgaaataaacaaatgcaactgagaaggtaacaaggtgactgtttttgtgagccagtgatgttttcaatgctttgtgttgcccctttggccccattaagcagtaataaacatttgttctgaagtcc

SEQ ID NO: 61644 - DNA, 1402 bp, Homo Sapiens
ggcacgagcggcacgagcggagggcgcctcgcggcaggagcgggatttccggggtcacgggaaccggcaggggaacgggataaagttcccggagaaaggaaaggagagcgtgggatagtaaaagagaagacgcggagaagaggagaggacctacaagaacggaggacaggggcgcacgatggtcccggggggagcggaaacaaaggcacgcaaaacggaaaagcgtgtgtaggggagcggaaaaggaagtcaccaccgtggcctgcgacgaaatggcgaaaagtcttttgaagacagcctctctgtctggaaggacaaaattgctacatcaaacaggattgtcactttatagtacatcccatggattttatgaggaagaagtgaaaaaaacacttcagcagtttcctggtggatccattgaccttcagaaggaagacaatggcattggcattcttactctgaacaatccaagtagaatgaatgccttttcaggtgttatgatgctacaacttctggaaaaagtaattgaattggaaaattggacagaggggaaaggcctcattgtccgtggggcaaaaaatactttctcttcaggatctgatctgaatgctgtgaaaatcaccataggaatctcccagaggagacttcctttaataagtgttgcgctggttcaaggttgggcattgggtggaggagcagaatttactacagcatgtgatttcaggttaatgactccagagagtaagatcagattcgtccacaaagagatgggcataataccaagctggggtggcaccacccggctagttgaaataatcggaagtagacaagctctcaaagtgttgagtggggcccttaaactggattcaaaaaatgctctaaacataggaatggttgaagaggtcttgcagtcttcagatgaaactaaatctctagaagaggcacaagaatggctaaagcaattcatccaagggccaccggaagtaattagagctttgaaaaaatctgtttgttcaggcagagagctatatttggaggaagcattacagaacgaaagagatcttttaggaacagtttggggtgggcctgcaaatttagaggctattgctaagaaaggaaaatttaataaataattggtttttcgtgtggatgtactccaagtaaagctccagtgactaatatgtataaatgttaaatgatattaaatatgaacatcagttaaaaaaaaaattctttaaggctactattaatatgcagacttacttttaatcatttgaaatctgaactcatttacctcatttcttgccaattactcccttgggtatttactgcgtaattggaacatttactaaaataacacttttggcttaaaaaaaaaaaaaaaaaaaaaaaaaaaaaaaaa

SEQ ID NO: 61645 - DNA, 1259 bp, Homo Sapiens
ggcacgagggctcaatgatgatcagcatcgtaacagggactcttcctcccgcccccagaagttctcttgtcataaacaaggcgagggggtcttcgctgagcttcaccagaggaccacgatttcaccttaagccattcctgacttcagtaccagactgagaccaggcgctgctactgcccaaatgacccctggtcccatctacaaggagcacttttgaggcctcagaacagagccccggggagaaatctgcgatgatcagggtaacctgggtgccgcatcttgctgttcagctgcagcggaaccggccggaccagagctaatgcgcgcccagaatgaagagggagaccgagagtggcccaaatgtcagcgccccgggcctggagatgacagcccgacagcagccatttcacagctggggaaactgagtcctgggaaagtttaaggttgcagccttaagttgttactcattctagacgtttcccctgagggtttggtctttggggaacacgctactgtggaaatggagagaccgcaggccttttcctaggcatttctttttactattctgaaacgcagtctcctgacgtgaaaaatgaagaaaagaacaaatactggccgggcgcggtggctcatgcctgtaataccagcactttgggaggccgaggcgggtggatcacttgaggttaagagttcgataccagcctggccaacatggtgggtgaaaccccgtctctactaaaaatacaaaaattagccgggcgcggtggtgggctcctgtaatcgcagctactcgggagtctgaggcaggagactcgcttgaacctgggagacggaggttgcagtgagcagagatccagccactgcactccagcctgggagacagagtgagaccctgtctcagaaaaaaaaaaaaggccgggcgcggtggttcatgcctgtaatcccggcactttggaggccgaagtgggcagatcacgaggtcaggagttcgagaccagcctggccaacatggagaaaccctgtctctactaaaaatacaaaaattagctgggcgtggtggtgcaggcctgtaatctgagctacgcgggaggctgaggcaggaaaatgcttgaacctgggaggcagaggtgcaatgatcatgccattgcactccagcctgggcaacagagcaaaactgaatctcaaaaaaacaaaacaaaacaaaataaaacaaaacaaaacaaaaaaagaaagagagaaagaaaaaaaaaaaaaaaaaa

SEQ ID NO: 61646 - DNA, 1446 bp, Homo Sapiens
gccgcttttttttttttttttttttttttttttttttttttttttttttttttttttttttttttttttttttttttttttttttttttttttttttttttttttttttttttttttttttgacttagaaatttaactttatttacaaatgttctcctataaacaaagatgccattctacacctttaaaatattgtaactgataatttccataaaaaccatttacatagtttcaacctttctgcataaaactgtattatgagataggcaaacaatctcacaagatggtctgagacataaaaacaaaagacaacctatccagcatcaatgtcctattgacaaactcaatgaagaattaagaatcacactccacaatgtgctgctccaccaagaaatagaaatgtaatgattttttgaaaggtaaatgcttcacaataaacagtcttcttgggtagtacagtgtaattgtgattgtttaggactgctcttgtgggctaatatttacgctgttgtttttttttaaatcatcattgtaaaaagggcagacttatagatttttctgacaatgaaaatctgtagacactggtctggtctcatcattcaggcaaattaataaaataacaagtgcatggaaagaatgttaaacaaaaacataatcatcatgtgactgacagaattctccctgaaatcagagaatattaatactcaatagtatgtataaatttgaatttatagctgagacaatagacaaaataattaaccaaggagcttaaaataaaattattcaaattacctatttatcattttatgtgcagtaattactttttaaaaatccttttaattttatctagggataaccactcacatcatggctaagttgcaaggaacttcaaaactttgaaaaagaatttcatccctgagaagtgagagatagaaaaatatctaaaaaaagagaagcaacagtcttgcacccttttaacaatctcaccacagcatgaactactattaacactgagcaatcagatattccagtcctggagagttactgcctttcatgatctgatcttttgtaatgaaactacaagtgcaacattaaaaaaaaaaacagataaatagaaaccctggttttattttcagctttacatttttgacaagtgcaaggtcagccagctaagatataaatattccaataatgaccaaagtaataacttctactggcatgtcctcttctgagtctccattttctccactgatattcatccaaataataaaagtaacacaattgcaattgagtttactattatcaatggcactctcatcacggttcttacagatcgaataaggttcattagctgtgatttaattcccagctgctgcccaataaacctgtctgccctttggggcagccccagaaaaaaaaaaaaaaaaaaaaaaaaaaaaaaaaaaa

SEQ ID NO: 61647 - DNA, 1621 bp, Homo Sapiens
cggaagccgccgaaactctggggtagagtggcacgcgctttttgcttttccgcgtcttcttcggtggcgatccgcgtcctagaaagggcggtgggctccacctcggcctagaaggccagcgggagccgtaggaagccgtcgcgggaagctcagccgaattggagttggagcccccggattgcgctgaccctgagctctcagactccccagtacaatgactcaagcagaaattaagctctgttctttgttgctgcaagagcattttggagagattgtagaaaaaattggagtccatctgataagaaccggcagccagccactaagagtaattgcccatgacacaggaacatcactggatcaggtgaagaaagccctgtgtgtcctcgtccaacataacctggtgagttatcaagtgcacaaacgtggtgtggtggagtatgaagcccagtgcagccgggtattgcgaatgcttagatatccccggtacatctatactaccaaaactctgtacagtgacactggagagctgattgttgaggagcttctgttgaacggcaaactgacaatgtcagctgttgtgaagaaagtggcagaccggctcacagagaccatggaggatggcaagaccatggactatgctgaagtatcaaacacatttgtgcgactggcagacacacactttgtacaacgctgcccttcggtacctaccactgagaattcagaccctgggccaccaccacctgcccccacacttgtcattaatgaaaaggacatgtacctggttcctaaactcagcttgatagggaaaggtaaaaggaggagatcatctgatgaagatgctgctggggagcccaaggccaagagaccaaaatatactacagataacaaggagcccattccagatgatgggatttattggcaggccaaccttgacagattccaccaacacttccgtgaccaagccattgtgagcgcagttgctaacaggatggaccagacaagcagcgagattgtgcgaaccatgctccgaatgagtgagattaccacttcctctagtgctcccttcacccagccattgtcttccaatgagatcttcagatccctacctgttggctataacatctctaagcaagttcttgatcagtatctcactctgctggcagatgatccactagagtttgttggaaagtctggcgacagtggtggaggaatgtatgtcatcaacctccataaggcattagcatccctagccacagccactctgaagtccgtcgtacaggagagatttgggtctcgctgtgctagaatattccgtctagttttgcagaagaaacacatagagcagaagcaagtggaagactttgcaatgattcctgcaaaggaggcaaaggatatgctatataagatgctctcagaaaatttcatgtcactccaggttggatgccagtgagatccaggtggacgaaaccatcttcctgctggagtcttacattgagtgcaccatgaagagacagtgatccagaagaagcatcttcctcagaagatctggggggatggaaagcaaaataaaggaggtgcctggatgcattaaaaaaaaaaaaaaaaaaaaaaaaaaaaaaaa

SEQ ID NO: 61648 - DNA, 2943 bp, Homo Sapiens
gggaagcatggggcttcccaggctggtctgcgccttcttgctcgccgcctgctgctgctgtcctcgcgtcgcgggtgtgcccggagaggctgagcagcctgcgcctgagctggtggaggtggaagtgggcagcacagcccttctgaagtgcggcctctcccagtcccaaggcaacctcagccatgtcgactggttttctgtccacaaggagaagcggacgctcatcttccgtgtgcgccagggccagggccagagcgaacctggggagtacgagcagcggctcagcctccaggacagaggggctactctggccctgactcaagtcaccccccaagacgagcgcatcttcttgtgccagggcaagcgccctcggtcccaggagtaccgcatccagctccgcgtctacaaagctccggaggagccaaacatccaggtcaaccccctgggcatccctgtgaacagtaaggagcctgaggaggtcgctacctgtgtagggaggaacgggtaccccattcctcaagtcatctggtacaagaatggccggcctctgaaggaggagaagaaccgggtccacattcagtcgtcccagactgtggagtcgagtggtttgtacaccttgcagagtattctgaaggcacagctggttaaagaagacaaagatgcccagttttactgtgagctcaactaccggctgcccagtgggaaccacatgaaggagtccagggaagtcaccgtccctgttttctacccgacagaaaaagtgtggctggaagtggagcccgtgggaatgctgaaggaaggggaccgcgtggaaatcaggtgtttggctgatggcaaccctccaccacacttcagcatcagcaagcagaaccccagcaccagggaggcagaggaagagacaaccaacgacaacggggtcctggtgctggagcctgcccggaaggaacacagtgggcgctatgaatgtcaggcctggaacttggacaccatgatatcgctgctgagtgaaccacaggaactactggtgaactatgtgtctgacgtccgagtgagtcccgcagcccctgagagacaggaaggcagcagcctcaccctgacctgtgaggcagagagtagccaggacctcgagttccagtggctgagagaagagacagaccaggtgctggaaagggggcctgtgcttcagttgcatgacctgaaacgggaggcaggaggcggctatcgctgcgtggcgtctgtgcccagcatacccggcctgaaccgcacacagctggtcaagctggccatttttggccccccttggatggcattcaaggagaggaaggtgtgggtgaaagagaatatggtgttgaatctgtcttgtgaagcgtcagggcacccccggcccaccatctcctggaacgtcaacggcacggcaagtgaacaagaccaagatccacagcgagtcctgagcaccctgaatgtcctcgtgaccccggagctgttggagacaggtgttgaatgcacggcctccaacgacctgggcaaaaacaccagcatcctcttcctggagctggtcaatttaaccaccctcacaccagactccaacacaaccactggcctcagcacttccactgccagtcctcataccagagccaacagcacctccacagagagaaagctgccggagccggagagccggggcgtggtcatcgtggctgtgattgtgtgcatcctggtcctggcggtgctgggcgctgtcctctatttcctctataagaagggcaagctgccgtgcaggcgctcagggaagcaggagatcacgctgcccccgtctcgtaagaccgaacttgtagttgaagttaagtcagataagctcccagaagagatgggcctcctgcagggcagcagcggtgacaagagggctccgggagaccagggagagaaatacatcgatctgaggcattagccccgaatcacttcagctcccttccctgcctggaccattcccagctccctgctcactcttctctcagccaaagctcaaagggactagagagaagcctcctgctcccctcgcctgcacaccccctttcagagggccactgggttaggacctgaggacctcacttggccctgcaaggcccgcttttcagggaccagtccaccaccatctcctccacgttgagtgaagctcatcccaagcaaggagccccagtctcccgagcgggtaggagagtttcttgcagaacgtgttttttctttacacacattatgctgtaaatacgctcgtcctgccagcagctgagctgggtagcctctctgagctggtttcctgccccaaaggctggcattccaccatccaggtgcaccactgaagtgaggacacaccggagccaggcgcctgctcatgttgaagtgcgctgttcacacccgctccggagagcaccccagcagcatccagaagcagctgcagtgcaagcttgcatgcctgcgtgttgctgcaccaccctcctgtctgcctcttcaaagtctcctgtgacattttttctttggtcagaggccaggaactgtgtcattccttaaagatacgtgccggggccaggtgtggctcacgcctgtaatcccagcactttgggaggccgaggcggcggatcacaaagtcagacgagaccatcctggctaacacggtgaaaccctgtctctactaaaaatacaaaaaaaaattagctaggcgtagtggttggcacctatagtcccagctactcggaaggctgaagcaggagaatggtatgaatccaggaggtggagcttgcagtgagccgagaccgtgccactgcactccagcctgggcaacacagcgagactccgtctcgagccggccggttgcgcgggccctcggaccctcagagaggcgagggttcgagggcacgagttcgaggccaacctggtccacatgggttg

SEQ ID NO: 61649 - DNA, 4751 bp, Homo Sapiens
gttgctccagtgaagcttcttggggtgggaggggagggaatggggtcagggggcttgaggtgcctagagatggcagctccctctcccgcctcctccccaggtggttcaggctgcagggtggccagcatggcccttcagggcccttatcttggcctggaagtaggtgtacatggccagcaggcccatgaaggacagggaatagagccccacacagaggctgatgtccaggtaagagaagccccctcccagcacctgcagccactggcctcggccccgtccagctcgggcctccagctggccctcagggatgtcgaccagctgcttggagctgcggcccacgcgcctgacctccaaagggccccagaggcggttcttctcagccctggactcagccagcaatgcagcccctgtgtctcgcttgctcaagtgccactgcccaagcggctgctcctgctcattcctctgaagctctgccatgtgctcaggaggctcctggcctggtgcagctctgaggccagggtgcagcttcgggggtcgacttgcctcaggtccctcagccggcacatgtggggtggtgtttgtgggggacttcatcatctcaggcttcccagggtccagagttgaattccggctttccagctccagggctcccatcgccagctctggggcggctgccacattctgcacatccctccgggcagctgacccagctgcagggaagtccaggatgatgttgcttggggagaagtgggccttgaggaagttgagggtggcttccacgtcccacacgggcacatccaggcgttcattgtggcaggcagaacaaagttcacggggtggccactgcaccttggggaactgggggtcctcgctgggggcacctgcaaggcgagcattgaccctgttgtggctagaccagagccagaggacagcggcgttgggactccccacccggtgcatggaggcagcagccatctgctcgaagtggctagcgcagtctcggcagccgaagaagtagcgcacgtagcctcggatggctgggaggacctccttggccttggctgcttcctgtgagtggtctacattttgccgagctgcctgcacagtcaagaagtggaagaggacccacagggagcagggaaagccccggaaatgcggctcactcccctggcagccaatccagttcaccttcttggcaagaacggcaccctctttcctgtcgtccagggcagttttaaagaaactgtagggaattttatttctcttctgcctcttgagccattcattcacggagtgcaggaagttctggactaagggccggccagggaaatacttggccagcactgccacaaactttttcagggccaccaggcgctgcccttccaggaccgggaacctgcccacttctatccgcaggatgtagtgcagtgcagattccaggtcagccatgtagatcttggagcgatctgccaatttccaaacagtgggagctatcttgttagcagtggttggtgcaactgtggtctgggcagcctccctggtgagcccagagagtctctgcaggtaagcggtatagaaggacctggattccatgagcacggggactcgggagacagagccattccggaacagcaggtagcaagaggggaagtcggtgacaccaaactttctcaccacattggcctctgtgttcagcaccctgcgcaccgccacgcctttgtgctgggacaggtccagagccacctctctacccaggtaggagcctcccttttcaaagatcgacagccagtctggatgtctatgccaagtacgtgctgcgcagcatctgccaacaggaatgggtaggagaacgttgccttaagtctctgtgtgaggacagcaatgacctgcaagacccagtgttgagtagtgcccaggcgcagcgcctcatgcagctcatttgctatccacatcgactgctggacaatgaggatggggaaaacccccagcggcagcgcataaagcgcattctccagaacttggaccagtggaccatgcgccagtcttccttggagctgcagctcatgatcaagcagacccctaacaatgagatgaactccctcttggagaacatcgccaaggccacaatcgaggttttccaacagtcagcagagacagggtcatcttctggaagtactgcaagcaacatgcccagcagcagcaagaccaagcctgtgctcagctctctagagcgctctggtgtatggctggtggcccccctcattgctaaactgcccacctcagtccagggacatgtgttaaaggctgctggggaagaattggagaagggtcagcacctgggttcctcttcacgcaaagaacgtgatcgacaaaagcagaagagcatgtccctattgagccagcagcccttcttatcgctggtgctaacatgtctgaaagggcaggatgaacaacgcgagggactccttacctccctctacagccaggtgcaccagattgtgaataattggcgagatgaccagtacttagatgattgcaaaccaaagcagcttatgcatgaggcactcaaactgcggctcaacctggtggggggcatgtttgacacggtgcagcgcagcacccagcagaccacggagtgggccatgctcctcctggagatcatcatcagcggcactgtcgacatgcagtccaacaatgagctcttcactactgtgttggacatgctgagcgtgctcatcaatgggacattggctgcagacatgtctagcatctcgcaaggtagcatggaggaaaacaagcgtgcatacatgaacctggcgaagaagttgcagaaggagttgggggagcgccagtcagacagtctggaaaaggttcgccagctgctgccactgcccaagcagacccgagatgtcatcacgtgtgagccacagggctcccttatcgataccaagggcaacaagattgctggcttcgattccatcttcaagaaggagggtctacaggtttccaccaaacagaagatctcgccctgggatctttttgaggggttgaagccgtcagcaccactctcttggggctggtttggaacagtccgagtggaccggcgagtggctcgaggagaggagcagcagcggttgctgctctaccacacacacctgaggccccggccccgcgcctattacctggagccactgccactgcccccagaagatgaggagccgcctgctcctaccctgctagagcctgagaaaaaggctccagagccccccaaaactgacaaaccgggggctgctccacccagtactgaggaacgcaagaagaagtccaccaagggcaagaaacgcagccagccagctaccaagacagaggactatggaatgggcccgggtcggagcggcccttatggtgtgacagtgcctccggacctcctgcaccacccaaaccctggttctataacacaccttaactacaggcaaggctccataggcctgtacacccagaaccagccactacctgcaggtggccctcgtgtggacccataccgtcctgtgcgcttaccaatgcagaagctgcccacccgaccaacttaccctggagtgctgcccacaaccatgactggcgtcatgggtttagaaccctcctcttataagacctctgtgtaccggcagcagcaacctgcggtgccccaaggacagcgccttcgccaacagctccagcagagtcagggcatgttgggacagtcatctgtccatcagatgactcccagctcttcctacggtttgcagacttcccagggctatactccttatgtttctcatgtgggattgcagcaacacacaggccctgcaggtaccatggtgccccccagctactccagccagccttaccagagcacccacccttctaccaatcctactcttgtagatcctacccgccacctgcaacagcggcccagtggctatgtgcaccagcaggcccccacctatggacatggactgacctccactcaaaggttttcacaccagacactgcagcagacacccatgataagtaccatgactccaatgagtgcccagggcgtccaggcaggcgtccgttcaacagccatcctacctgagcagcagcagcagcagcaacagcagcaacagcaacagcagcagcagcagcaacagcaacagcagcagcagcagcagcagtaccacatccggcagcagcagcagcagcagatcctgcggcagcagcagcaacagcaacagcagcagcagcagcagcagcaacagcaacagcagcagcagcaacagcaacaacagcaacaccagcagcaacagcagcaacaggcggctcctccccaaccccagccccagtcccagccccagttccagcgccaggggcttcagcagacccagcagcagcaacagacagcagctttggtccggcaacttcaacaacagctctctaatacccagccacagcccagtaccaacatatttggacgctactgagccacctggaggaactgcttgtgcactggatgtggccccaccctttcctcttaattcccaatcccattcctgggctagcaccagtagtggttggggccctcccctcaggctccatttttaataagtttttagtatttttgttaatgtgaggcattgagctgttgggttttgtatattatttatatagagaccccagagctgttgcacccaatacacagagcttctttgcaaaaaaaaaaaaaaaaaaaa

SEQ ID NO: 61650 - DNA, 1910 bp, Homo Sapiens
ggggccgtctctgcgaccgccgcgcccgctcccgaccgtccgggtccgcggccagcccggccaccagccatggctctggccgctctcgctgcccctggcgctgtcgcgccgcggctgctgctgctgctgctgtctctgctgccagtggccagggcctcagaggctgagcaccgtctatttgagcggctgtttgaagattacaatgagatcatccggcctgtagccaacgtgtctgacccagtcatcatccatttcgaggtgtccatgtctcagctggtgaaggtggatgaagtaaaccagatcatggagaccaacctgtggctcaagcaaatctggaatgactacaagctgaagtggaacccctctgactatggtggggcagagttcatgcgtgtccctgcacagaagatctggaagccagacattgtgctgtataacaatgctgttggggatttccaggtggacgacaagaccaaagccttactcaagtacactggggaggtgacttggatacctccggccatctttaagagctcctgtaaaatcgacgtgacctacttcccgtttgattaccaaaactgtaccatgaagttcggttcctggtcctacgataaggcgaaaatcgatctggtcctgatcggctcttccatgaacctcaaggactattgggagagcggcgagtgggccatcatcaaagccccaggctacaaacacgacatcaagtacaactgctgcgaggagatctaccccgacatcacatactcgctgtacatccggcgcctgcccttgttctacaccatcaacctcatcatcccctgcctgctcatctccttcctcactgtgctcgtcttctacctgccctccgactgcggtgagaaggtgaccctgtgcatttctgtcctcctctccctgacggtgtttctcctggtgatcactgagaccatcccttccacctcgctggtcatccccctgattggagagtacctcctgttcaccatgatttttgtaaccttgtccatcgtcatcaccgtcttcgtgctcaacgtgcactacagaaccccgacgacacacacaatgccctcatgggtgaagactgtattcttgaacctgctccccagggtcatgttcatgaccaggccaacaagcaacgagggcaacgctcagaagccgaggcccctctacggtgccgagctctcaaatctgaattgcttcagccgcgcagagtccaaaggctgcaaggagggttacccctgccaggacgggatgtgtggttactgccaccaccgcaggataaaaatctccaatttcagtgctaacctcacgagaagctctagttctgaatctgttgatgctgtgctgtccctctctgctttgtcaccagaaatcaaagaagccatccaaagtgtcaagtatattgctgaaaatatgaaagcacaaaatgaagccaaagagattcaagatgattggaagtatgttgccatggtgattgatcgtatttttctgtgggttttcaccctggtgtgcattctagggacagcaggattgtttctgcaacccctgatggccagggaagatgcataagcactaagctgtgtgcctgcctgggagacttccttgtgtcagggcaggaggaggctgcttcctagctggagtgcaatggcgtgatctcagctcaccgcaacctccgccacctgggttcaagcgattctcctgccgcagcctcccaggtagctgggattacaggaacaaaaagcccaagagatccaacaattgaaacgaaaagaaaagtccacagaaacatccgatcaagaacctgggctatgaatttccaatcttcaacaacctgttaggaaaaaaataaaaatgcattaaataattgtaaaaaaaaaaaaaaaaaaatctagagtcga

SEQ ID NO: 61651 - DNA, 1676 bp, Homo Sapiens
tagaattcagcggccgctgaattctagccgagcatggacgaccccgactgcgactccacctgggaggaggacgaggaggatgcggaggacgcggaggacgaggactgcgaggacggcgaggccgccggcgcgagggacgcggacgcaggggacgaggacgaggagtcggaggagccgcgggcggcgcggcccagctcgttccagtccagaatgacagggtccagaaactggcgagccacgagggacatgtgtaggtatcggcacaactatccggatctggtggaacgagactgcaatggggacacgccaaacctgagtttctacagaaatgagatccgcttcctgcccaacggctgtttcattgaggacattcttcagaactggacggacaactatgacctccttgaggacaatcactcctacatccagtggctgtttcctctgcgagaaccaggagtgaactggcatgccaagcccctcacgctcagggaggtcgaggtgtttaaaagctcccaggagatccaggagcggcttgtccgggcctacgagctcatgctgggcttctacgggatccggctggaggaccgaggcacgggcacggtgggccgagcacagaactaccagaagcgcttccagaacctgaactggcgcagccacaacaacctccgcatcacacgcatcctcaagtcgccgtgtgagctgagcctcgagcacttccaggcgccactggtccgcttcttcctggaggagacgctggtgcggcgggagctgccgggggtgcggcagagtgccctggactacttcatgttcgccgtgcgctgccgacaccagcgccgccagctggtgcacttcgcctgggagcacttccggccccgctgcaagttcgtctgggggccccaagacaagctgcggaggttcaagcccagctctctgccgcatccgctcgagggctccaggaaggtggaggaggaaggaagccccggggaccccgaccacgaggccagcacccagggtcggacctgtgggccagagcatagcaagggtgggggcagggtggacgaggggccccagccacggagcgtggagccccaggatgcgggacccctggagaggagccagggggatgaggcagggggccacggggaagataggccggagcccttaagccccaaagagagcaagaagaggaagctggagctgagccggcgggagcagccgcccacagagccaggccctcagagtgcctcagaggtggagaagatcgctctgaatttggaggggtgtgccctcagccagggcagcctcaggacggggacccaggaagtgggcggtcaggaccctggggaggcctcctgtccctgctgcaggggctggggcctccggagctgctgcgggctcccctcaggctctgcttcgtgacccgtgacccatgacccacagtgctggcctcctgtggggccactatagcagccaccagaagccgcgaggccctcagggaagcccaaggcctgcaggagcctcctggcctggctgtgtcttccccacccagctctcccctgcgcccctgtctttgtaaattgacccttctggagtggggggcggcgggcagggcttgcctttcttagtctgatgccaagcaaggccttttctgaataaattcatttgactttcgaaaa

SEQ ID NO: 61652 - DNA, 2096 bp, Homo Sapiens
ctctcctcagcatggacaggggcttccccttcgccgccgccgtcgcggcggcaagtccgcgcgcccggtcctgcggcctattgcagtttatgttgctttttagtcgtcagggaaagcttcgactgcaaaaatggtatgtcccactatcagacaaagagaagaaaaagatcacaagagaacttgttcagaccgttttagcacggaaacctaaaatgtgcagcttccttgagtggcgagatctgaagattgtttacaaaagatatgctagtctgtatttttgctgtgctattgaggatcaggacaatgaactaattaccctggaaataattcatcgttatgtggaattacttgacaagtatttcggcagtgtctgtgaactagatatcatctttaattttgagaaggcttattttattttggatgagtttcttttgggaggggaagttcaggaaacatccaagaaaaatgtccttaaagcaattgagcaggctgatctactgcaggaggaggaagctgaaaccccacgtagtgttcttgaagaaattggactgacataactctcctcccttgttgatgacttcttgtggcatttcacacactgtagatggtcactcccttcattgtccattgttagctcatggtgtaagatgatgtcttgtcagtattactgttttgctaagccgcttcattcatgcctacacaatttttttttaaaagggaactttagttaattaagtgataagggacttaaatatgaattagaatggtgcagaaagagataccttttctggatattttaaagtttaaaggtcagtttctcttaatctgattatgtgcacatatgaaaatggcacatcatatacatgtaaaatcaggcagtatacatttattaattactgtatttgacaaaggaaactcttaaattataatgtgaaacctggttttatgaaaccaaagactagtgcagcatttcagcatatgtaaaaaaaaaaaagggaattgacatgtcacatatcaaatgaatggaaactttgttgaaactttaaaaagcaaatttactccaaagacttgtattggaaattacatacctttttttttttttttaaaggactacagattatttttaatgactaaattggagtgatacttcttacactaaaaattatttcttaggcattctgaatctgggatgagaaacaggattgtttcacaatagtaagcacataatttttaaggccaaggcacatttgactcctgagatgaattttttgtggtcataatcaaatacttagttgtttttgatgccccaaaataaagtgagaatggtaatttgccaggaattcttcataacagtatcttacaaaaaacgtgttgctctcttcacagtattatgtgtaaagtcattgtttaaagcacgaatgttccctctggggtacttgttaaagctaaatttattttgcttccctccacttagaagtgctgcacactttacagcagcttcctttctttccatggcactgcctagttaacagaagtcttataaaaatttaaaaagacacatttcttacaaaaaagagttgaatgaggtaaaatggcattagatggctctatattttttaaagctatgtaattgttcagcgtcacttttctaagtacttatacatatctaaacatgtcttcaatggtttatattttcacttataatatgctgggctggattaagctttgttgtgaattgtgacccaacattcaggccaacgttgagcactgtccttatcacatctcgccacaattagttgtaataaaccgttcaacgtacaaacgtacaaacactggagtgtgtttttatctctttccaaaagtttgtcaaactatgcagagctgctgaaggaagaatttctcatttttttttcagtaaaatgttgaaaattcccctccatttgaatatggtggttgttataagcacacacaagatacatggtggaagatctaaggagtcttcatgtacttcattaaaaaataacatggattccatactgagagcctatctacacatttattttcaatcaataaatgctgcttttaaaaccttgaaa

SEQ ID NO: 61653 - DNA, 377 bp, Homo Sapiens
gaggtgcagctgttggagtctgggggaggcttggtacagcctggggggtccctgagactctcctgtgcagcctctggattcacctttagcagctatgccatgagctgggtccgccaggctccagggaaggggctggagtgggtctcagctattagtggtagtggtggtagcacatactacgcagactccgtgaagggccggttcaccatctccagagacaattccaagaacacgctgtatctgcaaatgaacagcctgagagccgaggacacggccgtatattactgtgcgaaagatcccctaccttcacgtagcggggacctcacggagggtacttcgatctctggggccgtggcaccctggtcactgtctcctca

SEQ ID NO: 61654 - DNA, 4356 bp, Homo Sapiens; identical to SEQ ID NO: 23531

SEQ ID NO: 61655 - DNA, 1668 bp, Homo Sapiens
ggacaagggcacacaactggttccgttaagcccctctctcgctcagacgccatggagctggatctgtctccacctcatcttagcagctctccggaagacctttggccagcccctgggacccctcctgggactccccggccccctgatacccctctgcctgaggaggtaaagaggtcccagcctctcctcatcccaaccaccggcaggaaacttcgagaggaggagaggcgtgccacctccctcccctctatccccaaccccttccctgagctctgcagtcctccctcacagagcccaattctcgggggcccctccagtgcaagggggctgctcccccgcgatgccagccgcccccatgtagtaaaggtgtacagtgaggatggggcctgcaggtctgtggaggtggcagcaggtgccacagctcgccacgtgtgtgaaatgctggtgcagcgagctcacgccttgagcgacgagacctgggggctggtggagtgccacccccacctagcactggagcggggtttggaggaccacgagtccgtggtggaagtgcaggctgcctggcccgtgggcggagatagccgcttcgtcttccggaaaaacttcgccaagtacgaactgttcaagagctccccacactccctgttcccagaaaaaatggtctccagctgtctcgatgcacacactggtatatcccatgaagacctcatccagaacttcctgaatgctggcagctttcctgagatccagggctttctgcagctgcggggttcaggacggaagctttggaaacgctttttctgtttcttgcgccgatctggcctctattactccaccaagggcacctctaaggatccgaggcacctgcagtacgtggcagatgtgaacgagtccaacgtgtacgtggtgacgcagggccgcaagctctacgggatgcccactgacttcggtttctgtgtcaagcccaacaagcttcgaaatggacacaaggggcttcggatcttctgcagtgaagatgagcagagccgcacctgctggctggctgccttccgcctcttcaagtacggggtgcagctgtacaagaattaccagcaggcacagtctcgccatctgcatccatcttgtttgggctccccacccttgagaagtgcctcagataataccctggtggccatggacttctctggccatgctgggcgtgtcattgagaacccccgggaggctctgagtgtggccctggaggaggcccaggcctggaggaagaagacaaaccaccgcctcagcctgcccatgccagcctccggcacgagcctcagtgcagcctgttcctggtccgggagagtcagcggaacccccagggctttgtcctctctttgtgccacctgcagaaagtgaagcattatctcatcctgccgagcgaggaggagggtcgcctgtacttcagcatggatgatggccagacccgcttcactgacctgctgcagctcgtggagttccaccagctgaaccgcggcatcctgccgtgcttgctgcgccattgctgcacgcgggtggccctctgaccaggccgtggactggctcatgcctcagcccgccttcaggctgcccgccgcccctccacccatccagtggactctggggcgcggccacaggggacgggatgaggag

SEQ ID NO: 61656 - DNA, 1311 bp, Homo Sapiens
ggatccgcggccgcgaccggagtggggagcgcggcgtggaggtgccacccggcgcgggtggcggagagatcagaagcctcttccccaagccgagccaacctcagcggggacccgggctcagggacgcggcggcggcggcggcgactgcagtggttggacgatggcagcgtccgccggagccggggcggtgattgcagccccagacagccggcgctggctgtggtcggtgctggcggcggcgcttgggctcttgacagctggagtatcagccttggaagtatatgcgccaaaagaaatcttcgtggcaaatggtacacaagggaagctgacctgcaagttcaagtctactagtacgactggcgggttgacctcagtctcctggagcttccagccagagggggccgacactactgtgtcgtttttccactactcccaagggcaagtgtaccttgggaattatccaccatttaaagacagaatcagctgggctggagaccttgacaagaaagatgcatcaatcaacatagaaaatatgcagtttatacacaatggcacctatatctgtgatgtcaaaaaccctcctgacatcgttgtccagcctggacacattaggctctatgtcgtagaaaaagagaatttgcctgtgtttccagtttgggtagtggtgggcatagttactgctgtggtcataggtctcactctgctcatcagcatgattctggctgtcctctatagaaggaaaaactctaaacgggattacactgggtaagaaacactgtttttttagggcaggggtggagggagggaatcagggtttatagaaacttctgtatttaatgaaaaaaggattttaaagaattaactactattttctttcatgtcagaatcaggcagtctccttaggaggtgttctaacatgggcaagtggaaatcagtgggcctgctattaaatgtggaatatgattctaatctctgttccagtctccttcttaggtttggtgagatgagctgctcagcagtctgtgctctgtgtttcaataccatccactatgcaattagtattcttaagacatcacttacccaatttaagagtttaatttcaatttcttgctaataaactcacaaggggttctttccagttaggaaatataaaaccctaattaagaagttgtgagccggaataagtggcatggcctgtaaagtcccagctactttaggcttgtggcagaaggattgcttgaagccaaggcgtttgaatctagcttaggcaacatagcaagatccttgtctctttaaaaaaaaaaaaaaaaa

SEQ ID NO: 61657 - DNA, 2270 bp, Homo Sapiens
ggcacgagggagagagagagagaactagtctcgagttttttttttttttttttaatctgggaaaccggctccattctgggtctgagttaggagcttggggctgtagtggggagctaggagtcccattggaaggggcctgcagcgacaggctgtggatgcgcacaggctggcccatgcggcccgtgcagcaggcgccacataagccagatgtcagcggccgagagcccgtgcactacaaccagctcacggtaaaagcaggggtcgaaggtgctcaaatgcggcgcggctgaaggctgggggatgccaaaggtgcggaaggcagggtgaggctcgggcgtgagccgcaggcgctgcagacacatgcccagaaagacgtcgtcgatggggaagagctcgacctgcgcacaggcgccagccaggcggtgcagcgtggccccggaaagcacaaagccaccgccgcccgcgtaggccggataggcgggcaggccgtacacggcctcggggatgtagtacttgctagcccgcgtgcggatgggccgcgcatgcacaattacgtcaccagcaagcaggtcttgcgccgggtcccgcggcgccaggaactccaggagatttcccacgttcacgaacacatctgcgtcgcccttaaaaacgaagcgcacgtcggggcagaaagctgaggcccaggctagaaagtggatctccttgagcgttaggttaaaaaaggtgtcgtcgaaggcccagagcaggatgtccgcatacgcaaggctctcggcccgcagcagggcgcgccagtgggttcgcgcgccctccccaacttcgtcggccccgcccgagcctgcgcccctgggcacgcccagcaagaacacgcggcgcaccagcgccccctgcacgcgaccctccgcgccccacgtctggcgcacggcttggcgccgctcgaagtcctctgccaccgacttgacagcaataagcaggtccgggcggccaccgggtgcgccgtcgccgcggcacttgtgcggctggttaatgagcagtggaaaccgccgctggtccttggcgcgcaaatagcgggcgaagtcaaagggtcccgtaggcgtgggcggcgccggtgtgtccccttcgtaggccggcggggctgcacccgcgtcgggtaactggaacgcgcggggtccgggggtgggcctcggtgccgccctccctcgccctcgcggcgcgctcgccgtcggggccgcgccgtcgcgctgcgcatagagtaagaggcccagggaggcgccaaggagcagcgtgagcaatgcgtccctgcgtaggcgcagcctcctcctcatctccgcgcggcctgcgccctccctcccctgtaagggtcgcagtcggcagcagggggcagcgagccccgccctccccagctgagggggcgggaggccacgccccggggggggctccagcgaccgacggttgagccccttgcgttgttctcctcctcccggccgtgtcgcaccgccgggaccggcagcctgaagggacaagaagttcacccatgtagccaactcccccgcggcctcagctccggcccaggactgcgacccagggccgggcagggagactgggagcctcggcccctcccccgcccgcctccctcgcgctgaggccgaatcccttccaccctgccatcccctcaatgtcgggccctggggtcccgacactcacgctcggccctcggaagtggcgcagccccggacgccctggcctccggggctcagcgcagggtccgaggggccgccatggaccgggcccgagccaaatgcagaagactccacaggcaaatactggacggtgggcagtgactccgcggtcaccagcagcggcgacactcctgtggacttcttcttcgagttctgcgactataacaaggtggccatcaaggtgggcgggcgctacctgaagggcgaccacgcaggcgtcctgaaggcctcggcggaaaccgtggaccccgcctcgctctgggagtactagggccggcccgtccttccccgcccctgcccacatggcggctcctgccaaccccccctgctgccagcctcccccgtccccaacatgcatctcactctgggtgtcttggtcttttattttttgtaagtgtcatttgtataactctaaacgcccatgatagtagcttcaaactggaaatagcgaaataaaataactcagtctgcaaaaaaaaaaaaaaaaaaaaaaaaaaaaaaaaaaaaaaaaaaaaaaaaaaaaaaaaaaaaaaa

SEQ ID NO: 61658 - DNA, 1924 bp, Homo Sapiens
ccatgacgcccgccctcacagccctgctctgccttgggctgagtctgggccccaggacccgcatgcaggcagggcccttccccaaacccaccctctgggctgagccaggctctgtgatcagctgggggagccccgtgaccatctggtgtcaggggagcctggaggcccaggagtaccaactggataaagagggaagcccagagccctgggacagaaataacccactggaacccaagaacaaggccagattctccatcccatccatgacacagcaccatgcagggagataccgctgccactattacagctctgcaggctggtcagagcccagcgaccccctggagctggtgatgacaggattctacaacaaacccaccctctcagccctgcccagccctgtggtggcctcaggggggaatatgaccctccgatgtggctcacagaagggatatcaccattttgttctgatgaaggaaggagaacaccagctcccccggaccctggactcacagcagctccacagtggggggttccaggccctgttccctgtgggccccgtgacccccagccacaggcgtgtctaggaagccctccctcctgaccctgcagggccctgtcctggcccctgggcagagcctgaccctccagtgtggctctgatgtcggctacgacagatttgttctgtataaggagggggaacgtgacttcctccagcgccctggccagcagccccaggctgggctctcccaggccaacttcaccctgggccctgtgagccgctcctacgggggccagtacaggtgctatggtgcacacaacctctcctccgagtggtcggcccccagtgaccccctggacatcctgatcacaggacagatctatgacaccgtctccctgtcagcacagccgggccccacagtggcctcaggagagaacatgaccctgctgtgtcagtcacgggggtattttgacactttccttctgaccaaagaaggggcagcccatcccccactgcgtctgagatcaatgtacggagctcataagtaccaggctgaattccccatgagtcctgtgacctcagcccacgcggggacctacaggtgctacggctcacgcagctccaacccccacctgctgtctttccccagtgagcccctggaactcatggtctcaggacactctggaggctccagcctcccacccacagggccgccctccacacctggtctgggaagatacctggaggttttgattggggtctcggtggccttcgtcctgctgctcttcctcctcctcttcctcctcctccgacgtcagcgtcacagcaaacacaggacatctgaccagagaaagactgatttccagcgtcctgcaggggctgcggagacagagcccaaggacaggggcctgctgaggaggtccagcccagctgctgacgtccaggaagaaaacctctagcccacacgatgaagacccccaggcagtgacgtatgccccggtgaaacactccagtcctaggagagaaatggcctctcctccctcctcactgtctggggaattcctggacacaaaggacagacaggtggaagaggacaggcagatggacactgaggctgctgcatctgaagcctcccaggatgtgacctacgcccagctgcacagcttgacccttagacggaaggcaactgagcctcctccatcccaggaaggggaacctccagctgagcccagcatctacgccactctggccatccactagcccggggggtacgcagaccccacactcagcagaaggagactcaggactgctgaaggcacgggagctgcccccagtggacaccagtgaaccccagtcagcctggacccctaacacagaccatgaggagacgctgggaacttgtgggactcacctgactcaaagatg

SEQ ID NO: 61659 - DNA, 980 bp, Homo Sapiens
gagacgcctcctcctcctgtcacttcgggacaagttaacaatcttcagattcgttattaaagcctcgtgtaccctatgtgatctatcaggttcggctttagagtgtggtgaagggtacttttcatggtgcatggaaggaaagccaatgcgcaggtgtaccaacattcgaccaggagagactggaatggatgtaacaagccgctgcacccttggagaccccaacaaactgccagaaggggttccccaacctgcccgcatgccctatatctcagacaagcaccctcgacaaaccttggaagtgattaaccttctgagaaagcaccgggagctatgtgatgtggtgctagttgtgggcgccaagaagatatatgcccatcgagtcattttgtcagcctgtagtccctacttccgagctatgtttacaggagaattggcagagagccgtcagacagaagtagtgatccgagacattgacgagagggctatggaattactgattgactttgcgtatacctcccagataacagtagaagagggcaatgttcagactcttctgccagctgcttgcctcctccagctggcagaaatacaggaagcctgctgtgaattcttaaagagacaattagatccttctaactgcctgggcattcgggcttttgctgacacacattcatgtcgtgagttgctaaggatagcagacaagttcacccaacataactttcaagaggtgagttgcacttggtgttccaatgcacccatttgttggagagcaatatgggttcacattctgctaaataacacttgcctgggtatttcctgctgattctaactcataatagcaaataaataagttattataaatcctaaacctggcttttattttagagggcaattttgtgttctaccagcaagttaagatttagggatttattctccctaactgtattcataaaaaaaaaaaaaaaaaaaaaaaaaaaaaa

SEQ ID NO: 61660 - DNA, 2829 bp, Homo Sapiens
ggcacgagggggaagcatggggcttcccaggctggtctgcgccttcttgctcgccgcctgctgctgctgtcctcgcgtcgcgggtgtgcccggagaggctgagcagcctgcgcctgagctggtggaggtggaagtgggcagcacagcccttctgaagtgcggcctctcccagtcccaaggcaacctcagccatgtcgactggttttctgtccacaaggagaagcggacgctcatcttccgtgtgcgccagggccagggccagagcgaacctggggagtacgagcagcggctcagcctccaggacagaggggctactctggccctgactcaagtcaccccccaagacgagcgcatcttcttgtgccagggcaagcgccctcggtcccaggagtaccgcatccagctccgcgtctacaaagctccggaggagccaaacatccaggtcaaccccctgggcatccctgtgaacagtaaggagcctgaggaggtcgctacctgtgtagggaggaacgggtaccccattcctcaagtcatctggtacaagaatggccggcctctgaaggaggagaagaaccgggtccacattcagtcgtcccagactgtggagtcgagtggtttgtacaccttgcagagtattctgaaggcacagctggttaaagaagacaaagatgcccagttttactgtgagctcaactaccggctgcccagtgggaaccacatgaaggagtccagggaagtcaccgtccctgttttctacccgacagaaaaagtgtggctggaagtggagcccgtgggaatgctgaaggaaggggaccgcgtggaaatcaggtgtttggctgatggcaaccctccaccacacttcagcatcagcgagcagaaccccagcaccagggaggcagaggaagagacaaccaacgacaacggggtcctggtgctggagcctgcccggaaggaacacagtgggcgctatgaatgtcagggcctggacttggacaccatgatatcgctgctgagtgaaccacaggaactactggtgaactatgtgtctgacgtccgagtgagtcccgcagcccctgagagacaggaaggcagcagcctcaccctgacctgtgaggcagagagtagccaggacctcgagttccagtggctgagagaagagacaggccaggtgctggaaagggggcctgtgcttcagttgcatgacctgaaacgggaggcaggaggcggctatcgctgcgtggcgtctgtgcccagcatacccggcctgaaccgcacacagctggtcaacgtggccatttttggccccccttggatggcattcaaggagaggaaggtgtgggtgaaagagaatatggtgttgaatctgtcttgtgaagcgtcagggcacccccggcccaccatctcctggaacgtcaacggcacggcaagtgaacaagaccaagatccacagcgagtcctgagcaccctgaatgtcctcgtgaccccggagctgttggagacaggtgttgaatgcacggcctccaacgacctgggcaaaaacaccagcatcctcttcctggagctggtcaatttaaccaccctcacaccagactccaacacaaccactggcctcagcacttccactgccagtcctcataccagagccaacagcacctccacagagagaaagctgccggagccggagagccggggcgtggtcatcgtggctgtgattgtgtgcatcctggtcctggcggtgctgggcgctgtcctctatttcctctataagaagggcaagctgccgtgcaggcgctcagggaagcaggagatcacgctgcccccgtctcgtaagagcgaacttgtagttgaagttaagtcagataagctcccagaagagatgggcctcctgcagggcagcagcggtgacaagagggctccgggagaccagggagagaaatacatcgatctgaggcattagccccgaatcacttcagctcccttccctgcctggaccattcccagctccctgctcactcttctctcagccaaagcctccaaagggactagagagaagcctcctgctcccctcgcctgcacaccccctttcagagggccactgggttaggacctgaggacctcacttggccctgcaaggcccgcttttcagggaccagtccaccaccatctccacgttgagtgaagctcatcccaagcaaggagccccagtctcccgagcgggtaggagagtttcttgtagaacgtgttttttctttacacacattatggctgtaaatacctggctcctgccagcagctgagctgggtagcctctctgagctgggattacaggcatgagcaactgcgcccagccaaattctacttcttaaaaatcacaaaaactagtttaaattgatgacttgttcgtatgttcaaaatgtaacaacaaaaaaagctaacaccagtcatttatattaactttttttttttaaatcaaaaattgttaatgttagaaacatactatgaagtgcctttatctgcttagacctaaggaagattttaaagttgggttgcacaggaaatgatgatgcttcaatttcttaatagttaaaaagtgctaaatactacttgaaattattgtttacagattagtgacaagagctggggttaggatccggttggactctgacatcggatgccctcaaacatacagaacttccaaactcaagtccagccataagctattttgccaacatgtcagagtaatctgtatttttgtatgtgatttctacttttatagacttgttttaaaacaataaaacacatttttataaaaaaaaaaaaaaaaaaaaaa

SEQ ID NO: 61661 - DNA, 784 bp, Homo Sapiens
gcggccgcgttcccggtgctccagcaccctggccgcctccgccgacttctgcagcctcgatacaaagctctctacgtcgtcgaacacgtggttcaggatgtccacttcccgctccgcctgcagaaccgccaggtcaggaccccggggacccaggtccggggaggccgagtcagcgttgctcgaggtccccaccggctcaggcctctgcgcctcctctgcctcgggaatgggcttcgcctggggtcgtccgcggcccgcgccccgctctacggtgctgatcactgcgcggactgacgggcggcgctgcaggggcggggtctcagcggcgggcgagcggtcgcgctgcaactcctcctgcgtggccctgagcgccgccgccctgcgctccccgcggcccgagcggtaattgtgcagagccccctggatgtcctctcggatctgctccgccccgaggcgcaggccctggaagaagtgcacgtcgggctgcgcgcgctcgggttcctggcacacgagcagcagcaacgagcggctcctgccgggtggcatcaccgcgtcacagcgcacgatggcgcccagtgggtacgactccagctcctccttggaggccgggtcgagcagcgtgacatggtcgggagacactcgcagcagcatctcctgtgcccagactcggccctggctatccatgacggccaacttcctggaagcatccttcacggtatgcacgccatcgttctcacccagggcagaacgtcaccaggtgattgacttgggtctgggatacatc

SEQ ID NO: 61662 - DNA, 504 bp, Homo Sapiens
  misc_feature (409)..(409): n is a, c, g, or t
  misc_feature (432)..(432): n is a, c, g, or t
  misc_feature (460)..(460): n is a, c, g, or t
  misc_feature (462)..(462): n is a, c, g, or t
  misc_feature (467)..(467): n is a, c, g, or t
tttgataagtccaaactttatttaaaactacattttaaattcgttaccaaacatcacaatggggaaaaaaatgaagacccaaaaaagaagggggaaaaaaaaaaaaacacagtgtgtcaaggcttaaatctgtccagaattcagtttctgatgttttaaactaccatggggagaaatgaccacacctatcaaaaaagcagtgtcaaactaatttacatttttatacagatcagatgtttatttagtattgttttcatatatgcattgagtatgtaaggacagagttagatgagcctctgaagacatctcatatactctgggctcccaccgtttcaggttcttttagtgtctcagaatttccagctaattcttcggtctgcatttcacatatttcaccagataaatggtntttctgttcttcttctaccattntctttcttagatctgcctctgatatatngncagtntcagtggtaaatcttcacttttacaaatcttctcatc

SEQ ID NO: 61663 - DNA, 485 bp, Homo Sapiens
tttttcacgttgcacggtgtttctttaatggaaagacagccaccgacctcagaagcagcccctccttgcgctggaccagaaggataaggggagacctagccaccagtgggccagtgggggtgaggggcttctaggaaaaccggtgtcatctgcgcgggatgctgggcctccacctcccaacctcctccgggacagtacaggtttgggggcaaggctgagcagggcaggctggggagaccgctgtccctggggttttgtgggcaggggctgggtgcaggccggacagacagaaagcagtcccagctcaaggcagaaggccagagggtgtggagtgaaagggacaggcgaacgaggttcggagagatggagggaacaggccaccaagctcagaagcgagaaaggtctgaggaagcacaagacacacacacacacacacacacacacacacacacacacacacacagaaagagagagagagagagaga

SEQ ID NO: 61664 - DNA, 1748 bp, Homo Sapiens
ctggacagctgataaaactaccttctgacaaagtttgatttaattagactctaataaaaggtcctatgagactttctaaaagactatattgggaagaaagaaacctcagaaaagtctaaattatcaagtagtaccatttaaatactcttactggacagctaataagctaccttcagacaaagattgaatgattaaattgaactccatacagaactgctaaggtgtcttcaaaaaggacttgagaagatgaaagcatctttagaagggccacttaaattcacttgcttgatagaaataaagcctcaagcaagttgttataacttcaggattcgacttcactgactctaagagtatagacatccataatttgaactaatgaatagtccacttctgttcattgcttctctgtcacccccatttgccactaccataatgagtgatagatacatcttcatcacctctggaaatcatctcaggatctaaatggaaactgtataaagcctatcatttttactgatttaaactatgtaaactcattattctttttatgtaatgtgctgttgttattgtttacctgcataaaaatatttatgagggttttcaatagtttacttgagacctcatttttgcccatttttttccttcccgatatcatgatctcctcagctgaactttcttaccttgggggttgttcaggaactgactctcatggggaaagagggattactatttctgtgttcctatctcttggtaactgcttaaccacagccagtcttgaactaatggaaggagcactggacttgggttcttgagacctgggttcatgttcagttctgccactgattattgtgacattgggccagtcacttgatttctctgagcctcagtttcatcacctgttaagtgaggatagtaatacctggcacaaatatcacaatattagtgataattgaatataattataagtacccaatggctattaaaagtaaaactaggaagtgctgaataaccataatatcattatatttgtagcattttggaccttatcaatgaacaactgagaaaactaggtttttgaattcttttactttttaaagtaacttcctcccatttttatgtcaattatagaaaattttaaaaagaaaattaaatgtgcctataattttataagccggaggtaactaagttggtatttttcttcttagtacctctttgtctcatcataaattgttcatcaatgtcaaaaacttggaaaataaagataagcatatagaaaaaaataaaaaccacccataatcacaaatcccagaagcaatgttaatattttggtggatttatttccagtctttttctatggctatatgtgcacatatataatttttacatagaaaaagtcataatgcatacagctttgttgcttttagcatttttatcatgaatattttcctacatttatgcaaagtatttgtaaatatcattttcaatggtgtataatatttcatcataggatgacatcatggtttagttaaccattttcttttgttggatatttgagggtctttccaaatttggccattgtaatttcacaatgtctttttcattacctaactgaaaatatttgctttggtgaaagcagaggattttttgttgtttgtttgtttgtttttgaagaagtccttttaatagctacatttcattgactaagtggaacttcaagagacaggtagaagaaaaaaaaaaaaaaaaaa

SEQ ID NO: 61665 - DNA, 679 bp, Homo Sapiens
  misc_feature (497)..(497): n is a, c, g, or t
tttttttttaacattttaaaaattgctgtattcaaaattaataataaactttggggtaaataagctttaaaacaaaagtacataagcaaaaataaataatttacaccaacccactaacctaattttcagagtaaagccatttccaattacagtactgttatcccgggcaccagcctgtggttaaactttgatgattcattatttttaaaaaacagtaataaaaattgaatactaagcaaaatctttaacaaaaccactggatttaactttttaattttaaataaccaaattttataattttgtacataattcaatgtaatgccaatataattagcatttcagcttgaagagctggtttttaacagggatgggaaactataaattattcaaacagtctgcaaaccatgagatacaaataaaaatggacaagcatatagtagaacaaaaaccgcagacactctactaactggggaaatatctgaaggctttacaccctntattatccataatggcttttggaattacgattgtgtgacatatagaacctttgatattttagatacagcctttatttttttttccacggggaagttaaaaatccatcataagactccataagactttactagtcttgcatgtagactctaggagtttgtgatctgattaaagaagtacatga

SEQ ID NO: 61666 - DNA, 7011 bp, Homo Sapiens
cgggccgcatcagccctcctcctgtttgcgctccccagcgtgcaatttatttggggggctaccggggattgaacggagcgggcgagcgctgccaggaggtggggccggccccacctgtcgactgcccgtagtaggcagggagagggcggggtttgtcccatagggcccgccccccagtccctgggtcccgggcgcgcgacgagatataaggcagtcaggaaacaatgcgcctgcagctcgcgctcccgcgccgatcccgagagcgtccgggccgccgtgcgcgagcgagggagggcgcgcgcgcggggggggcgcgctcgtgagtgcgggccgcgctctcggcggcgcgcatgtgcgtgtgtgctggctgccgggctgccccgagccggcggggagccggtccgctccaggtggcgggcggctggagcgaggtgaggctgcgggtggccagggcacgggcgcgggtcccgcggtgcgggctggctgcaggctgccttctgggcacggcgcgcccccgcccggccccgccgggccctgggagctgcgctccgggcggcgctggcaaagtttgctttgaactcgctgcccacagtcgggtccgcgcgctgcgattggcttcccctaccactctgacccggggcccggcttcccgggacgcgaggactgggcgcaggctgcaagctggtggggttggggaggaacgagagcccggcagccgactgtgccgagggacccggggacacctccttcgcccggccggcacccggtcagcacgtccccccttccctcccgcagggagcggacatggactacgactcgtaccagcactatttctacgactatgactgcggggaggatttctaccgctccacggcgcccagcgaggacatctggaagaaattcgagctggtgccatcgccccccacgtcgccgccctggggcttgggtcccggcgcaggggacccggcccccgggattggtcccccggagccgtggcccggagggtgcaccggagacgaagcggaatcccggggccactcgaaaggctggggcaggaactacgcctccatcatacgccgtgactgcatgtggagcggcttctcggcccgggaacggctggagagagctgtgagcgaccggctcgctcctggcgcgccccgggggaacccgcccaaggcgtccgccgccccggactgcactcccagcctcgaagccggcaacccggcgcccgccgccccctgtccgctgggcgaacccaagacccaggcctgctccgggtccgagagcccaagcgactcgggtaaggacctccccgagccatccaagagggggccaccccatgggtggccaaagctctgcccctgcctgaggtcaggcattggctcttctcaagctcttgggccatctccgcctctctttggctgaagctgcccgtgtagtccccaaccgtgtctgtctggcacgtgggtgtgttggtaaacagtttggaaaagtggcgtgggagccagcctccctttgatgattattggagccccaggggacaagggatttgaggtgagggttggcgcttagagaggacaatactggggttggactgtaagggattgaagggggtaccttaagagacactccaaacctgaagtttttttgctgctgcctctttccctaggaaactcacactcccctagggggagaagaagccgagagccttttgtgcaaagccaaaaccttcgtccttttaaaaacctaggtctccagttggctttactttaaaatgccaataataaatgccctcttctcgtgcctccccaccaccacttaccactcgtgcatccctgagacagggagggaagaatgaacactccccattaacagatggaaaaactgaggcttagagatagacaatcactacaagtcagctccagctttctgccatctagccagcccctcttccccaatgctccatcccaaccaggcacctcttccttgatgtttggggtctttgtggtagcttatcttagaagcactacaccttgccttgctgtttgtcctgagatggaaaagtgtccttcttgctccccctcaatagatctccagcgtcagctgctccctggcattcaacaaatattcactggcccctactttgtggcaatctgtgggctacatgctggggtcaaggcagtagaactccaggccctcctctcccatccttgatgcaagtgcaacctcgctgagggcagactggggcatcctgtgccactaaactacattgttcttattctggcatcttagacctccacacccgtgagaaatcctggagagggtatttttgtagagtgtagactgtggctagtgacaaataaattaggaccaagaaagctcactgtagcttttaggaataacttttacacgaccatttgatagggaactggggaatggggtatggaagttttcctacacttgagagaaaaaataggataacaaaaattaaaagtctttttttcctggtccactgtgttaaggtcatttttaaccagcttgctttctacaccaagagtttatgtttgtttaatggctggaaagagaatcttgagatcaaaaaaccaataaagatgtatctctacaacggctggtggagtggtagagtggaaagagcattgctttggaagttggaacattttagtttgagatccagaacgttacaaaggtgatatgtggacttcgctgatctgggcctcagtttccccatttgcacacgatggggttggacttgattgtcctgctgatgacatttccttgtctggatagagtaagacactactctctgaaagggagaatggtgtgcttaaattatttctttcttagatagaatcttcctgagccacgaggcttaacactgaaaattaaaggtttgggatgtaggaaagcctgctgaatcattttctaacctaccctttaacctgaacctgtttgtgagcttctagttcactcacaggccacatggcctggaacaaaatgcaacagattgcaaacaatgaggcggggggtggggaaagtgattggcagcagagctcacccaataggggctaggggctgggtaagacagaattccaaacacagcgtaatcagccaatcatgggctttggggccaggagggctgaatggtcaggtttattaatggagaaataatgcgattgtccacacaatggaagccttcctgacaaaggggctcaagcttcctgatatgcaaagaagctgagaacggagctcttcctttgccgaggccgagatccattaaggtcggacttctgtgtggaggctgcaaaatgtgtggagcaggaggagacttttctcccaattgcccctctcctggttaggttaacctaagagaccttcaagccagtgaatgagaagggcgtgtccaggtgtctccaggtctctggtgttatgagccccatatctgggacattctgctgcccagtctctgcctctggtgcaggtagtttggaaatggtcgcttgtacctttgtgaagttcctgcagcttcgccgacctatgattacaaatctaaccttctagtccagggaaggaggtggggcaggcgacctataaatgatggatgactttagaaacccattgaacccaggagcaaaatgctcctaagggaaaccctttccctcccctctgtgggtgaagagggatgggttgtagccctcccttctctgaatcttcagctgaaagggatggcagaatagagaggtgggggaataataggatttataacttgtgaaaagtaacaattccccaagtgcaggctgtgctgggcaggaacaaagggcagctctgcccacagacccctcatttacaattctgatggggcatgaaagagcccgactggggaagatctttatagctaaactttgtcccaggccggtagctctttctctccaacccctccgtgggggaggggagagcctttgcagactgggggctgttggcttgggtctgccttttgttcttatctaagccttgctgtgcaaaaggaaattggagaatattttccttcttgctaatgtcccctcctttccttcactgtgcccttaccacattacaaatgaatcagctttctgctcacctcgatttgtatatatctaaattggaaaaatgtctcctaccttcccaagcaccagcgtagacagctaaagctgtagggtctatgtttgtgtttctcatgggatgtgtttcttctcttgatctcttttctcggacagagaatgaagaaattgatgttgtgacagtagagaagaggcagtctctgggtattcggaagccggtcaccatcacggtgcgagcagaccccctggatccctgcatgaagcatttccacatctccatccatcagcaacagcacaactatgctgcccgttttcctccagaaagctgctcccaagaagaggcttcagagaggggtccccaagaagaggttctggagagagatgctgcaggggaaaaggaagatgaggaggatgaagagattgtgagtcccccacctgtagaaagtgaggctgcccagtcctgccaccccaaacctgtcagttctgatactgaggatgtgaccaagaggaagaatcacaacttcctggagcgcaagaggcggaatgacctgcgttcgcgattcttggcgctgagggaccaggtgcccaccctggccagctgctccaaggcccccaaagtagtgatcctaagcaaggccttggaatacttgcaagccctggtgggggctgagaagaggatggctacagagaaaagacagctccgatgccggcagcagcagttgcagaaaagaattgcatacctcagtggctactaactgaccaaaaagcctgacagttctgtcttacgaagacacaagtttattttttaacctccctctcccctttagtaatttgcacattttggttatggtgggacagtctggacagtagatcccagaatgcattgcagccggtgcacacacaataaaggcttgcattcttggaaaccttgaaacccagctctccctcttccctgactcatgggagtgctgtatgttctctggcgcctttggcttcccagcaggcagctgactgaggagccttggggtctgcctagctcactagctctgaagaaaaggctgacagatgctatgcaacaggtggtggatgttgtcaggggctccagcctgcatgaaatctcacactctgcatgagctttaggctaggaaaggatgctcccaactggtgtctctggggtgatgcaaggacagctgggcctggatgctctccctgaggctcctttttccagaagacacacgagctgtcttgggtgaagacaagcttgcagacttgatcaacattgaccattacctcactgtcagacactttacagtagccaaggagttggaaacctttatgtattatgatgttagctgacccccttcctcccactcccaatgctgcgaccctgggaacacttaaaaagcttggcctctagattctttgtctcagagccctctgggctctctcctctgagggagggacctttctttcctcacaagggacttttttgttccattatgccttgttatgcaatgggctctacagcaccctttcccacaggtcagaaatatttccccaagacacagggaaatcggtcctagcctggggcctggggatagcttggagtcctggcccatgaacttgatccctgcccaggtgttttccgaggggcacttgaggcccagtcttttctcaaggcaggtgtaagacactcagagggagaactgtactgctgcctctttcccaccttcctcatctcaatccttgagcggcaagtttgaagttcttctggaaccatgcaaatctgtcctcctcatgcaattccaaggagcttgctggctctgcagccacctctgggccccttccagcctgccatgaatcagatatctttcccagaatctgggcgtttctgaagttttggggagagctgttgggactcatccagtgctccagaaggtggacttgcttctggggggttttaaaggagcctccaggagatatgcttagccaaccatgatggattttaccccagctggactcggcagctccaagtggaatccacgtgcagcttctagtctgggaaagtcacccaacctagcagttgtcatgtgggtaacctcaggcacctctaagcctgtcctggaagaaggaccagcagcccctccagaactctgcccaggacagcaggtgcctgctggctctgggtttggaagtttggggtgggtagggggtggtaagtactatatatggctctggaaaaccagctgctacttccaaatctattgtccataatggtttctttctgaggttgcttcttggcctcagaggaccccaggggatgtttggaaatagcctctctacccttctggagcatggtttacaaaagccagctgacttctggaattgtctatggaggacagtttgggtgtaggttactgatgtctcaactgaatagcttgtgttttataagctgctgttggctattatgctgggggagtcttttttttttatattgtatttttgtatgccttttgcaaagtggtgttaactgtttttgtacaaggaaaaaaactcttggggcaatttcctgttgcaagggtctgatttattttgaaaggcaagttcacctgaaattttgtatttagttgtgattactgattgcctgattttaaaatgttgccttctgggacatcttctaataaaagatttctcaaacatgtcagagtgggggcagcttatgccacctgagtcctcctcaaccacggaaaactatttcagggtagccacaagtgatccagagggctgcacttctctaaccatgttgctaacctggtcattccactctgggttcctgaaatgccatttcagacatgttgaaacaatgtaggctcagtactcagtgaacacggaattc

SEQ ID NO: 61667 - DNA, 557 bp, Homo Sapiens
tagtaaaagaaggattttaggtttctttggtgaaacaaaagcagatataaaaagttacaaagattttagattttcattcacaaaaaaagtcattcacattttacactatacacgttatgatataaatacaggaaagtattatgtgcattgtaaagagaaaggaaaaatagaaacctactagatcaacacagtgttgttctgtgctctaaaatacctaaaggtggattacatttaatgcaacaaccaagggaacctgcttaaacatactgtgtattattgtagctagagtcattccttctaagccaaaggaggttttataaaaaagaatcaatattgggccaatccctttgtgccctttttctctttttctatgtgcattttattttttgtctactcttcttcaagttgctctaaactgaaattagggaaggagtctcactttccattacaggtttttctttaaacattaaattaagtggataaggattcaaagtcatcttcagcagtcactttattcaaataatggggagaaaacagagtgggaagagatggggaga

SEQ ID NO: 61668 - DNA, 844 bp, Homo Sapiens
  misc_feature (329)..(329): n is a, c, g, or t
  misc_feature (497)..(497): n is a, c, g, or t
  misc_feature (548)..(548): n is a, c, g, or t
  misc_feature (629)..(629): n is a, c, g, or t
  misc_feature (670)..(671): n is a, c, g, or t
  misc_feature (742)..(742): n is a, c, g, or t
  misc_feature (754)..(754): n is a, c, g, or t
  misc_feature (792)..(792): n is a, c, g, or t
  misc_feature (812)..(812): n is a, c, g, or t
  misc_feature (828)..(828): n is a, c, g, or t
gtaggcgccgaccgctcccgcctgccccctatgggcccccgctagaggcgccgccgccgccggcccgcggagccccgatgctggcccggaggaagccggtgctgccggcgctcaccatcaaccctaccatcgccgagggcccatcccctaccagcgagggcgcctccgaggcaaacctggtggacctgcagaagaagctggaggagctggaacttgacgagcagcagaagaagcggctggaagcctttctcacccagaaagccaaggtcggcgaactcaaggacgatgacttcgaaaggatctcagagctgggcgcgggcaacggcggngtggtcaccaaagtccagcacagaccctcgggcctcatcatggccaggaagctgatccaccttgagatcaagccggccatccggaaccagatcatccgcgagctgcaggtcctgcacgaatgcaactcgccgtacatcgtgggcttctacggggccttctacagtgancgggagatcagcatttgcatggaacacatggacggcggctccctggaccangtgctgaaagaggccaagaggattcccgaggagatccctgggaaagtcagcatcgcggttctccggagcttggcgtacctncgagagaagcaccagatcatgcaccgagatgtgaagccctnncacatcctcgtgaactctagaagggagatcaagctgtgtgactttcgggtgagcgggcagctcatcgactncatggcccactncttcgtggggcacgcgctctacatgggctccggacggntgagggcacacatttactcngtgcagtcggacatcntgaagcaatggccctg

SEQ ID NO: 61669 - DNA, 348 bp, Homo Sapiens
  misc_feature (318)..(318): n is a, c, g, or t
attttctcctgaagctgaaaatgtttcacccatataaatgtggcattttagactctagctataaacctcatcgaccagtatgttttcagagttgttcacaacaaaatattattcgtttctaaaatcagttttcactttttggtgatagtattccaggctggactgcttgaattttagatgcagagatcattttatatatatctgtcaatgtaatacagaaaaattacatgtgaattgtttatgtgccccctctacgtaggacacagtatcaatcactcaataagcactgtaacatcaggtggtgtttgggataaatancctctcgggtttcttcaatcccactaccat

SEQ ID NO: 61670 - DNA, 476 bp, Homo Sapiens
tttttttttaaagatacataaaaagggttttatttatttaacaaacagacaattgaacaaacaaacaatggaagcaagtcatttgccaaaaggaacacagagggtcatgatgatctactcctccaaggatttcagggttcccagacgcctagttttctgtctagttctggaagatgttattcttggggagcaataggtcctcgagtttggggctctttcaggttctctctccatttccccattctgcgggcgttcagcttcccttgggaccccaggcgtctcgggctgggtcgccgaccggggcgtttctggggtctctccctctggctccagaatctcctaacgcgcaggtgtccaacgtgaccagcgcgattcaccgctctaatatctctggttttccaagaacttgctcagtcgtcctgccaggcgggcccagatggttccatgaagttccaggcttttggtgtcccaaacaa

SEQ ID NO: 61671 - DNA, 2503 bp, Homo Sapiens
gtcacaaatgttttccttttgatttttttcagaaagccattaaaaaaatccaaagaccattcttagcttgcaggctgcacaaaaacaggaagcaggcggggtttgcttatggactgtggctttcccacccttgttcttagatagggacacaccaatatatcatgattagttgtaaaggatactgccagtaacatattattactggttagttgtaagaatatcaaagttagtgaataatttgcttttaaaataaattattgttgatttatttttataaataaatggcacagggcatctcatgctcttgcattctaatatattttctggaattgatgcaaaagtggtggcagtaaagtacagagccggctaagcagcagttttgtcttaagtaactgtggtgatcatggacaaccattgcgctgaactgctcttcatggtaaggatttcagtgtttcagagtaattcattaacctagagatgttttaaaaagttgtatcggccgggcgcggtggctcaagcctgtaatcccagcacttcgggaggccgaggtgggcggatcacgagatcaggagatcgagaccatcctggctgacacggtgaaaccccatctctactaaaaatacaaaaaaaattagctgggcgtggtggcgggagcctgtagtcccagctacccaggaggctgaggcaagagaatggcgtgaacccgggaggtggagctttcaatgagccgagattgcccctctgcactccagcctgggtaacagagcaagattccgtctaaaaaataaataaaataaaataaaataaaataaaataaaataaaataaaagttgtatcaaaatctgctgcaccatgggagtgttttacacatgtgatgtggcatctaccttatgtaccataatggaaaaatgtttgagaaccactgcactaggccaaaggctgggatgtgtatactttgctgccgtgtataattgtatgtccttgttctctaaatggaattggttatgtttagtgaacagttaggtggttctccgtgtgtttatatacacagacgatccccgaatttggatggttcaacttaagagttttcaaacttacgatgatatgaaagtgatatacatttgatacattcctacaacttacaatggggttatgtcccataattgttttgacttatgatattttcaacttacaattgatgggtttactgagacataaccctcttgtaacttgaggagcatgtgtatatttgtacatacatgatggtgtgtgtttatacacaaaggcctgaatatacacaccatgagcatttgaaggtctttgtcaaggttgtttctgtttctgatctcttgcctactttaaaacccaagaggtagaacattatgcatattacaggcaaaactatgcttgagtttatagcaatgtagtttgtagaaaggattcctggatgttttactaagcctttcctcctccattcaacattatatgaattgttaagaacatataaagtaccactgttgaatgtgacttttctatactgttagttaagaaaccaagactagtgttagctgagtaactggcatgttgatgcaacctatacaggttttgtatttaattaggttccttattcagttattcaagtatccagttatttagtttcaaggtagatttctttgtttttatatttaataaaagacttgcatataagttcctcttcatgaaaatagtggctaggctagtgtgattttaagtatgtctggcaactcaaaatgtaatggattcatcaagctatttgggatttttaacataaaacacactgctgcttgattaatgtgttcagttttcccctggatatttgctattaggctgatagccatttggttggattcttctggagagtaattgattctctaaggtaatggggtgctgcagtgggtgtagcattcacccaggtcactagaatcctacctgtttcatcacatagaaggccctggccatggggaagagtgaatgcagcttctccggatgccttatttccacagacatgctgatatgctggaacagtctggctccaggagtattaatatacttttttgagactgtctacaaaatcctattttgtaaaaactatgcctttacatagacattgataggttatatttgttttataacaattgtgtacctaatgtttgtgattaattttgagatttatgtatatttataagcctatcttatgtaaatttttactctaagatgtgtggcacattactaataaagatgtggatttctatttatgtaaagtaattgtagcaatattcctagatgctacctaaatgattgttctgtccatttgccatcacaaatacttttatctttggatgattatgttagtcagaatatattaattagatttaaactttaaaataagaattacaacatagtttgaaattcttcctgttgaagtaattaaagttagtttataattcaaaaaaaaaaaaaaaaa

SEQ ID NO: 61672 - DNA, 6483 bp, Homo Sapiens
aagcttctaattgcagttcaaccacctgttacatatcttcaggaaaaaatcacaacctctcaacttcaacttcctcttctataaattagaaataacaataaccacacctgtaaccccagcactttgggaggccaaggcaggcagatcaagaggtgaggagattgagaccatcctggctaacatgatgaaaccctgtctctaccaaaaagacaaaaaattagccaggtatggtggcacacacctgtagtcccagctactcgggaggctgaggcaggagaatggcgtgaacccgggaggtggagcttgcagtgagccgagatggcgccactgcactccagcctgggcgacagagcaagcctccgtctaaaaaaaaaaaaagaaagaaagaaagaaagaaagaaaagaaataataataaccaccattcctatctcaacagcttgttctagaaatttttaaagcacagtatcacaaacagcactacataattgtaaaacatgtatgaatatatacatccaaacaacagcaatgtcatagcctatgggtagatataatcttatacaatgtaccaaaatcccaatttacttcactagacaaactgttataccaaattctgtacacagtatatccaagaaaatgtgttgtttttattgagaaactgaacctagcttgggaacacatgtgcacagtctagttcataatatttggtgcaagtatcattctctaatatagatttacatttttgcaagcaaatttttacttgcaatcgtaacatatccaaattttccctttttactcaatcagaacttagtgtaaagtactacaagttagttcttcggatttcatgctaagaaaataatgcagattttctgcattattatggtcttcacagaaaccttaactatgatgaatttaaaagtgcaaaataatccaggataactttatgatttcacattttttaatgttaaaaataatgccatcattaattagaaaattctaaaatcattacttccactttcttaggcaaaatatcaatatactctcatttgccaaataaattaaaagatctcctacaaacacaatctcctaaattgtggttttatggctttaatgttttatgtgtggcaactattgatgctagttaaaattttagaaactctttctttttgattccctacagttgtctacaagaaccttattgtagcatgatcctgccagactttatactatttgttgctccaattaaaactgtttaaaacatgaatttgaaaaatcttattttaactataattttgtagctgaaacttttttttctaaactttgcaaacattctatgcaacctgaattagtgctgagaaaattggatcttaatggttgctcaatgttcttcaacaggtgaaaagcataataaaacatgctcatctgaactccacccattttcaatttcaacatagcatacctcgtgtttattcttagggcaaattcaaaattgtacatattaggattggttattactgaagataatttatgcaatcataagccaaagatgctaagttggcaaaaagaaaacaatgtaagtaagcaaactctaacacatgtggacacaccctctcagtatataaaggcttgtcactgtccttggtagcaggcactccctgggctaaacagcatcaccatgtctgttcgatacagctcaagcaagcactactcttcctcccgcagtggaggaggaggaggaggaggaggatgtggaggaggaggaggagtgtcatccctaagaatttctagcagcaaaggctcccttggtggaggatttagctcaggggggttcagtggtggctcttttagccgtgggagctctggtgggggatgctttgggggctcatcaggtggctatggaggattaggaggttttggtggaggtagctttcatggaagctatggaagtagcagctttggtgggagttatggaggcagctttggagggggcaatttcggaggtggcagctttggtgggggcagctttggtggaggcggctttggtggaggcggctttggaggaggctttggtggtggatttggaggagatggtggccttctctctggaaatgaaaaagtaaccatgcagaatctgaatgaccgcctggcttcctacttggacaaagttcgggctctggaagaatcaaactatgagctggaaggcaaaatcaaggagtggtatgaaaagcatggcaactcacatcagggggagcctcgtgactacagcaaatactacaaaaccatcgatgaccttaaaaatcaggtaagaggtatttttaaatccagctttaagtatcttgtccatgtaatccagacagatgaatcttaaattaagcacaatgtggctgttcactatgcttacccatgttactttcttccttcaaaaataacccagtctcatcaaagataaacatctgtgaaactatggtcatggcaatcttcatccagcaagtgtgctacttgtcttaagaggatgggagatttactaagcacttttgaggttttaatgagcatacaatgagtccacagttaaaatatgctaggctatttacaaatgtagaaactgaaaaaaaaaatcatgatatgaatcagaacaaaatgttattcagactgataacaagccatattcagtaccaacatggcaagaaaaataaattttccagtatgaaaatgggacactgcttgcttctaaggaatttctgaattgtacctattgtgtaccagttcagagtgtatttatttattagtatttatcatgagttaaacaaatgcaggtgtgagtcagccaaagcatggctgaaatacatggaaatcacatagtctaaaagaggagggcacacttacaggaatacatctatataattccagttagttttcagaaaggaataattcgtgtacagaaatacaagactggagaaattccaagagaacaaataattcaaagttaagtatatgggtaagcctgcaatatttcatatttaaaataaaaaattttcccaagattttgtaagagaacaacataaaagtgcagagtgcatctatgtcactacaaaagccatatctgcatctgacctcttctcaaataactgtgcctctccctccagattctcaacctaacaactgataatgccaacatcctgcttcagatcgacaatgccaggctggcagctgatgacttcaggctgaagtaagttaagtgatcgttgtataatactatcacaacgaatacatcagtggtttttaacaatgacttgggatgccctcaataacatttacatttttctgaattcacccaaagttaaatagtattggagttatctgagaaattttccatgtcagtgttacctttttggcaatattaaaggaagaaaatgcatattaaagtaactgctaaggttttttccattaaaccactattacttctaagagaactgtacatgacaaatattgccattacatgagatcaactatgtagttgctttttaaatagtctctgcccagatacatctcccctatataagttataaccagtattgatatcatgcttgtttcaggtatgagaatgaggtagctctgcgccagagcgtggaggctgacatcaacggcctgcgtagggtgctggatgagctgaccctgaccaaggctgacctggagatgcaaattgagagcctgactgaagagctggcctatctgaagaagaaccacgaggaggtgacacaaaagttatacttttcccagccaaaagagagttcattatggtcctcgtgtagccaataaatctttctgttcctcaaacaggaaatgaaagaccttcgaaatgtgtccactggtgatgtgaatgtggaaatgaatgctgccccgggtgttgatctgactcaacttctgaataacatgagaagccaatatgaacaacttgctgaacaaaaccgcaaagatgctgaagcctggttcaatgaaaaggtaaagtaatcttccttatagtgaaactcatggaggttttatcatttcagaatttcctcacccttttccttgtttttaatactctagagcaaggaactgactacagaaattgataataacattgaacagatatccagctataaatctgagattactgaattgagacgtaatgtacaagctctggagatagaactacagtcccaactggccttggtatgttaactctcatgaaatgacttcaactttatcatacaaagtttcatgctcacctaagaatatgcaatgcaacaaaaaaatgcagagttggaggtaagaaagagaaaacaaagtgaagctcatgttaatggaggaaaagtactactagtgttgatctaaaagtgctgaaactgaaatggtgccattaaacatacaacaaattctgttcattttcttattcttctatataatgccttactaaataatcaaataagcgtcaccatactcaactgaacaaggaagtcactaagccacaaaaaaatccgtttcagaaacaatccctggaagcctccttggcagaaacagaaggtcgctactgtgtgcagctctcacagattcacgcccagatatccgctctggaagaacagttgcaacagattcgagctgaaaccgagtgccagaatactgaataccaacaactcctggatattaagatccgactggagaatgaaattcaaacctaccgcagcctgctagaaggagagggaaggtaaattataacatgaaaagttatcccagtttcttttattcaatattccagatagcaaggcttatctaaaccccaagaagatgccagagaatgagaggaagggaggagagagggtagagtacagaaaaaggagtacgcaaccgcaatctcactttctcatgaatttggcccaaaatgattcttaagagttctgtgaacttaacattgttttcaaaggatgggttttaaaatatatacctggcagggttttattttttcaacacgttttgcttattttctaaattaacggcaactggaaagctacccaccgttttccaacgttagagataaccgaatgtgacctcaccccgtttagttccggaggcggcggacgcggcggcggaagtttcggcggcggctacggcggcggaagctccggcggcggaagctccggcggcggctacggcggcggccacggcggcagttccggcggcggctacggaggcggaagctccggcggcggaagctccggcggcggctacgggggcggaagctccagcggcggccacggcggcggaagctccagcggcggccacggcggcagttccagcggcggctacggtggtggcagttccggcggcggcggcggcggctacgggggcggcagctccggcggcggcagcagctccggcggcggatacggcggcggcagctccagcggaggccacaagtcctcctcttccgggtccgtgggcgagtcttcatctaagggaccaaggtcagcagaaactagctggggtaatctagaattagttttaacttcctgtgatggtttttttgcgctttaagctctagagttgttttaaaaaattaaaaatcttagagacggttccgtttgcatttgttcacaaactactcttaacaccagccgtgaaaaatggcatgatcaaaatgtcataccttaagcatttttttgggcttaacaatgtaaagttgaaatttccttctttttacaatatttgcttgttaattactaaggatccctacagactgtttaaaattttttttccatcattcacacagatactaacaaaaccagagtaatcaagacaattattgaagaggtggcgcccgacggtagagttctttcatctatggttgaatcagaaaccaagaaacactactattaaactgcatcaagaggaaagagtctcccttcacacagaccattatttacagatgcatggaaaacaaagtctccaagaaaacacttctgtcttgatggtctatggaaatagaccttgaaaataaggtgtctacaaggtgttttgtggtttctgtatttcttcttttcactttaccacaaagtgttctttaatggaaagaaaaacaactttgtgttctcatttactaatgaatttcaataaactttcttactgatgcaaactatcccaatttgtcagaatttatctttacttaagtacataatactctttaaaattaaagattagtaacccatagcagttgaaggttgatgtatccagaaattcggaagacagaactattgtcatgccttttctaagttttttaatcatgtatgttcagaccaccgtcagtaaattcactgagtaaagtctgtaaatccccaatattactctttaagatacacaatatgtggaaggctcccagctctctggctttaaattatttcaatcctggaaattctggaatatctcaaatataacccccaaaataataataa

SEQ ID NO: 61673 - DNA, 499 bp, Homo Sapiens
  misc_feature (453)..(453): n is a, c, g, or t
  misc_feature (460)..(460): n is a, c, g, or t
  misc_feature (465)..(465): n is a, c, g, or t
  misc_feature (484)..(484): n is a, c, g, or t
  misc_feature (487)..(487): n is a, c, g, or t
  misc_feature (498)..(499): n is a, c, g, or t
cctcagtcagatttcactttatttgtatcgatgataatattaactcttcagatttataaaatgacaaaacttgataattacctggaaacaatttattattaactaggttaaccctaaatccatcaagaaaaaccacctaacatattcagtgttaaaaagagacattacgactagcctggccaatatggcaaaaccctgtctctactaaaaatacaaattttagcagggtatagtggtacgtgcctgtaagtcccagctactcagaggctaaggcaccagaatcgcttgaatctgggaggcagaggttcaagcgattcccccgcctcagcctcccgagtagctgggatcacaggcatgcaacaccacgctcggctagttttttatatctttagtagagatgggggtttcaccatgttggccaggctggtcttgaactcctgcctcatgatccgntagcctncgctnccaaagtgctgggattacnggngtggcccgttnn

SEQ ID NO: 61674 - DNA, 552 bp, Homo Sapiens
  misc_feature (435)..(435): n is a, c, g, or t
tcacagcatattagaaatgtttattaagaataatggcatgaactgcttttaacaatttagaaaagacccattccccccgcccccccccgcccccagatccagggcacttcctctaagtaaacacaaatatttctgtagtgaactgtatgcatatgcgcactgagtaaaggttataagaagcctcaggtcaggtcttaccaccaaacttgaaaacacttggaatgcagctgggcagggacttgagcaggttttgtcttgataagcaggtaagaatggcagaacactggcttattgtcaaccaatgtttttttatatacctgaagtattcacagcaacttattttaagaagctttttaaaagttctacacctccacccccacaactccccaatccagaacatggaacaagggtgtggagctgtttgatggacttggnctgttcttaacatttaatactcttaactcctaggccaggtgtggtggctcacgcctgtaatcccagcactttgggaggccgaggcgggtggatcacttgaggtcaggcctcgtgccg

SEQ ID NO: 61675 - DNA, 475 bp, Homo Sapiens
ggttggaagggtgagccatgtgttttttttagtttaatttttaaaaaatttaaaaaattccctattcaaaggtcaaaaagccacataagttttgatgatgatcaatttgaacggaggctcgagatggactgagaggactgagacacagaagtggggggaccatggtttttactggctggaccacagggggaccctgtccacccgcctgggttgaggaaggtgtctggggtgctcaagtgggtttgttctcagcaatgcaggcatagtcagctcttggatcctccttggtgcctctcttgtctctgcccctgaggtcaggtccctcactgctgggcactggcagcctctgcagagatgcatagtggagttcctgctctgaggagccctgggcctgggaccaggacagaaggtgccagctcctctccagcctctttacatcattccgcgataacattaggtcagggatcagggactg

SEQ ID NO: 61676 - DNA, 726 bp, Homo Sapiens
  misc_feature (600)..(600): n is a, c, g, or t
tttgattttcaggttttatttgcctgttataattctgatattatgtacatatatatatatacttttgtttttttgtagagggcttatcagtagaccaagcacaggcatacagggaggctgtggctgctgagcagtgctgggagaaccaatctttcctttttttttgtctgtttttatttttcctgggatgggttcatcaaagctaattgctatcaatcctagaaaccacctagggactcagacatctgcctacacactagtggcgtaaagggaaggacaggggtacaaactttcaaagtcacggtgtatttacattcccaaggtgggggcgggaggaggctgaggaagacaactgttcagacgatagggagggcagggctgctaaggggtcctggggggtgggggcggctggaagaggccggccagtgggcagtgggaggagtgtgcccgccccgcagccaggtagtgacggaggccacttggatgttgtgtggtgggtaccgaaggcagcgtgtgtatggagctcctgaaagccggcccatggggtggctgggcggcgggaaagagcggtgctgccagagtgccatgcttggagtgggnggactcttggctctccagatggccttccctgcccccgcgggcagtttgcccggcttccaatccggttgagcagagattgccaagaaagacagccgatggtgggaccaccgagtctggtcccagtcc

SEQ ID NO: 61677 - DNA, 459 bp, Homo Sapiens
  misc_feature (46)..(46): n is a, c, g, or t
  misc_feature (377)..(377): n is a, c, g, or t
  misc_feature (442)..(442): n is a, c, g, or t
tttttttttttctgtaggatttttattggtggcacctggggcaatnggagggagtcctcagcacaggcgctggggtgtgggaaatttcagaggcccctcctgggatgtcacccttcaggtcctcatgagtcaatcttgagtttctccttcactttctgaaatgtctctgaaaaccactcccgcatcttggcagaaagttcactctgtttgatgcggctgatgagttcccgagccttgtcctccagtgtgtttccaaactccttcagcttatccaaggcactggagacgtctggggtcccctgggctggggctgggcttccaagacgatcgacagaaccaccaccaggaccgggagcgacaggaagagcctcatggcnaggccggaggggcactctctcaatcttcctgactctgtggggtcctcagaccaccttaagtcccnttccccactcagaatgt

SEQ ID NO: 61678 - DNA, 753 bp, Homo Sapiens
aaaattaggctagtacgaggctgggtgttctgtgtggcggcacatgaagaagcgcctcttgatgccagtaggggtctggcaaaccacggacagaccaggcacatgggaccaagccggaacctcctgctcaacgggaagtcctaccccaccaaagtgcgcctgatccgggggggctccctgcccccagtcaagcggcggcggatgaactggatcgacgccccggatgacgtgttctacatggccacagaggagaccaggaagatccgcaagctgctctcatcctcggaaaccaagcgtgctgcccgccggccctacaagcccatcgccctgcgccagagccaggcctgccgccgcggcaccgccacctgcgcccgtcaacgacgagcccatcgtcatcgaggactaggggccgcccccaccgtgcgggccggccccgggcccttcgccggcccaagcggcccctttcccgagccagccttgcgggccgcgcccctcagttgtggtaggtgccccaccttcccggcccttcacctgcagagaaacgcgctcatttggcgggacacttgcggggagcgagcaggaagaagcgcggtaacgtaattccggagattgccgaggagttggtcgataaggcttggtgttactttttggggctggagcggacgcatgaggggccaccccgttgcccttgtgctggcggggcctttgtgcccggaggccgggccctaaggttcggggggtctggcgagggtc

SEQ ID NO: 61679 - DNA, 713 bp, Homo Sapiens
  misc_feature (10)..(10): n is a, c, g, or t
  misc_feature (701)..(701): n is a, c, g, or t
  misc_feature (705)..(705): n is a, c, g, or t
  misc_feature (711)..(711): n is a, c, g, or t
tgcatggaantcctgatctccgttggtgcagattatgttggcagccggtgactgcagaaaaaataaaaatatcaaaacagaaaaaaaacaaggccctccccaaaccaaatgacttaaaaaacaaaacccatatggcgaggaatggagagaggatcctattgtcttggaggcccatggaatctacttccgtctatgaaacgttctccgaaaagagcatcgctcgctggctggctgggacagctctgttctctgtgtttcctacttctgtgtacattctcgggttcaagtttgcttggattttgaccttttttttaatgtttaataaaaaaagcagtgtctgctgccatgttgcgtctctttctctctttgtctctgtatgcctctgtctctgtgcttgtagctgttccttggagcgcggtgtggtgttcttgatgtagtgagctcaagtctgcggctgtttctggggacgtggtggaggctgcatgttctgttctctccaggaagagctagtggttttctaccctgtgtgttggtgagcaatgtgcagaggcagagccgctgaagtatggttcctgaggggtggcgaagcaccgccctcactccaggtcacctcatcagccctcgtttttttttgggccccaccttggggcttgccaaactgagaggcattcaaaaccatggcacaagccagcccctggccnctancccctngc

SEQ ID NO: 61680 - DNA, 508 bp, Homo Sapiens
  misc_feature (13)..(13): n is a, c, g, or t
  misc_feature (56)..(56): n is a, c, g, or t
  misc_feature (336)..(336): n is a, c, g, or t
  misc_feature (431)..(431): n is a, c, g, or t
  misc_feature (439)..(439): n is a, c, g, or t
  misc_feature (458)..(458): n is a, c, g, or t
  misc_feature (463)..(463): n is a, c, g, or t
gtgattcaaggtnttttgcttaactgcaactcaggacagtgagcccaagccaggtnttgggctgggcccagaacaaggctcaaatgcggacttggacacacttcgaaggagggctgctctgcccctgctgttcgggcgtggggggtggggggcgggggccactgagctgggccttctgtcctcctccctggatgtgcagacatgggccatggcttctgccagggactcacatgtgagctgggccttctgtcctcctccctggatgtgcagacatgggccatggcttctgccagggactcacatgtgagctgggccttctgtcctcctccctggatntgcagacatggggccatggctttctgccagggacttacatgtcctcctcactgaacaccagagacacctgctaacttggggaagacgcagggttnaggatttntgttttttccagcccagcnttttnaccctttgggaagcagcaattgggaagggaaaggggaattacatt

SEQ ID NO: 61681 - DNA, 353 bp, Homo Sapiens
  misc_feature (271)..(271): n is a, c, g, or t
  misc_feature (332)..(332): n is a, c, g, or t
  misc_feature (341)..(341): n is a, c, g, or t
tgcaggaacagtggtttattgaccaggcaggcctccccagcccggccactgctccccaagggctcgggctgtgtgggctggccttggcagaaggtggacaatcctctaggtccaaggacatgggggtcacagaggtgggggccttggcacacatttcagaggagagttcccaaaagtttccagtggctgtcccaggcaggtatcaggttcggcccacacctgagtgcccatactctgggcagggctgggaggcacctgacctcacctccangcagctctgcaagtgtggggtgaaaaaaggtgaatctgtgtgaggatggggttggctgaanttgttggtnaatggcctgggc

SEQ ID NO: 61682 - DNA, 622 bp, Homo Sapiens
ctttttttttttttttttagggaacaaatttattttgatttttctgaaaatatcaggaactatgaaaaaacaagctcgatttctggccgtaccaaaagcaaaatacaagtaaaaataacatttgaaaaccaagtttaacctcagagaatcatgttttaaaatacaaagtttaacattctttcctctatggagctaaacaagttttctaaaccataagactgcagtttttttatttttttaactgacgtaattttttaaaagaaaaaacaaaaggggaataaacagcacttcctaccctggaatctcgtcatttataaaataacatgctcaaatgtcagtgaaaataaacagttgataaacctgaaaacaagtcttttaatgagttcaggttacaaccgaacacaggattttgtaactgggaaagaacagcttgtgtaacaaccgattcttaccaaatacaaataaatataaaagacaacttaaaaacaaactgtataatcaaaatctttccgtaaaatagcagctttcacaaagtaaaaacaatttagttccacagagttgtatgctctgtaggcatatggccaattttcttccgagtccttttgtcttgcactatcaaaat

SEQ ID NO: 61683 - DNA, 602 bp, Homo Sapiens
ggacttcattttttttaatagatatagatatagatttatatttatatataaaatagttttttacaaaaaaatcaaccaaacaaaaaattaaaatcaacttaaaaaaacaacaaccaaacaacaataacaaaattcaaacaggagcagagatggggctgaggcataggggaggcccctagcgctgccctgaggaggagggggtgagaggctgaggcactcagtctcccttctgcttgggtgcttgcacagtcccattggccagagcagtggggttgcctggggatgaggcatttggtgtctgggaggtgcctcgagaggtgtgtggggggcgcaggtaggtgctgaagagtttcccatagagtgggtcatggagggagaagttctggaactgacctggacaaataagagatggggaaaagtgaaaagatctaagaacgagaagagaatctccctgcttttttctcagaactaaaacaccttgtgcctctactctgtttaacttctcaaatccaggttcaggtcctctcttcctttctagcctgttcctcccagccttacttctcataggttctgatctccagcactggccactaacccttgtt

SEQ ID NO: 61684 - DNA, 476 bp, Homo Sapiens
gtatttcaccgtgtttgcctggatggtctcgatctcctgaccttgtgatccacctgcctcggtctcccgaagtgtggggattacaggcgtgagccactgtgcccggccaaatccagaatccttcaccagtacccaacagtccatccacaatcttaacgattgccctctactgctccttgggccccctgtccccaaaagcctgtccaggcaagactcacagcctcagatgagtggcaaccaccagaagcggccgtctcagggctactgccatttgctttcgtgttcctcttcgctgctgctggaacaccagggcggtttctctgccaatattctttgaactttttcttggctgcagctaatttactctgtccagtttcttctgccattgtggggtggggagggaggcggggctggggccacgtcagccaaatcccagcgagcgctgatcaacacgtccagtcacccttaaagaatca

SEQ ID NO: 61685 - DNA, 2212 bp, Homo Sapiens; identical to SEQ ID NO: 31839

SEQ ID NO: 61686 - DNA, 6069 bp, Homo Sapiens; identical to SEQ ID NO: 31937

SEQ ID NO: 61687 - DNA, 320 bp, Homo Sapiens
tatagttagcattttaataaaccagagaaaaatcggagacagttttacaatcgcttcatgtcaactacaatggcactgaatgaacaggtttcagctttatacagcattttgcaacatcaacatgcctaggttttttttatttttaaagtctgctgcctactcgtatgtaatatgtgtacataaaagcggcacgtggtttttcgtttaagagtaatctaatatacagaattttggcacgtaaagttttgtacacggtcagtccgggtcctaagggcgcagggtagggcatcccactgggagttcaaaggggaaacgaagat

SEQ ID NO: 61688 - DNA, 1389 bp, Homo Sapiens
atgtctgctgaagtcatccatcaggttgaagaagcacttgatacagatgagaaggagatgctgctctttttgtgccgggatgttgctatagatgtggttccacctaatgtcagggaccttctggatattttacgggaaagaggtaagctgtctgtcggggacttggctgaactgctctacagagtgaggcgatttgacctgctcaaacgtatcttgaagatggacagaaaagctgtggagacccacctgctcaggaaccctcaccttgtttcggactatagagtgctgatggcagagattggtgaggatttggataaatctgatgtgtcctcattaattttcctcatgaaggattacatgggccgaggcaagataagcaaggagaagagtttcttggaccttgtggttgagttggagaaactaaatctggttgccccagatcaactggatttattagaaaaatgcctaaagaacatccacagaatagacctgaagacaaaaatccagaagtacaagcagtctgttcaaggagcagggacaagttacaggaatgttctccaagcagcaatccaaaagagtctcaaggatccttcaaataacttcaggctccataatgggagaagtaaagaacaaagacttaaggaacagcttggcgctcaacaagaaccagtgaagaaatccattcaggaatcagaagcttttttgcctcagagcatacctgaagagagatacaagatgaagagcaagcccctaggaatctgcctgataatcgattgcattggcaatgagacagagcttcttcgagacaccttcacttccctgggctatgaagtccagaaattcttgcatctcagtatgcatggtatatcccagattcttggccaatttgcctgtatgcccgagcaccgagactacgacagctttgtgtgtgtcctggtgagccgaggaggctcccagagtgtgtatggtgtggatcagactcactcagggctccccctgcatcacatcaggaggatgttcatgggagattcatgcccttatctagcagggaagccaaagatgttttttattcagaactatgtggtgtcagagggccagctggaggacagcagcctcttggaggtggatgggccagcgatgaagaatgtggaattcaaggctcagaagcgagggctgtgcacagttcaccgagaagctgacttcttctggagcctgtgtactgcggacatgtccctgctggagcagtctcacagctcaccgtccctgtacctgcagtgcctctcccagaaactgagacaagaaagggggacaattcccggaagtggaattacagagtcaaaggacatgcatttttcaagcctcggatgcatcttactagatgtcctatag

SEQ ID NO: 61689 - DNA, 353 bp, Homo Sapiens
ttttttttttttttttttttttttttttttttttttcaaccataacataatatttatgggccctttataaagctatgtacatggggaaacaggtcaggacaggcctccttttgtttaaggggcaaagcattgggggcaaaaaaaacaaaccagttggagctgatggggctccagttaaggcaatgaaggctttgccacaccataaagggctcaggggaagggtcctaaaaaaccacccctgagcagcctggggggaacagccttttggccttctgcccagctcctggctgaagctgtgatctgtgtacctgtgactgcagggcttgaaaatggcggagggcttaggcagtttg

SEQ ID NO: 61690 - DNA, 428 bp, Homo Sapiens
tttgagaacataaattttgtgttcatttattatcccactgaataacaaacttgtaaatcataaatatatattacatagtaaaacaaagattagaccaaaatagaccatagtaccttaaacacttcctatgaattaacatatggactctatcatatgttcctttagagaattcaggatttttttcttttttgaatttggaagccaacttaaaagctaacaataattatttacattttggtgtgtcattactacttgtataactccaaatgacagaatatgtagataaagaaatgtaggtattctgaagaccagcttttgagcatccttaagaagtcatgaagatattaactatgtctttgaataatgatttactgattaagaattattaaccggctgggcatggtggctcatgcttgtaatcctcgtgc

SEQ ID NO: 61691 - DNA, 353 bp, Homo Sapiens
  misc_feature (6)..(6): n is a, c, g, or t
  misc_feature (8)..(9): n is a, c, g, or t
  misc_feature (14)..(14): n is a, c, g, or t
  misc_feature (18)..(18): n is a, c, g, or t
  misc_feature (26)..(26): n is a, c, g, or t
  misc_feature (81)..(81): n is a, c, g, or t
  misc_feature (112)..(112): n is a, c, g, or t
  misc_feature (164)..(164): n is a, c, g, or t
  misc_feature (297)..(297): n is a, c, g, or t
ctcgtnannttggngcangacgtcgnagctcatctctttggggtcacagttctattttgtttgtgagtttgtattattatnattattattattattattattattatatttnatttctttggtctgtgagcaactcaaagaggcagaagaggagaatgactttnccagaatagaagtggagcagtgatcattattctccgctttctctttctaatcaacacttgaaaagcaaagtgtcttttcagcctttccatctttacaaataaaactcaaaaaagccgtccagcttatcccatnctctgattgtcttctgacttaagggatttactgtggtgtaggttcttgccagccaa

SEQ ID NO: 61692 - DNA, 571 bp, Homo Sapiens
  misc_feature (518)..(518): n is a, c, g, or t
  misc_feature (521)..(521): n is a, c, g, or t
  misc_feature (534)..(534): n is a, c, g, or t
  misc_feature (570)..(570): n is a, c, g, or t
aactcacttaaaaatatcttctaattttcccttgtgagctcttctttaacctatgggttattcagaaatctcttacttaatttctgatggacatacatggagtgaaagagagaagtcaatggggactccaaagtttttgagtggagcaactggaaggatggcagtgcttttcagtgagtgggaaggaatgcaagcagagcagattttaatctctggaaatgtttgtgaaggctcgatattagttctatgtttgacagaattcatcagtgaagacaaaataacctcctgaggttattttggggcaagaacaggggtgcagttctggatctgttcagtggaaatgcccattaaaaagccatcaagatgtggaacaggcaactggatatggaaatattgagtctggggagcagtctaggttggtgtcttcagtgccgtatgtggtatttaatgtcacaggactgaatgagatgaccaaaggaatgaatagaagaagagaaagttatcatgagaagaagcanaanaaggggtcataangagactggttcatggtaactttttaaggaaattaana

SEQ ID NO: 61693 - DNA, 415 bp, Homo Sapiens
tttttttttttttttttttttgactgccgactgattccaagtccccaggagggctttattttttcttttcaacatcctgttctgcggcttccttggctctttttgcccgtatgccgaaaagccgggcgttggcacgggccatacggagactagcgaaggctttgaaattcttctcttcctcagtgatgactcgagctttctccttcttatagacctagaagagaaagacaggttgttaaacccacatgcaccaaagggcaagggaacaaccaagcgtcaggagaacccggaggacctcccggggattgggggtcaggttcgctgccataagtactgctgaaaagcaaccctgagtcaatcaccttccctgggatttaaaaaaaaaaagaaaaaccctccctgagctggacatggc

SEQ ID NO: 61694 - DNA, 2266 bp, Homo Sapiens
agtattgactgttaatgctttgcttgaagtgttacctgtgatcagaccccgacagtgtttaaggtaaagcgtggcctgtagatcccgggacgctcccagtttggccccaatcattcgttaccctcctggttctcagatccttcgaaatgtgcagatttgcagccctgcatcctgcttgtcactcagcgtggcccaagttttgtttcagaaaataggagccctattaggtcatccccagcttgttaagtctcattattgtgtgttttcccctgggttgttggaatttgacacagttttacctgatgtgatgcttgaaggcgaccctatgactctttttaaaggaagagtttgcaggacggttttggactggggcttgtgggaatggaggaggggaggtgggcacatggccggggaaacagctccaggctgcacgaccagaccagcgttcccaccctcaagagccagtgagaaaccttggggagaaaaagcaaggatgggcaaggcttccctgttcgtctccactcatatcaaaatttccagcctgagctgggtgtggtggctcacatctgtaatcccagcgtcatgggaggctgaggcaagaggatttcttgaagccaggagttggagatcagtttggccaacatagcaagaccccccatctctaaacagtaaaaaaaaaaaaaaaaattagccaggtgtggaggcacgcatctgtagtcgcagctactcaggaggttgaggtgggaggattgcttgagcccaggagttcgaggttgcaatgagctatgagtgccactgcatttcagcctggacaacagagtgagaccctgcctctagaaaacaaaaacaaaaacaaaaacttctcccagccatcgagaagttaaaatgtggctcttaagttagttactgaacaccatacttcagcgtgctgatccctacaatttctgtaacgttcctagtaatcaaccaagaagtcgcagcgctgagacctcctgcttgcgtggatgtaccttttttggcgggcttttcctattgtggtgctggtggtttgtttgtgttttaaattagatgcagtcttttaaaactgtgaggtttcctacctcgcacctgatacctgcattcaggtatcagcaaatgcaggtatcagcttctttgggggaagaaaacccaggatctctggccacttgactctgaggctgccttgcagaactgcacagcctccaccccacccactattttcgtgaccccgaggccacggcccaggtgccattcatcactgtgcagcatggctttcctgtgctagaggaatgtttatctcctccatccagccatggagagcaggaaaatagagttcaatatgggtgggcattgcaacgccagcgcctctttctctgggggaagactctcccctctgtataagttgcagacacccactcttgtcacacatttggctctgcccacctggcctcacaggcatttgagtttgtgttccacccctccccatcccagagcccagcagtcagcagtgagagaagccaaatgtgtgcagggagtgcgaggcggcagctaccatgcaaactccaggggcacaccgccccccagtaatctctccccagagtgcatcaggcaataacaggaagatactcagctgttcattatgacatgatttcccattttcaaacctgacaagttggtcttgatgctgttattcaaataactgaaagtaaatggttgtgaacaaggaatttcagatcacagactcagtaagcctggccagcccccaaggctgtgtcttccttaaagttgggatctctgtattatctcatactctatagtagagcaataaacataagctgacttatgtgatcacttaaaactaccaggaagaaacattttccgtaataaatttagtgtaggattgctttgtcttctcacactcacttttcagaaaagaaaatgtaagtattgccaggcgcggtggctcacacctgtaatcccagcactttgggaggctgaggcaggtggatcacttgaggtcaggagttggagaccagcctggccaacatggagaaatcccatctctactaaaaatacaaaaattagccgggtgtagtggcgcatgcctgtaatcccagctacttgggaggctgaggctgaagaatcacttgaatacaggaggtggaggttgcagtgagctgagatcgcaccactgcactccagcctgggcaacaaggcaaggctccgtctaaaaaaaaaagaaaaaaag

SEQ ID NO: 61695 - DNA, 2067 bp, Homo Sapiens
aaaggccggtttctacccgatgatctcttgggccccgtcccgagagtgaggcacggcgccaccaggcacccccgatacgcagcgtgttgtgaagtgcccttgtgagcagcgggggatagggaacagaaaaccagctgtcagcgacagcgaggtggtgccccagagagggctgcctcattcgcctggctgcagggtccgaggtcgtcttggtagcatttggcaggaatttatttaggaagcattcagcaaaccgagtgtgtgtggtgctgggagatgacgacgaaatggccctgcccccaaggaagcccctcccctgggggcacaggtggggagggaggtcatgagctttgtgtgtgtgacaactgctgatgggaatgctattggcacgtacgaggggtgcctgtccgtgtcttgggagagcaaggaaggcttcccggaggagttgctgccaagttggcccagaaggatgaggaggagttcttctggtgaagtggggagggcagaggcaggatggtccctacggagcatgtggggacgctcgtgttcttccagaggatggaatgctgggcccgaagcctgaagtattgttagggtagagacaggcgggaggtgcgtggagaaggggtcatggaggtcttgttgggcagatggcggtgggacgtcccaggcagggggagcatcttgggcaagagcccagggtgcgaggtcatgcttatggcacattggaccagctggaggacagccagctcaggagagcagccggctggggtgtctgcccacgtgtggggcagggatgggctgcagcggggagggatttgggagcttctgtcgtagtcctgcagggagtgggagctgtgcaagaaggaagggcggagcggctgtgatccaatgactttgggaaggccactcctgtgatggagtgggggaagacagaccccaggccaggggtcctgagtcaaggcagtggctgaggaggcacctggggaaggtgatttggagaggctttgggggtaggtcctgggggtctggaagggctctaggccaggaattttcagactcctgggggcatcagaatcacctggagggcttgttaaagcaaagcttgcccccagcctcaggcagctgggcggcaggaatctgcatgtctaacaggctcccaggggatgctgacttgctggccagggtcccacactttgagaagccccgcctgaagcttacaggacagggcaggttcttgagccattgagttgggcaatgccatgggaagttgcaggtgcacagacgttgccttcctggctgcggttgaacctgggctccatttgtccccttggagctccaggcggccgggccgacttcgaccctgagctctcctgtctgatttcctttccaggtggcacgtctctgagcttcctggtgttggtgacaggctgcacatctgtgggcagaattccagatgctgaaatctacaaaatcactgccactgacttttaccctcttcaggaagaggccaaggaggaggaacgcctcatagctttgaagaaaatcctcagctcgggggtgttctatttctcatggccaaacgatgggtctcgctttgacctgactgtccgcacgcagaagcagggggatgacagctctgaatgggggaactccttcttctggtgaggccctgggtcccctgcagagggtgggccctgggtctcctgcagagggtgggccctgggtctcctgcagagggtgggccctggttggcatctgaggccttgacctccacttgcaccacccccgggttatggggcacctctggagagttaggacccaggcctgctctcagcacaatgagaggaaaactaaccctgaactccctgccaccccccacccctggcccctggaatgtgttagagtgtagatttggaaaagaaacctgcgccaggcatggtgcctcatgcctgtaatcccagcactttgggaggctgaggcaggtggatcacttgagttaaggagtttgagacaagcctggccaacatggtgaaagcccatctctactaaaaatacaaaaaaaaaaaa

SEQ ID NO: 61696 - DNA, 1811 bp, Homo Sapiens
gtaggcggggcgagccggctgggctcagggtccaccagctcacccgggtcgaggggcaatctgaggcgactggtgacgcgcttatccacttccctcctcccgcctccccccggggtggcgctcgctggtgacgtagtgagtgtgatggccgccgcgaggccgggaaggtgaagtcaggactggtggagtcaacacagtcaatcaatagccaacctcaacctgagacaggacagaagagaactcagaatctttttgtcttttggacttcagccatgtccatgatgcctaccctgtgaagatctctcaccatccaaaaaacgcaatgtccctgctcttctctcgatgcaactctatcgtcacagtcaagaaaaataagagacacatggctgaggtgaatgcatccccacttaagcactttgtcactgccaagaagaagatcaatggcatttttgagcagctgggcgctctcgcagaaggctttcaagtgaggatgtttgagtttcagaattttgagaggagatttgaggagtgcatctcccagtctgcagtgaagaccaagtttgagcagcacacggtccgggccaagcagattgcagaggcggttcgactcatcatggactccctgcacatggcggctcgggagcagcaggtttactgcgaggaaatgcgtgaagagcggcaagaccgactgaaatttattgacaaacagctggagctcttggctcaagactataagctgcgaattaagcagattacggaggaagtggagaggcaggtgtcgactgcaatggccgaggagatcaggcgcctctctgtactggtggacgattaccagatggacttccacccttctccagtagtcctcaaggtttataagaatgagctgcaccgccacatagaggaaggactgggtcgaaacatgtctgaccgctgctccacggccatcaccaactccctgcagaccatgcagcaggacatgatagatggcttgaaacccctccttcctgtgtctgtgcggagtcagatagacatgctggtcccacgccagtgcttctccctcaactatgacctaaactgtgacaagctgtgtgctgacttccaggaagacattgagttccatttctctctcggatggaccatgctggtgaataggttcctgggccccaagaacagccgtcgggccttgatgggctacaatgaccaggtccagcgtcccatccctctgacgccagccaaccccagcatgcccccactgccacagggctcgctcacccaggaggagttcatggtttccatggttaccggcctggcctccttgacatccaggacctccatgggcattcttgttgttggaggagtggtgtggaaggcagtgggctggcggctcattgccctctcctttgggctctatggcctcctctacgtctatgagcgtctgacctggaccaccaaggccaaggagagggccttcaagcgccagtttgtggagcatgccagcgagaagctgcagcttgtcatcagctacactggctccaactgcagccaccaagtccagcaggaactgtctgggacctttgctcatctgtgtcagcaagttgacgtcacccgggagaccctttctgaaagaagtatggccaaaagcactttaatgctgctgacattgttgtttttatgttcatttgctggagcgcaagacgtgctgacacagtgagttttctctgatgtatttaaggtgatgtatttgcttgagttactcctgtatcattgctcataatattggaaactaaaataaaacctagttggaaatcctt

SEQ ID NO: 61697 - DNA, 1550 bp, Homo Sapiens
caacacgttggcacgagaaacaccaatgctggttgctgtgctcacgtatgtggggtatggcgtactcaccctctttggatatcttcgagatttcttgaggtattggagaattgaaaagtgtcaccatgcaacagaaagagaagaacaaaaggactttgtgtcattgtatcaagattttgaaaacttttatacaaggaatctgtacatgaggataagagacaactggaatcggccaatctgtagtgtgcctggagccagggtggacatcatggagagacagtctcatgattataactggtccttcaagtatacagggaatataataaagggtgttataaacatgggttcctacaactatcttggatttgcacggaatactggatcatgtcaagaagcagccgccaaagtccttgaggagtatggagctggagtgtgcagtactcggcaggaaattggaaacctggacaagcatgaagaactagaggagcttgtagcaaggttcttaggagtagaagctgctatggcgtatggcatgggatttgcaacgaattcaatgaacattcctgctcttgttggcaaaggttgcctgattctgagtgatgaactgaaccatgcatcactggttctgggagccagactgtcaggagcaaccattagaatcttcaaacacaacaatatgcaaagcctagagaagctattgaaagatgccattgtttatggtcagcctcggacacgaaggccctggaagaaaattctcatccttgtggaaggaatatatagcatggagggatctattgttcgtcttcctgaagtgattgccctcaagaagaaatacaaggcatacttgtatctggatgaggctcacagcattggcgccctgggccccacaggccggggtgtggtggagtactttggcctggatcccgaggatgtggatgttatgatgggaacgttcacaaagagttttggtgcttctggaggatatattggaggcaagaaggagctgatagactacctgcgaacacattctcatagtgcagtgtatgccacgtcattgtcacctcctgtagtggagcagatcatcacctccatgaagtgcatcatggggcaggatggcaccagccttggtaatggcatcactattcatgaagttgtccaaacaagaaatacctatcatcgtttctctcctttatcccctgtatttagtcaccagtgcctatggatcatgcttccttaatatctttgaacctgtttacttctccatatctcattgttatttacttgacttagatttctgtccactttcacctggttttaatagccagccagtcataatagtagaggaatcagtcaagcaaaaatgctttggaagaattaaataagcaatgctgaacatcaggaattgtagatatccgtacagagagttccagtaaaattttatgagtccacgaccccttttctaagcagtctggtccatgttggtctcatacctcatatgcaggattcattcattcattaaatatttgtttcataaaaaaaaaaaaaaaaaa

SEQ ID NO: 61698 - DNA, 943 bp, Homo Sapiens
ggacctatgaagccaaaagacatgagttccatggtgaacgtcagaggaaggaagaagaaatgaaacagatgtttgtgcagcgagtaaaggagaaagaagccatattgaaagaagctgagagagagctacaggccaaatttgagcaccttaagagacttcaccaagaagagagaatgaagcttgaagaaaagagaagacttttggaagaagaaataattgctttctctaaaaagaaagctacctccgagatatttcacagccagtcctttctggcaacaggcagcaacctgaggaaggacaaggaccgtaagaactccaattttttgtaaaacagaagttccagagcacagaaggtcatcatcacaagcaaactttattaaaaaaaaactagaagtgtgctttgattttgctgttatttgttttatcacttctatatttggtgaacagccacagttactgatatttatggaaaagtactttcaagtacaaggtcaatacataagccagagtgaatgatactacaagttgagcatctctaattcaaaaatctgaaatccagaagcttcaaaatctgaatctttttgagcactgacttgaccccacaagtggaaaattccccaccgagactttgctttctgatggtccagtttaacagattttgtttcttgcccacattttggttatactttcggctattgttaagtgggtgtggaccctgactttgtctttcgagccggtccgtgggttatgcgggattccacctggatcaaaattggtcctcctttggtaaggcaccgggcccattccatatccggcggaaggacgggggggggaacatttcggccaccatgtggggcgacaagatgctaagcccattggtgctgtgcgttaatggggggggggcccaaatacgacgcgttctctttactatcaatttgaccgt

SEQ ID NO: 61699 - DNA, 253 bp, Homo Sapiens
  misc_feature (165)..(165): n is a, c, g, or t
cacaactccaaatcatgttgctttatttaaaatgatgaacaagtttcacccaagtgaaagtttaaaataccaacccaatagcagatccacaggctttcatggcagaccccatggctagacggacgcagaactaggagactgctcagtgttctgacaactccaggnggcacgagtgtgcagaagacagtcccagttcttctgtagcatccagtcactttggagacagctggccagggctagctctcctcccagg

SEQ ID NO: 61700 - DNA, 3291 bp, Homo Sapiens
gccaaaggcacggagggagagacagcaagtgcctttccaagccttggtggacaccacacctgcagctctccccttggccacagcaagtcacgtggctgggctcagcattaaggggtgggggacaggcctgccactttattgtccgctctgcacagtcgggtggcagtaggctgagaatttggagggctaaacaactgggactctggagagtctgtgtcctaataatgcctgctttggagcactccttccccacccgcctgctccaggggaatagcgtccctggtcctagcatttcactagatacctcgtgcctttgaaccgctgtgtttgggagggaggaagaggatagacaggtccagggctcccctcacttgggaaggtcctagtagaaggcattccttctgagtctcctggccctacagcttctcacccctgctgctccccaagacctgacccggaccaatcagctgcatctctgcaccaagtgccacccccaccgtgcactgctcgcacctcacgctccccatgggctggcccggaccccagtgaggtctgcacctctcggaccagccaggacctcggaagccatgacctgggtgttcagggcttggcggaggagacgctgctccgcgggggatggagaagccccgcccctccacaactcccttaatctggatgcaattagaggaaaccagccaaaaaccccgcggcagctgttgccccgggattattcccagccagcgagaggcattagggcgataattcagtcattagacttctagccttcccaccgccagaacgtgcaaataggggataatcagccctgcacggccatcctcagcaatgctgcttatttaacccattttttaaaatgacacttaatgttattggctggcgtacgtgtgtgcgcatacttaaaagttgatgcgtggtgcagctctgctgctaatgtctgctgacagcgtcgcccgatgttgctcagggcctctgggaagaggggacacctttgatgtgggcgtgctggcacccaagaggcagcgtggtcaggctcgatgcttgccagccctggaaggtcccgccagggttggggggtcgggtgagcactcagagatctggggaggaagcgaggagcctggtgtcctcaccaggtgcagaggggaaatgcgtactgctccagaaggttctgactcaagtctcggccctgaggactcagaactcacaagtcatggatcaagtacagagggagggagggccccagcccacccctgcgggggaggaggagggtctgaaggtgggagggcagctccatgagcagccactgttcctgaccagccgaagtgccaggcagggggaggtttccatgtccaggagggagaggacctccaccctctgacctttcagttttccatagcagcccagtgtgaagctcggcgggggtgggcagggcatcaggacaagatgaagatgctggctctggaatgaggactccccttgggctaaggggtagtggctggcagaggttgcccagctcttttggaggccacagggaatagaggtggggtggcaacaggaaatagggtgtgggctgtagaccatagtgggtggggtggtgcttccgttcctgtgaggcccgcccccctgagccccctcgtctgcttcttgtttggcagaaatagatgtggggcacagcccctagatgatgggaatctgcccacgctgtgccctctggggaatgaaatcttgctcctcgtgcagcctcccctttcccttgcggggtgggggctgggggtgccaaggctccacccttggagggggttgctgggggtgccaaggctccaccctttgctcgctgggcagagggaaggaagcacctccctgtatgctctgcaggggcccctgcaggccactttgcctcagaggaaaggaggagaggtcccctgggaaaatgcacacacacacacacacacacacacacgcacacacgcacatgcacacacgcacgcatgcacacacacacacacacatatgtgcaggggtgcagcctaagtcagtggagccaggactggctgcgcagctgggcctgccccattcttggagtccccagggaatgagcctcaggatccacttcgtcccttgtttctaagccaggctgcacggccgttcctgggtgtgaaagcattctgtcctgtctccagtcagagggaaccgcccccaaactagaaagctaatttcccccgaaggttcatgaagccagaggcatgcccttgggggttggtcgggagaagggtgagaggcagtgctgtggaaggggcctggcccctgctgcctgcgattctccccgggtatgtggccttctgcctccttcagcctcagtttcctcgcctgtaacatgagaacaatgatgcctgcctgcccaggccacctcctgggactgcagtggggactctaagtgtaaaactgtcatgaggatggtttatgaagtcccagggaccacacctgccactcagggaagagaccgctgacctcagccatcagccatgtgcatcgtgaggggcagcgagctcaggacggagagctctcccttggttcggagtcagcacacctgcactcccacacgcccacccagctgtgtgtcctccgccgagggtgagcctctctgtgactcttctgtaaaatgcaccccattctgcccactcctgccacgagacccatcctctgcgatcccgccaggcatgtgtgtgtgaatgcatgtgcaaagctctccatcagaagggtggtgtgggccctgcaggtcctacccctcggccttgaagctccctcgggctgcggactctgcctcctgggtctgagcattagaaccaggagaggggtgtccctgggcagagccaggggtgcaaacagcctgcagccatctggccttttaagtatagtgtgtcgcatttccgggtaggaaggtagcatttcaagttcaaagagaggtcaagtcatgcaaccatctttcctccagcacttttggggtaaggaggacagtttttgttatggtttaggggaaattttcatgaaattttcaccattaccaatagattactgatgtccatggcaagtgatctgttcttggtattttgttttgttttgttttggtttttaaatgtaatcacccattggtcaggcccaggactggtcaccatgagctctgctagccacggccccaacgatgcttccggctctcatggattccacagcaaataaaactgtgctgacaacagaaaaaaagaaaaaaaaaaaaaaaaa

SEQ ID NO: 61701 - DNA, 528 bp, Homo Sapiens
  misc_feature (458)..(458): n is a, c, g, or t
  misc_feature (462)..(462): n is a, c, g, or t
  misc_feature (466)..(466): n is a, c, g, or t
  misc_feature (484)..(484): n is a, c, g, or t
  misc_feature (496)..(496): n is a, c, g, or t
  misc_feature (521)..(521): n is a, c, g, or t
  misc_feature (523)..(523): n is a, c, g, or t
gagatggagtctcactctgttgcccagactggaatgcagtgttgcaatcttggttcactgcaacctccgcctcctgagttcaagcgattctcttgcctcagcctcccgagtagctgggactacaggcacacaccaccatgcctggctaatttttttatatttttattagagacagggttttgccatattggccaggctagtctcaaactcctgacctcaggtgatccacccgcctcagccttccaaagtgccactgcacctggccagcatccactagcttttcatcagaccatgaaatgtttggtccacgactgctcactctttccagagctgcactggaaatacactattctgaacggcccaagttcctccggagtattcctctgatggggcacaaacctggtggaccacaagcatgctggtaccaagtgctttttattttacaagagccattctgntccntttngggcgaaccggggcctgnttcatggttctnggctaacacaggccaagtacacttntntacta

SEQ ID NO: 61702 - DNA, 1510 bp, Homo Sapiens
atacttgctttgtttcttgtaactgatttctttagtacagaacctgctaaggccatcaaacctattgatcggaagtcagtccatcagatttgctctgggccggtggtaccgagtctaagcactgcggtgaaggagttagtagaaaacagtctggatgctggtgccactaatattgatctaaagctaaaggactatggagtggatctcattgaagtttcaggcaatggatgtggggtagaagaagaaaacttcgaaggcttaagtaagttaactttttctaatcctattataaaataattgggccacatgtcttagaattttgagtaacactgtcttgggaaacacaaaaacagttttttaaagccagttactagatatcatgtatatttgttgttatagcacttaagatatcttagtccttactttatactctctttcagctctgaaacatcacacatctaagattcaagagtttgccgacctacctcaggttgaaacttttggctttcggggggaagctctgagctcactttgtgcactgaggtgataaaatatttttatccattcacttgacccttagaaaaacctctctgaaaattaattggaatcattattatttacagttttctgtctcaatatctcagcttccagcttcttgaattctgttttgtctcactgccaatctaagtcctagtacttctgaaatgtgagcaataaatgaatgaaatgaagcaaatagtattgttaaaaaaattggttacccttattaaaacagtaacttctcaatttgaacataacatatagataataaatgatagttaccattggttttcattatcaatttttagggaaacatttcaccaaagcactatttaattatagcacagatactaaatttttataaataattatatgcacacacatacacagctaaattagaaaacacaattttaaattttatataattactagttattaatgggtaaaattcatttttcttttaatatctaaaatattatttatgccccgaaatatgctaataaaagttaaagattgtgtattatgcctagattcaaagtttttggcaaacttcaaatacttttgattgacatgtacattagcagttattagttgacttttactaaaacatgcacctttacgatggtgtttttgtagaaacataagtagtcaaatagtaacatttattgcagttttgtacagtatttgagtatagtgcataaataggtatgttcataaaatcaataaaaggagtatctatggaaataagcaaaatatcagcaaaaattgctattcctttgcctcatttaatttttaaattctttgttccatgtgattctattatatgcctttggcatgccttgtataaaaccaaggtcacaaatgcaacttattaacggaatttgccaagaagacagccttgacattaaaaattccctcacaagaggtaatccataatccttaataaaataaaattgttacatgagccaat

SEQ ID NO: 61703 - DNA, 513 bp, Homo Sapiens
  misc_feature (457)..(457): n is a, c, g, or t
  misc_feature (472)..(472): n is a, c, g, or t
  misc_feature (483)..(483): n is a, c, g, or t
  misc_feature (491)..(491): n is a, c, g, or t
  misc_feature (495)..(495): n is a, c, g, or t
  misc_feature (500)..(500): n is a, c, g, or t
  misc_feature (511)..(511): n is a, c, g, or t
gagacagagtctcactctttggcccaggccggactgcagtggcgctatcgcggctcactgcaagctccgcctcccgggttcacgccattctcctgcctcagcctcccgagtagctgggactacaggcgcccaccactgcgcctggctaaattttttttctttctatttttagtagagaaggggtttcaccgtattagccaggatggtctcgatctcccgacctcgtgatccacccaccttggcctcccaaagtgctgggattacaggggtgagccaccgcacctggcctccccttttctttatagcaccttcatacttaacaccatgacatcaaatgacaacgtattcacacagaaagcaggcattttgtttactggtttatttatgtttacttatgcaaccaagagaacctatatggctgtcatgggagccctaccttttagaaagagaacaaccncatcaggacaagttntaaaacacttntggatacnaggngggantaacctttgancc

SEQ ID NO: 61704 - DNA, 3183 bp, Homo Sapiens
agccatgggccctggtgctacacgatggacccaaggaccccattcgactactgtgccctgcgacgctgcgctgatgaccagccgccatcaatcctggaccccccagaccaggtgcagtttgagaagtgtggcaagagggtggatcggctggatcagcgtcgttccaagctgcgcgtggctgggggccatccgggcaactcaccctggacagtcagcttgcggaatcggcagggccagcatttctgcgcggggtctctagtaaaggagcagtggatactgactgcccggcagtgcttctcctcctgccatatgcctctcacgggctatgaggtatggttgggcaccctgttccagaacccacaacatggagagccaggcctacagcgggtcccagtagccaagatgctgtgtgggccctcaggctcccagcttgtcctgctcaagctggagagatctgtgaccctgaaccagcgtgtggccctgatctgcctgccgcctgaatggtatgtggtgcctccagggaccaagtgtgagattgcaggctggggtgagaccaaaggtacgggtaatgacacagtcctaaatgtggccttgctgaacgtcatctccaaccaggagtgtaacatcaagcaccgaggacatgtgcgggagagcgagatgtgcactgagggactgttggcccctgtgggggcctgtgagggtgactacgggggcccacttgcctgctttacccacaactgctgggtcctgaaaggaattagaatccccaaccgagtatgcacaaggtcgcgctggccagccgtcttcacgcgtgtctctgtgtttgtggactggattcacaaggtcatgagactgggttaggcccagccttgacgccatatgctttggggaggacaaaacttgtaagtacagtcaaggacaagacttgtactcaaggttgagatttaataaaattaatatttttactacttcaccaaggactttcttaaatgaaaatggtttttccccctacaagtaaacagtaataaagaagagaattattcctagtgcagtttgttttcatggtcttaatttttgctaagactccactgtttttgccttaccaatacaagtgccaacacagtgaaaaggcaaatatcatcttagtattactctgaaaatagttctgagctaatggcctactgaaaggaaaagagtggctcctgctattctattagacttattacaattatcttaagtattctttctaccctcctttaattgaatggaaacaaggatggattggaagagctgtttttctcctttctttcccccggcaatatttaccatttaatgccacttactaacactcaaagaaacaaaaccaaacttctcaattgacagtgcagtgacccaacaaagacacgggttcttgaattcaaagtggagcaggagagacggtaaatacacatttactttaatatatatatatttattatttatgtgtttaaagcacaaattagtttggtaaaaaacatctcatgtctgttttatttccacatccctgagactgacaatgggatgcctatcaattaattcatttagagagccatacaccacaagaaacaaattatttgtcctctggagcttgtcacagggggatttttaaaaaaccattaaacagaaagacaactgtgcatcttagaaagataaaaggccaattcttcctctccggctgataggttcttaataatagtgatatctactaataaggtattttacatagtgtaaagcatgttcacatacaaattacttagcctctttgagcctcagttttcttaaatgtaaaactggattaatagtacattttgtgtttaaaaagataatgtatatgaagtgtttaccatttttgcttggcatctagttcagttctcagtaactgatgtggtggtggtggtggtcatagtagcagtaagatccgtagtaatagtagcagcagttgttttagaaattagtaactgaggcctggcaaagttaaaggctctttcattaacacccagaggggaagaaatgaagctggtcttcagaggcaggctattttcactctgtgtcccaaattttcccccctagaccgtttttatacttctggggcctcagaaaatattctcagctattctgttagcttgatctcctaccatctgagagtgggcttccttcaaacaaccaaatttccaggtatttctaaactgcccttcccctacaccattctttggttcagtatttcaagacccctaagagaaatggtacatttacatgtaagcacaggatagtgaagtatttacaacaagtgctttggagccagcaaatatgaatcagaatccagctttcctttcctacatacatgacattgggcagctaatttctaagatttttacttctttatctatgaaagtggagtactagtacttgctctgtgcaactgtgatggttgttacatgaggtagcatctagaagcagcttgcacattgccagacacccagtggaaggtcaatgaatgactatttgaggactaactattacagaaatgtttactcttctgagtcctgatttctagtctcctggactaaataggttcactgttttcctcccggttcagtttccagacacatcacagaattataagaatattaaaactcaggcttatacctacacaggattttctataaccctctttctgctttgagctcctaaagctatttcatagaaaaatgaccttatttttaaatagagggggcagttgaaaatcagtgaacgggcctaccccctaatgatttttttctcagacctaattataataattagcattataaagtgctaattatctttggacacagaggacctgcacaccagagacagaggtccgcattaagtaaagtggatttcactttcttcagttgtgagatttctcttttttcttctttgtaatgatgcaaagatatatcttccaccaagcctcatttaaaagctttttccagttaaggaaactatctcttggccatccacagccagactgcatattgagattatggatattcaaagaaattgtctttcctttgtatattgtcataactttttgtgaaatgttcgttttatagttccaggccagcacctagaacctggctagaataaaaaactgcagaaatc

SEQ ID NO: 61705 - DNA, 4430 bp, Homo Sapiens
acaactttgtgttttgttgttgtgttgtgttttctctttcagtttcaaagaagctggcaccgattccacccaaggtcccctttggccagccgggggctatggcagaccagtccgctggccagccgtccccagtcagcctgtcccccacccagcccagcaccccgtcaccctatggactgagctaccctcaggggtactccttggcctcgggccagctctccccagctgcagctcctcccctggcctctccttctgtctttacaagcactttgagcaaatcgcggcccactcctaagccgcgacagagacctactctgccgcctcctcagcctcccacagtaaacctctcggcctctagtccacagtccacggaggcccccatgctagatggcatgtcccctggggaaagcatgtctacaggtaaccaagccacaggctccctcacttttttttatgaactttagtgaaatgtgcctaggggatggattgctagagttactgccagtgaacacattcctgcgtgctttgggatgactgggctggcaccaggggtagctcataagatctccttagaagcccaccaatggaaagcaaccctggaatccatgtgtcccacacaggggcttcttatgggatctctctcggtctaagcccaccagcctggggttctgtttttgctcttattatcgggggttgaagacactgagtcatttggagtggggcctcaggagaggctggaagctggttatgatcacaaaacagcatcaaaactcaggtatttcctggatagagcccaagcaactgacaggtataaatgcttatctggagaacaggggctaagaacccaagatgtttttttactattactaaaataagccttgctagaaaaatatacttccagatagatatttagagaggggtgaatttcagaaaacatgcatgtctccattctcctccaccagactcccctccctggccaattccctgaggagctaattggacaaacccacaacgacttaatttagtttgggcttaaatttagaaacaaagacggagctctcttcccccagaaaaatctgtaagcacaaaatcgcaaacacacaccacgtttagccaaaaccattcattggctggaaggaacgggatgtttttggaacatctccccagacacttcaaccacataagattataaagtcaggggcctatttgtggtggctgctaaagtcatttgagcattttccttgttcagggagacaggcacagggttgagccgtgtcttgggctagagccaacccacttagtaaagtgcagtagcatggcggtgagctggagcatatgtgtacctagtgttgtcccaagtagcagaaggtgaggcagcttgggttggaacacacacaccacatacacacacacccactcacccatttcaaagaacagtgctgtcctaggatgcactgggacttttgtgataatgcacttttccctccacgtccttctccaaaagagtgatttatttcttccgtgattagacggaagcagtgaccctgtggggttcagctccgtgctgcctttgaaaaggctagtccaatttgcaagtgtttgtactgggtcagatttaaatattacggggaagagccatctggtgattcggcttctttatttttggatgtgattaatgttgaaggtacaagctgctgtcatctaccccgaggcttattaaaaattaggcaaatttctccctggaaaatgcagtagcaccacgcccatcttggtgggtcttggtgctgaggtgtctcctgaaggagcccatgataggagggcacaggcttgctgccctcggggaaggtcacagctgcggaggagctgaaggtcacccgagccaggtctccagggctgctcctcccagtgtgtcacatctggtgactcttccagccaccccagggaagggacacaaggtagtgtcaatacataagcaatagaatgagcagaagatggccaggcacggtggctcacgcctgtaatcccagcactttgggaggccgaggagaattagttgggcatggtggcacgtgccactagtcccagctacttgggaggctgaggtaggagaattgcttgaacctgggaggtggagccgagattgtgccactgcattccagcctggcaacagagcgatactccacctcaaaaaaaaaaaaaaaaaaaaaaaaagaatgagcagaagatatcaatggagaagcagataagagcagaaggagaggagaaattggggaacaaaagtgggcaacagaaggcctgggaggacagcacccccagggctctaagaagcggagtggctcatgttccatcttacaggtttaagaactcctgaccttcaggattcataatgtccctcgccctgtgcggaccctattttaatgtccttttggcagcagactgttgttttgtcccatacgttcaggtctctgagccagtgtagaatccatcatggtttgatgtggcccgtctgggactgtgatattggcatagcttttttttttttttgtgacgttcatgttttgtcgtgttgattcctttctccgaatcctatcattgtgttcttgcagctgtgtgacatgagtggcgcagttttggatacgtgtgagggggattttcagggtaagctggccccggcctcgcccctccaccccgctagctagccaggccagctgcccgctcctcccctccgctcctcgtctctgcatgtggctcagaccatttgtatggcagcttcactctccagccttccccggcctcagcaaggatgagttgatccatgagcttatttggctttggggcagccctggcctccttttctttcttttcattaggaggagctgggggagaacccagccagccccttttccccaccttctctttcactggaatcacatctgcagctcctccccctccgccctccctcaggcttagaccgtggagctgtaacagatctgttcttcgtgtgagacttttgtgctggagacgcttgtgcccagcaccctgggggacatgcacctgctcacctttgtttaggaaggcgtcctgaggggaggtcataccaggtgcagcccagcacagggtccacaccacagcttggaccccattttctgtggccccgagtttgcaccagcagatctccccttccagacttagatcctaacgtctggcttcctccaggctgagactgctggcaaatcctaaagaatccatatcggagctcatcccgctccccttctccctcatcccaagtggatatggccagacagatcctttctatccaactcaataaaatttgggggagcatttatatcagtatctatttggtctcctcctcctataaagagtaaatcctcaaagcataactgagggaaaggcacgaaggaagccagaaggactttggtgtatttgcctcagtaagtagaggtggccaaagtaaaccaggtcttctccccgatttggcccatggtcctgcagagactaccgaggcgcaccaggatatctggtgctcacagacaggtctcctggcgggtgcttcccgagtgtcctggagacaagcagccactgtgtcccttttcccaggaatgctgatgagggcttctgcccctgaatcccattcccttgcatagtgactcctcccttgggggtgtctttaagggagcagcaaggataaaggtatgacagctcacacaagtgcttgttctgggcctgtctaaattcatcaccgccctgtattattcccatttgactgctgaggcacagggaaggtaggaaacctgtccaaggtcatgctcttcctgcctgacatatttgggatttttgaatctaagcaggggagcttggtgctcttacctgatagcgaaccctgcacagtgaggtgggccccgggccactcagcctcacacctgtgtagagacatgacccaagtagctggggaagggcagaggtggtctgaggccacctgcttcagaggaacaagtggcactggctgttcctccagccccacgccccaaatctctgcttctccatcaggcagcaaaacaaagactggaaggacgtgagggctgcctgggggttggggcaagggaggacctttgttcaagagcttccatgtttgtatgatgtctttcaggacagtgtccaaatgtatgtctgtacacttagtatggtattccccagtctgaacatgtgttcccttcctctgcctcctggagtgctgctcccagccttgcaaagctaagtgacagccagaaactaagcaggcaggccgggcgtggttgctcacgcctgtaatcccaaaactttgggaggctgaagtgggtgaatcacctgaggtcacgagttcgagaccagcctggccaacatggtgaaacccaatctctactaaaaacacc

SEQ ID NO: 61706 - DNA, 156641 bp, Homo Sapiens
  misc_feature (70004)..(70053): n is a, c, g, or t
aagcttctgatctctgatgagaacaatgggggacaccaaacagaatataaaacccatgattgaatacatcaaattgctaacatggcagtaaacagacatgaggtgaagatggagaagaaggaaacccaggacgaaagtcagcctcgcatttggaacccatttccctgagtttcattgctgaattccagaaggaactactgagatgcaaagaagcacagcagcttttgcacacatgcgtgggattagatggaaaacaagtggattgagggtctgccaatgaaagcgacccgtactgaaatccactggctctggttgagacccagaagagtcatgcatcagaatagaggtggacaggaaataccctggcctttgtagggactgagcctgcaccgacgacctcaattgcagcctgtatggaggacccgtgaccatcccccagaagtagactcccatctcttctgcagcaagataacatgccactaggcctcaattcattgctaaatattttttaacaagtatctcacatttaacaaaaagagatcagtcatatggcagcaaaatacaatgtaatatgaccaaaacatgaaagactgtgaaaatgaatctggaggtgacccaagcattgaattcaacaatccaggctgggtgcggtggctcacactgggaggctgaggtaggcagatcacctgaggtcaggagttcaagactagcctggccaacatggtgaacccctgtctctactaaaaatacaaaaattgggccaggcacggtggctcacgcctgtaatcccagcacattgggaggccgaggtgtgtggatcatgatgtccagagttctagaccagcttggccaatatggtgaaaccccgcctctactaakaatacaaaaattatccgggcatggtggcatatgcctgtagtcccagctactcaagaggctgagggataagaatcgcttgaacctgggaggcggaggttgcagtgagccaagatcatgccactgcactctagcctgggtgacagagtgagactctgtctcaaaaaaaaaaaaaaaaaaaaaattggccgaatgtggtggcacacacctgtaatccaagctactcaggaagctgaggcagaattgcttcaaactgggaggcagaggttgcagtgagccaagattgcaccatagcactccagcctgggcgacagagcgagattctatctcaaaatttaaaaaaaaaaaaaggctggatgtggtggctcacgcctctaatcccagcactttgggaggctgaggcaggtggattacctgaggtcagaagttcgagaccagcctggacaacatggtgaaaccccatctctagtaaaaatacaaaaattagctgggcgtggtggtgggcacctgtaatcccagctacttgggaggctgaggcaggagaattgcttgaagccaaaaggcagtgagctgagattgtgccattgcactacagcctgggcaacaacagcaaagctccatctcaggaaaaaaaaaaaaaaagagagaaaggaaaaccaatgccagtactagcaactcctcttcccccgaaaaaattacaaacaagaatgtaggaagggaaaggaattatacagcttaaactaatgaagcagaaaggacaaactcaattttgagcccactgaatttgccacaaatattgtagaaaatattctcaaggactttacagttgtctactttgattggcacatggttcatacaacagtatttgtgtcaaggcacatcttactgttttctggcggtcttcctctttccattgattttgtcatgacggttgattttcgttgtcaccttcctcttacggattttagytctaacttttgtttccacatgcctccgtagagtaatgacgtctttcaggccaattttatttcctcgaaaggaagaaactcttttctttgtgtgcatacaaatggacctcagcccttggtgagagtgaggagaggagaaggtgagaaacctgaggtcaagaagctgttctttccctttccagggcaaactcatttccacactatggggactccaacagagccatacctttctgtctactgyggttggacctccaggctctctgctgtacatccatggatccatcatgtccatttcgagaccagaagatagtcttcaggaaagacacctaggaaataataatataagaatgacggctgggcacggtggctcatgcatataaataatcccagtactttgggaggcggaggcaggtggatcacggggtcaggagttcaagaccagcctggccaagatggtgaaaccctgtctctactaaaaatacaaaaattagccaggcatggcagcgggcgcctgtaatccaagctactcgggaggctgaggcagagaaccgtttgaagctgggaggcggaggttgcagtgagccgagatcacaccactgtactccagcctgagcgacagaatgagactctgtcacacacacacacacacacacacacacacacacacacacacacacacacacaagaatgacatgaggctggcacggtggctcactcctgtaatcccagcactttgggaggccgaggcaggcggatcacctgaggtcgggagtttgagaccagcctcaccaacatggagaaacgctgtctctgctaaaaatacaaaattagccaggcatggtggtgcatgcctgtagtcccagctagtcgggaggctgaggcaggagaatcacttgaacccagcaggaaaaggttgtggtgagctgagattgtgccattgcactccaaacctgggcaacaaaattgaaactctgtctcaaaaaaaaaaaaaaaaaaaaaaaatagcccaggtgcggtagctcacgcctataatcccagcactttgggaggctgaggcgggtgaatcacaaggtcaagagatggagaccatcctgggcaacatggtgaaaccccgtctctactaaaaatacaaaaattagctgagcatggtgatgcacgcctgtagtcccagctactcgggaggctgaggcaggagaactgcttgaacccaggaggcagaggttgcagtgagccaagatcccaccactgcactccagcctggtgacagagtgagactccgtctcaaaaaaaaaaaaaaaaatgacatgaatatacttcacataactgaactgtacacttcaacacggttagatggtaattatcatcttataagtattttaccacaggttaacatgtttcacaagttgaaaaggaagtaattaccttcagytctctgagttctagaatttgtaacatttcaccccctgctccttcctgatctgcactggagcatcttccttttgtccctgctctactcagagttcactttcccttccctcacatcagcttcattgaggctggtttgaacttaacgcaaaacattctcactaatgactgaattccctccaagatttccatattatcacagtatgcttttaatcttctaagatattaaatatttgttctcatcatagcgaaaatgcaatgcaaatcccatctcagatgtgggtcagatacctatgaatgtcctgaggtagtcattgaaatgacttttttcttgagatggagtgtcactctcaaccatgctgaagtgcagtggcactaccttggctcacggcaacctccacctcccagattcaagcgattcttgtgcctcggcctcccaagtagctgggattacaggtgcctgctaccatgcctggctaatttttgtctttttagtagagatggggtttcaccatgttggcccatctggtcttgaactcctgacctcaagtcatccacctgcctcagcctcccaaagtgctgggattacaggcatgagccaccacacctggcctgaaataatatctttcaaattctttgtagaatttgttttttcctgatttctgcacataggataaaaaaaaaaaatcatgtactaggatttcgagagaagcaatgggtaatctaaaaagatgaaaagagcaaccacgtcaatcccacagctactactagatttcataggaaaggtagctggcccagtttggagctaggagaaatgtcaaacacatgaagaaatgacaagcaaagaaatgccatcacgcatgaatgcttcatggcacccatgatgtccctgcttaggaggtaatggtatagatgactagatgacaaggacaaagatgagaggtgcgaagttgtccaagtccagcagctcaactgaactttcctaaatggaactgttaaaaagtggtaaatttaaaaacttcccctggctcacgtggtggctcacgcttgtaatcccagcactttgggaggctgaggcgggtggatcatttgaggtcgggttttgagactagcctggccaacatggtaaaaccccgactctactaaaaatacaaaaatttgctgggcatggtggtgggcacctgtaatcccagctacttgagaggctgaggcaggggaatcacttgaagccaggaggtggaggttgcagtgagccgagatcacaccattatactccagcctgggcaacagagggagactcgtctcgggggtgagaaaagaaaaaaaaaaaaaaaagcttcctccaatttataccgaaaattctctgttcaggactaagtggcatagagaatgttaaatgtgcctagatatcttcataactcatatattttctgttttctacatatcttgaaaggcagtgccaaatgacgtgtaattatctaggtggtaaaactgaaacatacttcctcttcccttgaatataaaaaagcattgtggtattagtacttttatcttggatcattgttcaggaggttcagcccccagaaaaccacatttttactgtcatgaatggcaagacaaaatgtagagctcaacttacccaaaggaaaaaaggctcaaaagacaaattatggcacaacttagcagccaaattcttaccaagtacagacttttgacatactgatctctctccagttgcaagtgggaacatgcactttgaatgatgtcattcaaaattaccctgcccagacacacttttcattgattctcttggagggcagttctaagagattctctggggctttctctgcatcatgagacgcagtgcagttctgcccttcaccttccggcagtttgtcacctcgtccctatgacctcagaggaactttgtctcaggccaattgtttgttccttggcctctttcatttcccctaaaaatcatttgctgcccctctaaatggcctacatctccatctatctccctctcccctcagaagagggtgctctttaagcatcaaccatccggcccttctagcagtctcatttttcagctggttcccatgtttatgcctgttctatgtttttcttttcctgttaagctgtctgttgtcagctcatttctgcagtgaatcttcagagaggagattggaagctttccttccacccatacgatagaactataaagcagaagagtttagaaagaatttcctatttaagtgacgaaacctcatactccatttgtgataaatagcacaaaggctaaaaaaacttatttttgaccaaaagctctgttgacattctattaaacaaacaccgacctatttaattttcataatgtaaatggcagacattttcataattcttatgctaataaatcatttccctgattttttgggtaaaaccacatattcataatgaagtccagaaacgtgaattgttttatataatttattcttatttgtgattacaagtatacctctacagaaagttagtatactcacacaaaggcaacttgtgcagaagagaatgttaaatgtgtaacgtctcagaaacccaataatgataattatcaaattatccaatttttgtggagatggggttttgccatgttggccagggtggtctcgaactcctacaccaaagtcagtctcacgatgacgatagacagccagactattgataacctggaataataatagttgaaataatgaaaaggtcaatgacaccgacaatatttcactcagaaagaatcatccttagaaaccgtcaacctcctccaaaaggtaaccacatccctcagatatcaccgtgggattccactgctacaaaaaagaacagaagttagaagtctcatgtttttcagatggctggtagtgtttttaggcattgcaaatgtggggtgttgtctttcttggtataaagcagggatatccaatcttttcacttccctgcctatattaaaagaaacaaagttgtcttgagccacacataacatacactaacactaacaatagctgatgatctaaaaaaaaactctttttttttttttttttggagacagagttccgctccactcagtcgcccaggctggagtgcagtggtgcaatctcggctcactgcaacctccagctcctgggctcaagccattctcctccctcagcctcccgagtagctgagattacaggtctctgccaccatgcccgactcatttttgtatttttagtagagatgaggtttcaccatgttggccagtctggccttgaactcctggcaggcgatctgcctgcctcggcctcccaaagtgctgggattacaggtgtgagccaccgtgcccagccatttttttttgtttttgtttttgtttggtgttttgtttttgagatggggtctcactctgtcacccaggctggagtgcagtggcgtgctctcggctcactgcaacctctgcctctcaggttcaagtgattctcctgcctcagcctcctgagtagctgggagtacaggtgcctgacaatgcactcagcaaatttttgtattttttgtggagatggggttttgccatgttggccagggtggtctcgaactcctgacctcaggtaatctgcccgcctcagcctcccaaagtgctgggattacaggcatgagccactgtacctggccaaaatctcctaatgttttaagaaagtttacaaatttgtgttgaactgcattcaaaactgtcctgggccacatgcagcccgtcactcatggctaagacaagctaagtataaagtaattatcttttctttttgtttggagacaaagtcttgctctgtcacccaggctagattgcagtggcatgatctcagctcactgcaacctccgcctcccgggttcaagcgattctcctgcctcagctactgagtaactgggattacaggcgcctgccaccgcactcggctaatttttgtattttgagtagaaacagggtttcaccatcttggccaggctggtctccaactcgtgacctcttgatccacctgcctcggcctcccaaagtgctgggaatacaggtgtgagccactgcacctggccagtagttatcttttctttaaagttatttacttgttttttaaattgatgtataacattggatgcatttattatatatcacatggtaaaagaatccctctaaataatacttctctcttggattatatgaatctttgtcatttgaagctcagcataagtaaaaaaaaaaaatacaatgaagagattacttcattcacaaataagtatcaaattttagtgctcaaaaattaacaaggtgggccgggtgtggtggctcacgcctgcaatctcagcactttgggaagccgaggtgggtggaccacgagatcaggagattgagaccatcctagctaacacggtgaaacccatctctactaaaattacaaaaaattagcagggcatggtggcacgtgcctacagttccagctacttgggaggctgaggcagaagaatcacttgaacccgggaggcagaggttgcagtgagccgagatcgcaccactgcacttcagcctgggtgacagagcgagactctgtctcaaaaaaaaaaaaaattaccaaggtggagatcatgaaaatggcatgaatagtgtgggatttctctaagattgttgatattaattccagtagactcttatgtgagtgaagacgaagacttcccctgagtaagttcagacagcttgtgataacatttctacatcgattcctcaggatttaactatatattcttgaaaacatctcaattttaaatgtttctttcaagatggtgaattaaacagagatagcccttcaacaggttgaactcagcatatgctgagtctgaaatggaaatgatggagttagagaaccatacaacaatggtaatgatttcagaaacatggtgttgagcagaataaagcagacacaaaagagtacctatggcatggcacgcatctgtatacgcgaaattccagaataagcaagctaacctatgataagaaagagactggctgggaagagtgagagttcactttctggggtgacataatagtgtagatcttggctgggcacggtggttcacgcctgtaatcccaacactttgggaggccgaggcgggcggatcacctgaggtcgggagttcaaaaccagcctgaccaacatggagaaaccctatctctactaaaaatacaaaattagctgggagtggtggcacatgtctgtaatcccagccacccgggaggctgaggcaggagaatcgctcaaacctgggaagcagaggttgcggtgagctgatattgccccattgcactccagcctgggcaacaagggagaaactgtctcaaataaataaataaataaataaaataatgtagatcttgaaagggggtcggtttatgctggtgtaagtactttccaaagttagtaaacttacacttaaggttatatattttggccaggcgcggtggctcacgcctgtaatcccggcactgggaggccgaggcaggcggatcacgaggtcaagagatggagactatcctggcgaacatggtgaaaccccgtctctgctaaaaatacaaaaattagccaggcgttgtaatctgagctactcaggaggctgaggcaggacaattgcttgaaccccggaagcggaggttgcagtgagccgagatcttgccactgcactccagcctgggcgacagagtgagactctgtctaaaaaaaaaaaaaaaaaagtcatcaaaccagatgacacaaatcaaatgacatttcactttgttttggtccattttgtttgttagagacaagagtgcagcggggccatctcagctcactgcaacgtccagctcctcggcccaagcgatcctcccacctcagcctctccagtaactgggataacaggtacgcaccaccaggcccgactaatcttttttggaattttttgtagagatggggtttcgccatgatgccctggctagtcttcaactcctggactcaagtgatctgcccacctcggccccctaaagtgctgggattacaggcctgagctgtgtaatttcatgccgcgtgacacagyccagtaaaaaggaagaaaccccgcgggtccagcgtctactcacaggggtgggctgatggctgataaatcccagcaggagccaaatgaggagccaaaagcgcagccgcatgtcctgatcctttcagggtgccctgaggcggccaggacagaggtggaggtggcttagggcaggggggagggaaggggacggggaccggggccggatctgagttggggcgggggaggggagggggaggggaaggggagggggaggggaaggggagggggaggggaaggggaaggggaggggaaggggaggggagggggaggggaaggggaggggaaggggggaagtaagggaagggaaaggaggagaagggggctgttgggcacctggaggaggtggaggaggagaagaagaaaggggtctgggaaaggatccggttcaaattaagttctcaagcgctggtggaaggtttagctacaggtcacggagaagatcagggaagcaacaggacacgcggggcaagggagcgtgaggcttaggagcaattagagggagacaaaaaggttctgctatccgccaaaccttcttcggtctgggccctcccttagcaaacctggggctttatactccctctccaccaatccctgatgaccccggtggtgcctcacaatggacaatgccaagtagcgcccgcatcattccaatgacccctcccccatctcagtctcccacactcccactcctcgcaaggacaggtcctctctggaaccttcacaaacctgatttctggtcctccccaaccagctccctgtccctgcttctgggcgctccttccttcctgagctcccagggttcctcaaggtcacttttggcgacaaaacataaaaaacaaatgatggcaggatggcaggaagaacctcatacccaagcagagtgccaggttttacagcctccgctcagccattcatatcctaagcaacaaaacatcagcagggtgcggaaggtcccgatagtaaaccatctccatcacatccatgtagccatccgtccatcaacctgtatctcaggaacaaatgtagatacattcattttaagcatgcatggtacatttacaaaaattaacctgacttattttgttccagcaaatctcaatatatttgagagcaatcaaatcacacagcacgtttctgatcatataactgtgctagaagtcaatgattaaaagctaattcaaaattattatttgcttggaaattcaaagtgcccttataagacataaacataagaaagaatccaaaatgaaacaagattgcctttcaactcaatgataagatcataacatggcaataaaatgtctccctctggcctgggaattcctctttgtggcacaaggttgtgtgatctcaaatcacccctaacccacctagacattttaacatccgaaaccgagtgatgatgtccttatctataatcatcttactgcctgtgtgtgtggactttaaattctgaacccaaatgagggggagaaaaccaagttgaccttcatgattgacctctcagggatgtccaaggaatctgtgcatttcaagaaacaaagttcatcagcttctctcctaaggtatttgcccacaatacccagagggcttggcagcatcatgtgtgatgggtggggagctccaagcaggtgggcaggacgcaggggtctggtgaccaggacagacccccactgtccatcacctttcctggccctgtcctcagctaaacttcccacaggccttctgcctgatcacacagagtgtgcccaaactcactcaggcctctgggagctgaaaaccactgctttaaatccctttaccatttactatgacataaggttattgtaaacaggaaatattctattgatgctacaaatggaaagccaatgtctttaccataaatagaaaaacaaccctaagaaacaagcaaaacaaaaacaaaacaggggctgggtgtggtggctcacgcctgtaatcccagcactttgggaggccgaggtcggcggatcacaaggtcaggagttccagaccagcctggccaatatggtgaaaccctgtctctaataaaatataaaaattagccgggtgtggtggtgggcgccttagtcccacctacttgggaggctgaggcaggagaatagtttgaacccgggaggcagagtctgcagtgagccgagattgcaccactgcactccagactaggcgacagagagagactcttgtctcaaaaacagcaacaactacaaacaaacaaaaaacagggttaacaaaactatggaattcaattctatttatatgctgcagccatgttccagccctagatttggctgggcatggtggctcacgcctgtaatcccagcactttgggaggctgaggcaggcggatcacgaggttaggagttcgagaccagcctgaccaacatggtgaaaccctgtctctactaaaaatacaaaaattagccaggcatggtggcacccgcctgtaatcccagctactcaggaggctgaggcaggacaatcccttggacccgggaggcggaggttgcagtgagccgagatcgtaccattgcactccagcctgggtgacagaatggaatgagactctgtctcaaaaagaaaaaaaaaaaaaaaagccctagatttcggttgtgttggttgtaaaaggagagaccaagtaagtgggggttgaagtcagattagaccaaaagtgaatggcagagagtattataatgtccatgaagggttgctagagtcaccgtgatcatagcccaagcagagacagggaaaggaagatgtgagcagagtttggggtctcgaacaatggaggttattcgtgcagcccaggaaaggctccccaaagccaggatcaacctcccttgcaggcggtccctcatggaggcatggccaggcaccttagatttgagaccagctatgttgctgctgaccagctgtgtgaccctgggctggtttccttccatacaatgggagtgccaatggctgcatgcatgcaaagaccgtctgaggataggaggaagcaatctgttgagcacccgtgtacctgagtgtcatcacctcccaagggcatctttcgttccagagctggcaccttggaaggcccttggtcactgaaggcagtgatgatggtaacagcagtaaatcatcatttacggctgatgagggaaggccaggggtagggctcctaggtcctggataagaatgagggtctgggcactcctggggacagctgagtggtaggactcctgggtccccagggtgcaggtccatcttcagtggcattgggcctaggctgggatgctgagttatccactggagcatcagcagtacaggcaggcacagaggcagtggatccatcggaggtggcaggtgtaggatcatctggtgagcaagtagagtcaccaagcctggctgaccactacccccactatccccacagacgatgccctgtcccttgcctcatgctccggcagggtacaggctcgcacctggggcctcatggagcatctctctaagacctctgtgtcctggtcattgaatgggcacttgagtcacccagggccattggaacaaagaggaagaatcaggccccacgctgttttgggagagtgtttagcacaggaaaatgcacagaatacatgcacgacacgggggcactgtcagtgtgggagcaatagtttacaacctccagccctaatctgagcactctcacctgtgcaatctgaaaggaacaggagacttgcaggaaagacagtgcctggatttaacttaaaggaactaaaaatgttggaatttttactcttgatatccttccaaatcaactctctcaatgttcccatcctcaaaactatcatatggggtaactgaggcagtcagagatttactgactcaatgtcactcaattgattctgagttcactgctgattacatccgaccaaactgctttttctgaagtctactctgtttcatcatgctggtgatgattttgtgcagctctgggacaaactccacctggctgaggataaagcaaatctgcggtgacttagtcctcctgtcatttcccatcagttccccactctcctcctctgcccctccacagtctcccatgcaggctgacaccatatgacagccttaatggagtccaccgagtatttcaggttctctcttgggccacttgaaagtggatgtacccatgggatttgctttgacccaagagatgtgagtggaagtgaagcgtgtcacctcgaggcaaaagagttgggagccattgagactggccaccctctccttcatctcttagagcagctgacagctcccatatggaggctgctcctttattctcgtggcaggatgagggcatgtggggcacagggcacaggagagccatggaggatgtgcagcatgggcaggaaaagagccttcagtggtgtacatttccatcgtttggggctgtttcttacctacagtgatacctagcccatcctagcaggcatgcaccatctaccccacactctgtgatgcagactagcgtgccgtcagaacaggaactggtggtcagacacacgtaggtttcagttccagctctgcctcttattgactgtaacctcaggcttaactttcagtctctgagcctcagtttcaactctgtaaaatgaggtggctataccatctcaggttgcagagagaattaaatgaaatataagtgcatgtagagcattgaacccagggcctggcacacacagtcagtactcaatgttagccatgtagcttcatgatgcatactgattgtcaatattcagacaatccagtaaagtattaccaaaaataaaagtaaacttatttgcatatgtattctttcaatctttatttttaaacagggtaaaactatgcatattctttcatagccagtgtttttctcttcatagtatattgttaaaataattttacttggaccgggtgcagtggctcacacctatagtcccagcactttgggaggccacggtgggcagattacgaggtcaggagttgacacgagcctggccaatatggtgaaaccccatctctactaagaatacaaaaattagctgggcatgatggcgcacacctgtagtcccagctactcagaggctgaggcagaggaattgcttgaacccgggagacagaggttgcagtgagccaaggttgtgccactgcactccagcctgggcgacagagtgaaactctgtctctctctctatatgtgtgtgtgtgtgtgtgtgtgtgtgtgtgtgtgtgtgtgtgtgtgtgtatctatataaatctcaaaaataaaagatcatttttgagattatcattttaaaagacaagataatgttcaacttaatgactaatttaattattactattggactttttgtagactgcacagagcattcaaaacaaatgaaggagaataaaaaatatgtattacatgttgtaaaataaatgtgatgtggttaattcttttattcaaaattatagaacatatatatgtactatagaatgtatttcttattatgagtcatgttaaaaagtagtttagaagctgttgatttgaatttccttttcaaattttgcaggataattttttttttttttgacagagtctcgctctgtcgcacagtctggagtgcaatggcatgatctcggcccactaaaacctccacctcctgaatctaagcaattctcctgtctcagcctcctgagtagctgggactacaggctcacaccaccatgcccggctaatttttgtatttttagtagggacgaggttttgccatattggtcaggctggtcttgaagtcctggcctcaggtgatccaccagcctcagcctcccaaaatgctgggattacaggcatgagtcaccatgcccagcctaaacctggcaagataataaataacctttttaagtgttgttgggcacttgtctggttgtttttctttaggttaccatgccagcaatgattccttttgagtttctgacagaagatagtggttttcatccaaataagtcaactactctaccccatccctaagccacttgtatggaaagaaaaagaggaagaagccagtactgtgactgcgtaagcttcccccagcatcacccgatatgagatgtgtggcagctgagacccgggaactgctcaagggcaccaggccccatctgtctgcactcactcaccttcctcaggtactcgcatgggcatgtcactgactttacatgctgctgcagctccttggtgagctggctctggtcatgcgacaggaactgtggggtcaggacaatagagagcttcaccatttgcagaatgagaacagcggctcatcatgagtgccaacctattagataatttaaaaaaaaaaagtgttgaatgagtggaaaaacaaggtgatgtttgagtctatagtggtcaagggcttcagaaaaggacagaaccaagttcaaattcctgtactttgaatttctacttcatgccatgcaaaattactttaccccttttaacctcagttttcttctgtgtgaaacaggaacaatagtttcattcgtcattcagtttctctcaaggtttcacgagatcatacctataaaacatccaagtcatttaaatgtatcatcatttctgtcataattagtgggatccatttcactattattggatatacagttctgtgcctgaaacctacaaaaaaagaaaatgttaagtctaaaaagcattagtgatttctcatttttatattactaattataaccctatttaatcacacaaggccttgtccgtggcaggtgctcaataaacacttgtcgaatcaatgcatgtgggctccggagccacactgtttagattctattctgcctccaccacttatcagctgtgtgatctgggtaagacaattcacctctttatgtctgcacttccctctccataaactatatataatgagaatccttagctcattcggttgtggtgaggggtgaatgatttggcacacaatcccagctactcgggaggctgaggcatgagaattgcttgaacctgggaggcagaggttgcagtgagccaaaattgtgccactgcactccagcctgggcgacagactgagactgtgtctcagaaataaaaataaaaataaacaaaaatcaatgaactaaaaaccaatttctagtggtttctaataaggaaaaaatggttcaaaaaactgctaagcgagatcaagcaaaacaaaaaaatctattacgataatgtttttataactggtatttaaaacattgttgattcattctttatttttattttgagacagagtctcactctgtcacccaggctggagtgcagtggcaggatctccgctcagttcaagcaattctcctgcctcaccctcccgagtagctgggattacaggcgcccgccaccacgcccagctagtttttgtatttgtagcagagaccggggtttcaccatgttggccaggctggtctccaactctcgatttcaggtgatcaccccctgcctgggcctcccaaagtgctgggattacaggcttgagccgccgcgcccggcccttgttttgttttctagattgaagaaaggtttttctcagaagttatctagaatttacaccgatttggtaaagcacacttttgtgaacaaaggtgggtggaagcgtttgtttttcctccctatctgatccttctaaagtttggaaactattcataaatattcttattttcatgtacatatgttctctttataagcaggctacaatcagaaagattggttatattatcaaggctttgactgaaacatcctatttaagaatatgcagaaaattcctggcttcgagtttgcagccttacgttacagtcagggggaaactgtcactccctgcaggcctgagaaccttagagcttttcggggagcaacttggcaagggggggtcccagcagctgctcgcgtgccaggaaccatggggcacagccccgggcgaccctcgggccggcgggggccttccgcttcctggcgtctttcttccccgccccgccggctgctggggaagcggcgggcgcccagtgcctggaggtcgctccctcgcctcctctggctgcgggaacggagaggcggcggcggccggagcagggtgggcggcctgagccgagagcccggccggcccccgcgaggaatatggcgacctgcggcgaccggagcagcagcggcgtcagttgctgcaccgccgacttcttggagcagcgaaagcgactcgcgagaagacgccgccaagtggaacccgggccctgcggccctgggagggggcagcaccgacacagccatgaagccccgggcgcggcgctgggcgccaacgagagccacggcaacctccagacggcgccacagcaacctctaggcagtgcccacaccagcctacaggtggcgcccctcgcactgcacctgccgcggccgccccgggtgtgaactgcgctgtcagcagggccgcgctgacacgggtggcccaggcccgcagcagccgaggagcccaggggcactgcccggggtgacgagaaggagaagacggtgccccagaaaaaggcaagagctcagagctcgggtccccgtgccaggaatggccaggagcagaagatggagaggtggagatggagaaggagaagcagcaggtgggaaggagcggcgctccaccggtggggtcaacatgcgctggctgagcttagagtatgaagaggatgaagcaagtcagaaagagcggaaacgagaaggtgcaatgacacagcagagcacaatgcagaatccagccctaggactccaataaaggctgggtttaattccaactcacaccctcccacccctaatcagagaggatcacaggagagagaggacccaaggaacactggaacctgaaggacaggaatctgaggccaagactgattgctggaaattgtgggaatcaggaaaggagaaactgaggcagaatggggggatggagggtggtggtggggggcagtgagctgggttaggaaggattagaaatcagaaccctaggaaggatccagaaaggaactgtccttaagaaggtgcatgctgcggctgggtactgtggctcacgcctgtaatcccagcaccttgggaggccgaggcgggcagatcacctgaggtcaggagttcgagaccagcctggccaacatggcgaaaccccatctctactaaaaatacaaaaattagccaggagtggtggtgtgcacccgtaatcccagctacttgggaggctgaggcagggagaattgcttgaacctgggaggtgggagttgcagtgagctgagatcgtgccaatccattgcagcctgggcaacaagaatgagattctgtttcaaaaaaaaaaaaaagaagaaggtgcatgctggggatgaaggaatgggttctaagactcagggagtgagggaaggggagggacaggggttgggggtgcagtggggtgctaatgcagcacccaaacagaagaagactggaggaaagcagggcccttctcctccaactccagctgctcctctgagtcccaggccacctgctcctgtgtctgccgacctactggcctatctctgaatcctgctggaatgccattcctcctgatctctgccctgcctcagacctttcactaacaccaccacccctactgcccagggcccaccacccccactgtccccgaccatagcctgcccctatccagaagcccctgcttccagccacatgccctaggtgacctaaaggggacctggacatgcaggggaagagggtgctcttctggttcctcctgcttaggtatcccagtctcgcaatcatgagtgtgagtaaatgttggatatgacacagattctatttctcaagctgtttcacactgtggtttacctaacagtgttttgtggggtcatcgatggggatttggttctccctgcagaccaaggacctcagcgcagatttcttgagcagcctagagaggctctggcctcacctggccacatcaagttctgggtcctgcctgccctgcttggcccaaacacagcaagggtgacaggagggaaacgggaaaatggtgactttataatattggaaaggaaggatttcatggcccagtggaacacaacagagaacccagaaataaatccatgcatttacagccagctcattttgcaccgaggcaccaaaaacataccatggggaaacagatggtgtcttcaataagtggtgctgggaaaatgagatatatctatgtgtgaagaataaaactagacccctgtgcttcaccatatataaaaatcaaattgaaattaattaaaaacttatatgtaagaaactacaggctgggcactgtggctcacacctgtaatcccagcccaggccgaggcgggaggattgcccgagctcaggcgttcgagaccagcctggccaacatggcgaaaccccgtctctactaaaaatacaaaaattagccaggcgtggtagcgcacacctgtaatcccagctactagggagggaggcggaagaattgcttgaacccaaggggtggaggttgcagtgagctgagattgcaccactgcactccagcctgggtgacagagtgagactccatctcaaaaaaaaaaaaagaaaagaaaagaaaagaaactatgaaaatattagtagaaaacattggggaaatgctttataacacttgtctaggcaaagatttcttgagtaagacttcaaaaacacagacaaccaaagcaaaaattgataaatagaattacatcaagctaaaaagcttctgcacagaaaaaaaatttgtttaattaaaattaaaaataaacaaagtagaccaggcacggtagctcatgcctgtaatcccagcactttgggaggccaaggcgggcagatcacttgaagtcaggagttctagaccagcctggccaacatagtgaaaccctgtctctactaaaatacaaataattagctggggatggtggtgggtgcctgtaatccccagctactagggaggctgaggcaggagaactgcttgaacccgggaagcgaaggttgcagtgagccgagattgtgccactgcactccaatctgggccacagagtgagactccgtctaaaataaataaaaaaacaaagtgaagagacaacccacagaatgggagaaaatttttgcaaactattcatccatcaaaggattaatacccagaacatataagaactcaaaaacaaaaatcccaaataatcccattaaaaaatggacaacagccacggcgggccgggccagcaggtccacgcctcgcctggggcccaggcccgctgcccccaagcgcggcgcccagcccggaccgcatggactcggcctcgcccggtgccgctcgcggcttggacccgcaggactctccgcgctcgcgcttctggtccaacttgtgtccctcaccaactgccctgcggggcccaggctggcccggggcggggcgtcatccagaccaaagccctgtcattgcgctgccccggccgccagcccctcaagaagctatacatgagacgtaggtagccgtagtcggactgactacactggccggggagcagtcccctccgagcccccggccgtcccccctcatcgccctgcgcccacccccatcgcccctgcccccggcggcggcctcgcgtgcgagggggcttccttcacctcggtgcctcagtttccccagctgtaagatagggacagggcgacccagtggcggagaggagccggctgtggagccctgcccgccccctgccctctaggtagcccgccgtctgatgaggattgttattctaagtgcaatacttggccctccggcttcccgctgctcccaccgtgctcacgcaataacctgcccagccgccgtccacgcgcgtcccgcggtgacctcctggagcagtgccccagctccctccagcacctgcgccgaggggcgggccgtcctggctgcgcagggcgcgtgggcgaggctgcaaaggctggagtcccgccgctgtgattaatgtactgacgaaccgaggcagcagtgcccccatcacgacccccacgccccactaacccccacgcccccactccgcgcaataaatgacagcattggcaaaaaaaaaaaaaaaaaaaaaaaaaggcaaaagatctcaatggctattttccaacagaagacatacaagtggccaacaggtatatgcaaacttaacatcactaatcatcacagaagtgcacatcaaaacccagtaaaatttcatctaacctcaactaaaatggcgactatcaaaaagtcagaaaacaacaaatgctgacaaggacgcagagaaacaggagcactcaaacactcttggtgggaatgttttttgtttgtttgttttgagacagagtctctctctctgtcgcccaggctggagtagtgcgatggcgcggatctcggctcactgcaacctccgcctcccgggttccagcattctcctgcctcagcctcccgagtagctgggactacaggcgtttgccaccatgcccagctattttttgtgtttttagtagagatggggtttcaccattttggccaggatgcttttgatatcttgacctcgttattctcccgcctcagcctcccaaagagctgggattaccagcgtgagccaccacgcctggccggtgggaatgtaaaatagcttatccactatggaaaactgcatggagggtcctcaataagctaaaaatagaactaccgtataattcggcaatcacactgctgggtataagtccacaagaaagaaactcagtatctcaaagacacatctgcactcctatgtttattgcagcactattcaaaacagccaaaatacaaaatcaacctaagtatccatcaacagatgaatggacaaagaaaatgtggtacatatacacaaaaagaaaggatttgtgaatatactaaaagccattgaattgtatgccttaaatggggaagttgtatgctacgtgaattctatttcaataaagttgtttttaaaaaacgtaaggggtcagacacaatggctcatgcctgtaatcacagcactttgagaggcctaggcgggtggattacgaggtcaggagttcaagaccagcctggccaagatgatgaaaccccgtctctactaaaaatgcaaaacttagccagcgtagtggcggacgcctgtaattccagctactcgggaggccaagacagagaattgcttgaacccaggaggcgaaggtttcagtgagctgagatcgtgccactacaatccagcctgggtgacagagcaaaactcaaaaaaataaataaataaaataaggagccgggcaccatggctcatgcctataatcccagcaatttgggaagctgaagtaggtggatcttctgaggtccggagtttgagaccagcctgagcaacagggtgaaagcctgtctctactaaaaagacaaaaaataagtcaggcatggtggtgcacacctgtaatcccaggtactcgtgaggctgaggcaggagaagcacttgaacctgggaggcggaggttgcagtgagctgagatcgcaccattgcacttcagcctgggcaacaagaacgatcactttgggactgtgatttttgagattttagatgtgagggattttgatctttcaggatttaacctattttacagttgagcagactgagccacagagaggggatgtgaactgcccaaggtctcacaggtggtaagtgtttgtagctggaacctgaactaaggaaggagaccactactactccggctgccctcctcccaccatcttgcctagttcacaagacaggaggaaagagagaaagcaaaaatttagaaacaaaagtaagataagtagccagacaccttggcaccaccacctgccacaggagttaaaaataataataataatgacatcaacccctgacctaaactacttgtgttatctgtaaattccagaccttgtatgaaaaagcattgcaaagctttctgttctgttagctgatgcatgtagcccccactcaccttccccatgcttgctcgatttatcacgacactttcacgtggaccctttaaagttgtaagcctttaaaaaggccaagaatttctttttcggggagctcgggtcttaagacacaaatctgctgacgctcctggccaaataaaccttttccttctttaatccggtgtcttgaggagatttgtctgcggctcgtcctgctacagaaccagggtctaccttggcaagggattccacactgagtctcctcctgagaagcctgctctctggggttttgaggaaattcatggtcagtaaactgtgtctcaggaaattgttcctctcatgccattagtacctctaatgcatcagtcagcataaacaagattatgatgcagtaacaggcaacctccattctctctccctttgttttgctttgtttcattttatggagataagaatctcgctctgttgcccaggcaggagggcagtggcgtgaccttggctcactacaacctccacctcctggttcaagcaattttcctgcctcagcctcctgagtagctgggattacaggcatgccccaccacacctggctaatttttgtatttttagtagagacggggtttcactgtgttagccaggctggtcttgaactcctggcctgaagtgatccaccagccttgggctcccaaagtgctggaattacaggcatgagtcatcctgcctggtgcaccccccattctccatagagaaatagacaaagtcgatttctctcccataggacacatccacagcagccttggattagtctgcattggaaacatccagagtcctgtggcacaaaaaaaagagaaatgcctggccacttactgactctgaaagtttctgctaaaaaatgacaggggttcaggctgggcgtggtggctcacgcctgtaatcccagcactttgggaggccgaggcgggcggatcacaagatcaggagatcaagatcatcctggctaacacagtgaaaccccgtctctactgaaaacacaaaaattagccaggcgttgtggcgggcgcctgtagtcccagctactcaggaggctgaggcaggagaatggtgagaatccaggaggcggagcttgcagtgagccaagattgcaccactgcactccagcctgggctacagagtgagtctcaaaaagaaaaaacaaaaagtgacacaggttcctcccagccacatttcactgatcaaagtgggacaccagcaaacattgtaaatgccaatacaagccagacagctggaagtttttgtttccttttgctttccttctttttcctaccaagattcacgctctttcttccttctttcaacaacctgtggtttcactttctttactataagaaaatgctggccgggtgcagtggctcacgcctgtaatcctaacactttgggaggccgaggtgagtggatcacttgaggtcaagagttcaagaccagcctgaccaacatggtggaaccccatctctagttaaaaaaaaaaaaaaaaaatacaaaattagccaggtgtggtggggcatgcctgtaatcctagctacttgggaggctgaggcaggagaactgcttgaagccaggaggcggaggttgcagtgagctgagatcacgccattgcactccagcctgggcaacaagagcgaaactgcatctcaaaaaaaaggggggccgggtgtggtggctcatgcctgtaatcccaacactttgggaggccaatgcaggcagatcatgaggtcaagagatggagaccatcctggccaacatggtgaaaccgtgtctctactaaaagtacaaaaattaagccgggcacagtggctcaagcctgtaaccccagcagtttgggaggccaaggtgggtggatcacgaggtcaggagatcgagaccatggtgaaaccccatctgtactaaaaatacaaaaaattagccaggcgtggtggctcatgcctgtaatcccagctactcgggaggctgaggcaggagagtcgcttgaacccaggaggcagaggttgcggtgagccgagatagcaccattgcactccaacctgggcaacaagaatgaaactctgtctaaaaacaaaaaataaaaggctccgcattccatgactcatcatggaaaagataaaatggtccaaattaaatatgtatttctatgctgacttataaattgctaaaatagttcataaccaatgtttcgtttgtcaaatccatgttcctgggaagacaatcaaagcttcaggtgcatttggctacctcatgggcaatttgaacatttcaattgtcaactgtcattttcaatgcatgttttctggttgctttcccatgcaagagggctgatattataacagtagatctatggtatggtgtattttcaccagatactgaaagctttttatggctcactgactggggacaatcaattccttcacaatctagaacctgaagattggatcttctgagaacatcagagaaagaatgtccttgccatccacactacagcaaaacttcaggaccttgaactttgggttcataatctcacaagagggaagtttttcgctggaagaagatggcatccttgatgtgaacagcttttcccaagatcacagatcaagacttctggtttttatttttatttttatttttttttgagacagactttttttttttttgatatggagtctcggtcttctcgctccagctggagtggaatagcgcaatcttggatcactgcaaccttcacctcccaaattcaagcgattcttgtacctcagcctcctgagccgctgagactacaggcacatgccaccatgcctggttaattttgtgtgtgtgtgtgtgtgtgtgtctgtgtgtgtgtgacagggttttactcttgttgcccaggctggagtgcagtggtgtgatcttggctcactgcaatttctgcctcctaggttcaagtgattctcctgcctcagcctcctgagtagttgggtttataggcgcccaacaccatacccagggaattttttgtatttttagtagagacagggtttcaccatgttggccaggctggtctcaaactcctgacctcaggtgatccacccgcctcagtgtcccaaagtgctgggattacaggcgtgagccctgtgcccagcctccgttcccccccacccttctctcgactgagagagactgactggggacaatcaactctctctagactgacagagagagagagagagggagggagagaaagagacggagtctggctctcacccaggctggagtgcagtggagtgatcttggttcactgcaacctccaccttccgtgttcaagcgattcctgtgcctcagcctcccaagtagctgggattgtaggtccgcaccaccacgccctgctaatttttgtgtttttagtagagacggcttcgccatgttggccaggctggttttgaactcctgacctcaggtgatccgccagcctcggccttccaaagtgctgggattacaggcgtgagccacctcgcacccggccaaatgaaataaaatgctaaagtaaattcaggactacccctcctccaagtcttctgtcccctttgggcgcccaggtgagcgggggaggggctgggggaataataacatcaaaagagcgccttttcctcccttattccgaggagactttcctgggcctgactcccggtcctgtccccagcgccccgcggcctctcgagccccttcagtgaccaagatgcagagatcaggatgcctttgcgccaccccaggtgcccacccctagctggttccgcctgggccccgagggaaggtgaggtcgagggccgggccgaggcgtggcatccagggtgtgtgtccgctgggcttgctgcctccggcggcccggcagcaccgccccacctctgccaccctccgatggggccgctacctgtgcgcctgccaatcaagctgctcctgcggctcccgtagctgctgctgctgctgcttgaacctggccccaggtccggcgagggtaagtgaggaaggggctttcccggaactcaggcgttccgggattcctccagcccttcctagggacccagcagccctgcctcccatccctcttcaagttcctagttgccctagagcccccagctcgctcttctaatgctcacccacactctgggtcccagccctctgcagggccccccactcactcctcccagggacccagaactagcccagcccttccccggggccacagagtcctctcctggctccctcccctaaccggctgtgaccctctccagcagcccggaagcttcccgcttgtcctgatctggggtccgcgaacttatccttcattccacctatccctgagatgtgagacaccagagggtgggaggagcaggggcagaaagggcccggcttgggggtgggagaagaatatattgtgcccctgtacaacaaacccctgtgaccaaaaaaaaaatatagatcatactgtccctatctcactatccatcatttggggtcactgtagagaggtctcctgggtgactgcccatttctggggtgcacagatacatgtagccacagaatactatgcagacaccgccagcacacagatgcgcaggcacaggaccagccccagactcacctggccctcaggtgtgcagctcacggtgtgcagctcccacaggcaaaaatactgagataccgctagggggacacatgcacacacagctcaaggatacccgagacagcactcaggacaattcagatgtaccgtgtatatatacacacacacacacacacacacacacagagcagcacagacacacatatgtgcacatagaccctggggctcacaggatgcacagacaaccctggccctccccgaggaggctgcagcgggcagacagggcaaacagaccccagcgtgacctgccccacctatgttggcacagagggagtgttttgcttggttataagcagtgctcatgcctgccccatacctagaaccctccctctatagggctgttgctagggctctgagataccagagtgtggtcagggagtgtggcaggggaaactttggggacagcttcagggtactgtgttgggactgggacattgtcagggtgctcagagtgggcgtgttccctgggtcttggtggatttagaggtcgagggaccatttctggaagctcactgtgtgccaggggagcttatatcagagatcttttttttttttttaagacagtctcactgttgcccaggctggagtgcagtggcaccatttcagctcactgcaacctccacctcccgggtccaagagattctcctgcctcagcctcctgagtagctgggactacaggcgtgcaccaccacacctggctaatttttgtatttttagtagagacggggtttcaccatgttagcaaggctggtctcgaactcctgacctcaggtgatccacctgccttggcctctgaaagtgctgagattacaggcatgagccactgcactaggccagagatctgctctggaagaccccccaggccggagggcactgccacaagcagacagtatggcgagggtccctatggccacctggcaggcagggtggattctggagggaggtggcctgggagcaggctgaggatggggtgagggcatttgagcagcagagtgtctgcgtgaccaggcataactggaggaacagtaaacaactcttgtgtgagaggatgagggaggggtgagaggggctgactacccccaggacttggggtgcgttgagactccttagctttatccagactcttgggagccatggaggtttgaggcagaggtgtgggctgctgggagagtgaggactcaccatccagagaggaaggcgaagctttcaactctaaatgccgttttattttcgtgttttttttttttttgagatggagtttcactctcgttgcccaggctggagtgcaatagcacgatctcagctcactgcaacctctgcctcctgggttcaagcgattctcctgctgcaccctcccaagtagctgggattacaggtgcgtgccaccatgccttgctgattttgtatatttattagaaacaggctctccctctccctctccctccccacagtctccctctccccctctttccacggtctccctctgatgccgagccgaagctggactgtactgctgccatcttggctcactgcaacctccctgcctcattctcctgcctcagcctgccgagtgcctgtgattgcaggcgcgcgccgccacgcctgactggttttcgtatttttttggtggagacggggtttcgctgtgttggccgggccggtctccagctcctaaccgctagtgatccaccagcctcggcctcccgaggtgctgggattgcagacggagtctcgttcactcagtgctcaatggtgcccaggctggagtgcagtgccgtgatctcggctcgctacaacctccacctcccaaccgcctgctttggcctcccaaagtgccgagattgcagcctctgcccggccgccaccccgtctgggaagtgaggagcgtctctgcctggccgcccatcgtctgggatgtgaggagcccctctgcctggctgcccagtctggaaagtgaggagcgtctctgcccggccgccatcccatctgggaggtgaggagcgtctctgccaggccgcccatcgtctgagatgtggggagtgcctctgcccggccgcgaccccgtctgggaggtgaggagcgtctctgcccggccgccccgtctgagaagtgaggagaccctctgcctggcgaccgccccgtctgagaagtgaggagcccctccgcccggcagccaccctgtccgggagggaggtgggggtaagccccctccaggccagccgccccgtccgggagggaggtggggggcagccctcacgcagccgccaccccgtccgggaggtgggcacctctgcccggccgccccatctgggaggtgaggagcccctctgcccggccgccaccccgtctgggaggtgtacccaacagctcattgagaatgggccatgatgacgatggcggttttgtcaaatagaaaagggagaaatgtggggaaaagagagagagatcagattgttactgtgcgtgtgtagaaagaagtagacataggagactccattttgttctgtactaagaaaaattcttctgccttgggatgctgttaatctataaccttacccccaaccccatgctctctgaaacatatgctgtgtccactcagggttaaatggattaagggcggtgcaagatgtgctttgttaaacagatgcttgaaggcagcatgctcgttaagagtcatcaccactccctaatctcaagtacccagggatacaaacgctgcggaaggccgcagggccctctgcctaggaaaaccagagacccttgttcacgtttatctgctgaccttccctccactattgtcctatgaccctgccaaatccccctctccgataaacacccaagaatgatcaataaatactaaaaaaaaaaaaaaaaaaaaaaaaaaatttttgtgccctgctactggcctcaagtgatcgtcctgcctcggcctcccacagtgctcggatttcaggtgtgagccactgcgcccagccccagctgtgaatttgtttataaaaacccagagcattgaaagttttaagagacggcccgggtaagtcttcagtgcatctcctgcacatgctccacacctgcgttacactaatcatgccactatctcacttctccaaccctttgagcttgcactttttccctctgcctacatcagtgcttctcaaatgtggtaaaggatcatttaaaaaaaatttccaatctagaccaggcatggtgatgcatacctgtagtcccagttacttagaaggctgaggtgggaggattgcttgagtccaggagttcaagaccagcctgggcaacacagcaagatcccatgtcttaaaaaaaaaaaaccaatctactgtggacccatacttatgtaaaacacaataaggctgggcgcggtggctcacgcctgtaatcccagcactttgggaggtggaggcgggtggatcacgaggtcaggagatggagaccatcctggctaacatggcaaaaccccgtctctactaaaaaaaaaaaaaaaatacaaaaatttagccaggcgtggtgttgggcgcctgtagtcccagctacttgggaggctgaggcaggagaacggtgtgaacccgggaggcggagcttgcagtgagctgagctcgcgccactgcactccagcctgggcgacagagtgagactctgtctcaaaaacaaacaaacaaaaaacaagcaaacaaaaaacacaataaacttaaatgatcagaaaataaccacatgcttagatatcagagcaaaggcccagtctctcaatgcaccctcttactgatggcacctgtcttgttatgaacaggtaacagtgcatccacgctggtctggaccagctctcccttctccctgcctggtgaaccctcagggtccaactgtcactactgtctccactatgtcttcctgatgttccacccccggtcacatcctcaatacatctgtgactttctttttaaaacggcgtctcgctttgttgcccaggctggagagcagtggtgtgatcttggctcactgcaacctccacctcatgggttcaagcgattctcctgcctcagcctcccaagcggctgcgactacaggcatgtgcccccatgcccggctaatttttgtatttttagtagagagggggtttcactatgttggccaggctggtctgaaactcccaaccttgtgatctgcccacctgggcctcctaaagtgctgggattacaggcgtgagccactgcgactggccttttaaaacacccattataacttatgttactataattttctgttaaatgtcaaaaagcagcaggctctttgaggtcaggaacgtgttcaattcacctcttcatctgagccttgtgtctgtcatgtggtagcagctcagaagtataatcagcaaatgaatgggctcaacacacctttgtggcaacaagcaatcaaccagaacaactttaaacagacctttagtgactgaggtgtggtttaggacttcaaggttggatggcccaggcgggaaacagagtggagagctcagtaggccgtctgagactgctgctggcggtagccaccgcggcgcatgtagccctcgtttttgcggtagccgtccttctggtctgtaggagagagatgggaaggaagggcagggaatgccaggtgagaggcggtgagggcaccaggagtgggcaaggagaggagccgaagtactcacctcggaagtagcccccgtaggtgccctgcttgtggtcaaacacccgttcgttgttctccaccaggctgcccagcttctcggccagctgcagagccaggttctgctgggcagtgggctcagtgcggtgcatcaccactgtctgtgttggctggtccagggaggcctgacaggcgccaaggcagaggaggggacacgacacagatcaggcccctctgctccaatccctccatggctccacctgcccgcttcccaccccggcccctaccatcagctcctcattaatgatcattttgctgatgatggagtgcacagtgggcagatccagctcaaacatgtctgacagcgtctccatgctgggaagaaagaaggcagagggcaggggcagtcaggacacttgcccacaaggctggggcccttctgtgtccccagggccccgcctacctgatggagtcatagacactgctgtaggtgaagaggtaggtcctcagtgactcttcctggatcttcctgtgggaagaggggacagaagacacaacagggcctcagggaaggggaccaaccagtctcttcttccccgacccatcacggcctctctgtctgctcacctaaccagcatggtgcggactttgtcagcctcggggaaaaggtcccacactttcccattcatcttctcattgatgataaaactgtgacaggtcttccagtcacccatcttcatggccttggaggcagcgaccacatgttcccgcatggactcagggggacctgaaagggtgggaatgaggcagggcctagggaacttgggacaagttccattagcactctttaaggaggaacagaggctggaggagcaaaccatactagagactctccccgcctctccaccaaacagccacgtagtcgcccaagccactccatctgcacaaatgtttgaactcaatcagtccatagatgcacttcaggggactgccgaaaccctcaaaaatgttgacaaattgtgcacatgtcctcatgtacattcttcctaggaaaaaggcccatggctttcatcagattctcgtaagcttccttgacctaaaaacacctcttccagccaggcgtggtggctcacacctgtaataatcccagcactttgggaggccaaggcagacggatcatctgaggtcaggagttggagaccagcctggccagcatggcaaaacctcgtctctactaaaaatacaaaaattagccaggcatagtggcacacgcctgtaatcccaactactcgggaggctgaggcaggaaaattgcttgaacccgggaggcagaatttgcagtgagctgagatcttgccactgcactccagcctgggctacagagcgagactctgtctcaaaaaacaaaacaaaacaaaaccaaaccacctcttccagctcaactggaatggaatttaccaacccttcctcactcacatcaccttcatgaatggtgccatgcccatgcatcaattacactgttgccagcttattattcttccaagcagctcacttcttttccttaaaaaacttagccccggtcaaaattatctctaaaatcacaagtttatatattaattatgaactcaggcccccaaatacaatcctaagacaagccaggaaggtaagacatggtacgccatagtaactggaattcagggtagacaaagtgcaaaagttctacggctagaaatgggtggcagacagtgaaacacaaacacgcagcaagaacggcaagctcaatgcgaacggggatcaggtccaaatggaaccataggagcagggctaagtgttaagagtgtaaggagaggcacacagccctcctggatgaacctccattttaaccatattaacacttgcaaaaggcaaggttggtctgggcgcagtggctcacacctgtaatcccagcactttgggaagccgaggtgggcgggccacctgaggtcaggaattcgagaccagcctggccaacatgaagaaaccccatctctactaaaaatacaaaaaattagctggacatggtggcgggggcctgtagtctcagctactcgagaggctgaggcagcagaatcacttgaacccaggaggtggaggttgcagtgagctgagactgcgccactgcactccagtctgggcaacagtgaggctccgtctcaaaaaaaaaaaaaaaaaagaaagaaagaaaaaggcaagtttaggggctcaaagaatatttctctataggccgaacaacagtgcagggctgatggaaactggcttttggaaccactgtagggagaaattgagaggcagggactgtggagaagcagacagccctttcccatcgctgctacttcagctccagccaaggctagctctgcaggaaggcagggccaggagcgacagactgccaatattctaagacatgaaaattccgattttcatgggaaatttccccacaaagtaaatctcactacataagccaaacaaaatgtgcctaagggaacttgccctttagcccaaacatatacatgaccaggagaggacaaatctgtagggggatgtggctgtggacactgggctcagctcactcgtcaagccctcctgtgggccaatgtcacaggaagggcgcagctcaattcctttccagtgagtcaccactcactgcaaccctgcaggatctgtctttcaaaaggggccaaaggaatcaacgttagcctcttgaacgataaggctctatgatagttggtttggctggaatataatgtacatgaagggaagaaaagggaaagaaagatcagaggtacacatgagctgcattaaactcgggcaagtcacttaactactctgtgcctcagtttctccactgggaaaaagggtattactagtacctaccggcatagagttattactaatgcagattaaataattatttgtaaaacacttagcacagtgccaggcagaggaggtgtcattaaatcagatggagtcgagtggtgggagagttactcccttcacttctcttaatccttatgtgtaatcagggagcaaggcagcctgctgaaccctggagctccacactcacccagcaggggctgtcgctcgcccacgcgcagctggtggtggaactgcttgctgatcatgcgtcggcgggcatcgctctcatgggcggccatgtaggggatctccaggagcatggcagacaccaggtagacacactccagcagctccaggttgatgtgcaggtggaaggggacctgacggcgccgctccaccttctcctgctcctggttgcgctcctgcaggctgcgcagcagcaggccctggcccagaagctccttggctcggccactcgactggatgtccagcagggcgttgtgtgcgtccttggtcaggccttggcggaaggcacagatgcccagctgcaccatggtgcggttgtaaaggatctgggggcaaagggtcataatgcactcagagatgacagctgcaagacaagtcttcatttattccataactaagccgggtgcagtggctcacgcctgtaatcccagcactttgggaggctaaggtgggaggatcacttgagcccaggggttcaagatgggcctgagcaacatggagataccccatcgctaaagataaaaaacaaaaacaaaactaaacaaatctacttcaagtgcctactatgtgctgagcactaggctggggagggagagcaaaacagacaagtccccagtctgcatggagcttatgtctaggggtggggtgtggtgggcaagagagctgcactacaaggatggtgactcatgctgagaagaaaaataaagcagaggacggagccaggaaggcagtctgcgcagtggtggaggctcaaatgttcatataactacagaaggcctcattgggaaagaatgtttgaataaagacctaaagagagagcaagtcatgcaggcatctggggaaagaatatcctataaaaaggaaaaataaacgcagtgatcctgtggaagaaccgggccaggcatattcaagaaacaaggggcgcaacacagctagggctgggaaaagatgccaccacaagctgggggatgggcgagcaccagccatttatgagtttttgttttttttttttttggagacggagtctcactctgtcacccaggctggagtgcagcggtgtgatattggctcattgtaagctccgcctcccgggatcacgccattctcctgcctcagcctctccgagtagctgggactacaggcgcccgccaccacgcccggctaattttttgtatttttagtagagacagggtttcgccgtgttagccaggatggtctcgatctcttgacctcgtgatccacccgcctcggcctcccgaagtgctgggattacaagtgtgagccaccgtgcctggccttgttatgagttttaagacaagaaaccatgggaaggttttgagcaaacaggtaatatgatctgacataactgaacagggttaatctgtattatgaacagaacaaagggactgaagggacacaaaggcagatgatggtggcttagagcagagggtacaagcagaagtgacagaagtgttctcataatggactgtaaacaggaatggctggggaatcagatacagtatatgagggaaaagttcaaatcaagaatgactccaaggtttctggtctaagcaactgggaagagggacttggcactaattaagacaggggagacggtaagtggtacaaatcttgggggaaaaggctaagtgtagtcataacaacaaaaatgtggagatcaataccagtcataagcttacatgcaaaaagccttaaaaatgttagcgacagaatccagcaatatataatataaaagagacaatatacatgaccaaactggatatacttcaggaataaaaggttggtataaaaatgtaatgaactcggctgggcgtggtggctcatgcctgtaatcccagcactttgggaggctgaggtgggtggatcgtggggtcaggagttcaagagcagcctgcccaatatggtgaaaccccgtctctactaaaaatacaaaagttagccgggtagtggtgatgtgcacctgtaatcccagctactcgagaggctgaggcaggagaattgcttgagcctgggaggcagagattgcagtgagccgagatcgcgccactgcactccagcttgggtgacagagtgacaccctttttcaaaaaacaaaaaacacacaataatgaactcatagttattcattatatgaatagaatgaaggagaagtaaccgggtatttcttttctttttgagacagtcttgctctgttgcccaggctagagtgcagtggcttgatcgtggctcctgcagcctcgacctcctgagctcaagcaatcctcctacctcagcctcctgagtaggtgggactacaggcgtgcaccactatgcctgactagtttctgtattttttgtagagacagggttttgttatgttgcacagcaatgaagatagtatgggacttgcataaggacagacaaaaaggtaaatgaatgggacagagggaatgacctgaaaaacacctactcttataggtaatgtggtttttcatattgttttccacaaagacaccaaagcaatacaataggggaaaggaagtcttttctacaaatgatgctagaacaactaggtatccatatggaggaaaaagaaaccctgatcccaacctcagcagatgcaaaaatcaaaccaagaccaactataagactaaatgtaaaagctaacacccatagcaacttacaaaaaaaaaaaagagagaaatttaaaaagtcttcatgaatttcagttaggcaaaggttttttagacaggatccagaaaataattactataaaagaaaaaactgggccgggcgcagtggctcatgcctgtaatccctgcactttgggagggtgaggcgggcggatcatgaggtcaagagatcgagaccatcctggccaacacagatactaaaaaataaaaaaaattagctgggcatggtggtgggcgcctgtagtcccagctactcgggaggctgaggcaggagaattgcctgaacctgggaagcagaggttgtagtgagtcgtcaagatcgcgccactgcactccagcctgccgacagagcgagactccgtctccaaaaaaaaaaaaaaaaaaaaaaattctgacacaggactagctatccaggatagataaggcactcctacaactcaataaagtgaacaatccaattgttttaaatgggcaagaactgactagatatttattatttcatgaaagataaatggccaataaacataaaaaagtaaaaaagtagccaatatcaatagtcaccagggaaatgcaaactaacaccacaatgagataccattagacaaccaactaaaatttaaaagacctttgagtggccggttgcggtggctcatgcctgtaatcccagcactttgggaggctgaggtgggtgggtcacctgaggttcaagaccagcctggccaacatagtgaaatcttgtctctattaaatatacaaaaattagcctggtgtggtggcacgtgcctataatcccagctacatgggatggtgagggaggagaatggcttgaacctgggagatggaggttgtagtgagccaagattgcaccactgcactccagcctgggcaacagagcgagactctgtctcaaaacacacacacacacacacacacacacacaccccctaaaagatacacacacaccccctaaaagatacacacacaccccctaaaagagacacacacacacacacacacacacacacacacacacacacacacacacccctaaaagatctttgagaccagcctgggcaacatagtgagaccctgtctctacaaaaaataaaaaattagccaggcatggtggcacatgcctgtagtcccagctatggtggcacatgcctgtagtcccagctactatggaggctgaggtgggaggatcacttgaacctgggaatttgaggctactgcgggccatgatcatgccactacactcagtctaggtgacagtgcaagaccctgcctcaaaaaacaaaaacaaaaaaaagtttaaaagaccaataccaccaccggcatgatggctcactcctgtaatctcagcactttgggaggctgaggcaggcagatcacttgaggtcaggagtttgagaccagcctggccaacatggtgaaaccctatctctactaaattacaaaaattagtcggaagtggtggcgggcacctgtaatcccagctactcgggaggctgaggtagaatcgcttgatcctgggaggtggcagttgcagtaagccaagattgcaccactgcactccagccttggcgacagagcgagactccctctcaaaaaaagaccaacaccaccaaaagttgacaaggaactcccaaacactagcaggagtgtaaaatggtataaccacttttgagtttcttacaagaatgttcacagcagcttcatacattagagccaaaaactggaaataaactgggtgtccgccaagaggaaaacagacacagtgatatgttcataccatagaatagaaacacaaacaggagggctgtttaaaaaccagcagtacccccagacaggttcaccaggtgctctacacataaacatttcctagttgcctcaaatatacttttacatgatctacacttccagacacagcttttttttttttttgaacagtcttgctccattacccaggctggagtgcagtggcacaacctcggctcactggaacctctgcctcttgggctcaagcactaccaagcctggataatttttttttttgacacgaaattacgtgtttacatgcaggaggactgcaggatgctggcaactgggaaagaccaagtgtctacttaaatttgcaccggccagacaggtggctgttctggttaagccagtttgccaagaggccaggggcctggcactccttcacctccaaggcctccccatcctacctgcactggcgggtctgcatgctgaatgttgtcctgcaagtggctcatgagcatgaggtcgcgggcctggtaccagcgcgagtgcagagcatggtggtagatgtggcagaggatggcacatgtgcggatccggtctgtgcggtccttggcgtagatgtacttgcacagtctctccatcaacacagccgagtcctcgccctcattttctgcctggtcttgctcagactggggaggaagggaggttatttgcaaaggagatccagctttaaaaggcacaggctctagcaactaaagatgagactctatccagtctcattctaatacctcagtttccctccctgctccacctgcggaagtctagagagtaacagatttgctgtcaagtcctgacagaagtggaggacaggtggacacacccattcccctctgccatgactgccacgtgctcacctttgaggagccctcaggcggggtcagctgtcgctgatgggccttgtaatcaaacttgtagtaggtgtgcaggatgcgcagcaggtagatgcggcagacctcctcggtagtgcccttctcctccaggtagcgctgcacacgctcgatgatggcacacacctgggcctcatccttcaagtgctccacgtactctggcagggagagcacccacccttgtctcagctgggcagccaggctttcccatctgtccccactcattccaatcaacccgtccctcttctgcacccgtcagaaaagtctagtcagtgtgccccagaaaggcctctcccactcccaggacccagaaccttccagtcccacagcttaggaaaaaaatcccaactgccaacctctgccaataagggtctgccaggcctggcccttgcctggtctcccacgattctccctctggcttcctgtgctggagtcccactggcctttttactcctggaacatcaagctcgctctctgctcctcctgtcaggcgctgtcttcagctgattcttcccctaactcctcctcattggatctcacctcaggtggtccctacttaagggtgctttctccagctgttagctacagcagccacccctccagccacttcttaccacagggccctagtttaactctgaactttatatcatctagaattattattattattttttgagatggagtttcactctttcgcccaggctggagtgcagtggtgtgatctcagctcattgcaacctctggcccgctgggctcaagggattctcctgcctcagcctcccacatagctgggatttacaggcacctgccaccatgcctggctaatttttgtatttgagtagagccagggttttgccacgttggccaggctggtctcaaactcctgacctcaggtgattcacacacctcggcctcccaaagtgctaggattacggcgtgagccactgcacctggcccagaattatcttaatatcatactatttttttttttttttccgagatggagtcttgctctgtcgcccaggctggagtgcaggggtgtgatctcggctcactgcaagttccgcctcctgggttcatgccattctcctgcctcagcctcccaagtagctgggactataggcgcccagcaccacgcctaattttttgtgtgtgtgtgtgtgtatttttagtagagatggggtttcaccgtgttagccaggatggtctcaatctcctgacctcgggatccgcctgcttcggcctcccaaagagctggaattacagacgtgagccaccacgcccggccatatcttactactattatttttcaatctgcctttctccatccagcacaaaaggtaagcttttggctgccttgttaatcactacacccttgacttgatgggcacattcacacttttactgagtaaactatgctgcactttcacaccccaatgcctctcatccaagctaaacaagagaagtgaatagatgccttaccccaaaggttctcaaagtatagccctgagaccagcaacctgggagcaggctagaggtgcaggttctcaagccccactcagacctatggaatcagaaacgatgggactgggagccagcatctcatcaggcccttccgtgtgaacgctaggtaagttgaaaggctggcttttcaagcactctgacttagtataatcctcacaaagctctaaacctagtaatattccccacaattttcctctcagcaaagcccacgcttgctcaggctcaccttgggagtgagggtcagtattttgcattattttggtaaattcttcatccattcgttccaccagagttaggatgcagccacggacacgcagtggctgaaaaggaaggcgaaggaggagtcaacaaattagcccagatctcagtctcaaacctcaaccctcgggtcccactgagccttcccaaagcataaaatacacacctccagttatcctgccaactcctccctttacctggtcagcgttgtgcaggttctcactctcttccagaatattctctccaacaaaaatgttgggatttgcaaacaggatatccatcagctcattgatgcagtccaggcacttcccccacatctctggctgccaagatttcaggccacatcagagtcagaggtgtgaaggtagagtaagcggatgcctcccccttcagcaggaatcatggggccttccaccaccaagactgcctccatagcccctgagtcttaagatgctaggtaccttcttcccccaacccaccagcgatgccctgagatgagcctcttcactgctctcaccttcatgtaggttgccaggttggggttgtagtcatagagagaggcgatgatattgaacttgatcttgacaatgacgccctctcccaggttgttttccgctgcaatctgaaccagcagttgcagcagctcaatctgggcagcactagagggccagagagctgggtgaggctttggagacaaatcacaaagtctctcccagcatgcccgcttcagataacgcgccctcctcatcacccatatctctgcttctcctttataaattccaaacagaagcaacaataatcccaaccatcctggaatgctgtgaaatgcttcacacctaccaccatcctctgttacctaataactaaagaaggtaaacactcttttacttttttaatcttaaaaaaaaaaaaagccaggtgtggtagctcatgcctgtaatcccagcactttgggaggctgaggcaggcggatcacttgaagtcaggagttcgagacatggtgaaaccccatctctactaaaagtacaaaatcagccagggatggtggcgggttcctgtaatcccagctactcaggaggctgaggcaggagaatcggttgaacccagaaggcaaaaaggttgcagtgagccgagatcgcgccagtgcactccagcctgggcaacaacgagactccatctcaaacaaaaaaaaaaaaaaaaaaaaagaggagaacattatctcattgtatagatgggaaaacagatccaaaacgttaagtgattggttttaagtcacaagaagagtaaacagcagataatggacggggatgccccaagcatacaattccctctactacagccacacacaggccctcccaacaatcccttcccccaacctccaccctctgccaccctgcaatcccactgcccaggcccacgaatcttaccgatcagttcccttcttgcctcgtgcctgtaggatctcattcagtttcttgataacaacagcatgggtgatctcagttcccttggcaaacatttttggcttctcctgtatcagtacatatcccgtcatgtacatgccagcgggaaactgtccttgccttttccccacaaggggacctttatgtcctcccaaactgttccccaattcattttacctctgaaaccctcaccttaaccaacggcactccgccccggaccctttcccactccccgccttcattgtcctcctcctcctcatccaggcgcttggatttcctgtcgtgcttcttcttagctttgtcctcccgtttcttctcggctgccttcttgtcctcatctgtggtgggtgccctgccgaaagacatgggagaagatgacagatcagcccctccccacctctaaggcttcttcctcccatcaacttcctcttttcctccagcagctcctgggtccaagttatgctctacaacaatgacctagagggcacagtgaaccataaccatagccatctctaacaagacagagtactaaccaggccactgtagacatattaatagaaacaacctgtcagctaagcatggtagatcacttgacgtcaggaatccaagaccagcctgggcaacatggtggaaccccatctctactaaaagtacaaaaattagccaggcatggtggtgcacgcctgtagtcccagctacttaggaggctgaggcacgagaatcacttgaacttgggaggcagagaaggctgcagtgagccacaatcatgccactgcacttaagccggggtgacagagcaagactcagtctccaaaaaaacaaaacaaaacaaaacaaaaaaaaaccaacctgtcattttgctccaaagctaacatctacagttttccaaagaatccacaaacaacttattttctttgataccagctgctttctccagactgaccaactaatcaatgaatcagttcccccaaatatataaaaacatttttttcttttttactattcctaaactgttttatcgctttctctcctctcttgacaaccgattaatctaaattctgaattttaaaaaaatgttcattacaaaaaaggtccccacaaaacagaaaaagatcaccagctaccttaaaatggtcttaggctactggatgttgcctgaaaccatctccagacttgagtatgtatttatgtaacaaaatacaaaccaaatggcaaagacaaattacttcaaactttgcacagatactgaagaataaatctttccagaaagactcaacatttttgaaaactcatatgtaataaccataatctaccatttgaacatttataaataaatttcattttcactgcttaaaaggtttgaatatgtttttggaatagtctataagtttaccagttaaattaagtcttcccttgccagaagaccaatgccataactctcaacaaaagtgtatggactggccaagcacggtggctcaagcctgtaatcgcagcactttgggaggccgaggtgggcgtattgcttgagcccaggagtttgagaccagtctgggtgacaaggtaaaaagcccgtctctattaaaaacaacaacaacaacaacaacaacaacaaaagcttatggatctttcccctgtaccactgcaagactctaatgatgactcactttataggtaaaatcctttgcaaacatgcaaagcatgttcattaaactaaaacctcttggtccaaaccatctgtatagctctgagatcagaagaactaaagctattttttaaaatgaatgcttcaaaagaacttaaacttccttggctaaagtattacttctagcactaaagatagtatgatacacacctcaaaagggaaatgtactattgtatgaaattctaactgaaagacctaagacttggcttgacctctcctatgacagattatactctggtatattcatatcttgttagaaattatcagataacaaatgtttatatcctcagctatataatcaacagataaaagcaacatttctaaacgagtattacctctacttaatacatagttaagagactaaaaactcattattgagagacaccaacggaagtcaggcctaactacactgcagaggaccacaccattttcccatgccttcccaaccacaactactgatggaaagccctagatgtatacccttgcttaggatcctaactcggacattcagtctcactagagatcctggggttcacttaaaaaacaaaaacaaaaacaaaaaaacgcctccagaatcaggtaactcttagaagtagacagcagctctgtaagagttcacaggtcgctgggcgcagtggctcacgcctgtaatcccagcactttgggaagccgaggcaggcaatcaagagataaggagatcgagaccatcctggctaacacggcgaaaccccgtctctactaaaaatacaaaaaattagccaggcgtggtggcacgtgcctgtaatcccagctacttgggaggctgaggagaactgcttgaaccagggaggcggaggttgcagtgagatgagattgcaccactgcactccagcctgggcaacacagcaagactccatctaaaaaaaaaaaaaaaaagaaaaaaagaaaaagagttcacaggtcaatcatgacatcaggtatagatgaacttccccctaataccttcagatcaccataagacaacagatggccttatcccacatcaaagaggctgaagctcatgagaataaacccactcctttacaagcttgttttgaccaaaagatgaaggctgagaaatgctgatgatggaaagggtatatttagactggctgaatctggagttgctgaaaacccttactggcagagggcctatcgtgttttctagagcatccaccaaccctgggtggcatactcaaggagagttaatatcagagtttacacagaaaaacgggcaaacagaatccactgttctgtggttttgccctctctccttgttcctctttctcctatataaatcctgcttttgctcggttggaaattaatctgaaaatctgtctcccttgttacacaagtgaaatagtgtctgtgaattattcttctacactacaaagccacaaactctcaatgtcaaaaagattctgacacttgaaattctaactttattttctcaagggttttcctcagaacattgattcaactaattttagactattctgattaggtatacaagttagtttacaggttaacaaaaaaaaatttggctgggtgcggtggttcacgcctgtaattccagcactttgggaggctgaggtgggcagatcacgaggtcaggagatcgagaccatcctggctaacacagtgaaaccccgtctctactaaaaatacaaaaaaatttagctgggcatggtggcaggtgcctgtagtcccagctactcaggaggctgaggcaggagaatggcgtgaacccgggaggcggagcttgcagtgagcccagattgcgccactcactgcattctagcctcggcaacaggctagtgtctcaaaaaaaaaaaaaaaaaaaattcaagaataacctctaaaagcatagcacgtctaactcccaaaccagcagaaaaaaacaaaatgaataataagaaaatatatataactagaaacggggaaaaaaaaaagaggatgagaaaatacacgtaggctaggtgtggtggctcatgcctgtaatcccagtactctgggaggctgaggcgagcgaatcatctaaggtcaggagttcaagaccagcctggccaacatgctgaaacctcatctctactaaaaatataaaaattagctgggcgtggtggtgctcacgtgtagtcccagctacccaggaggctgaggcctgagaatcacttgaacccaggaggcagaggttgcagtgggccaggattgcaccactgcattccagccggggcaacacagtgagactccttctcaaaaacaaaaacaaaaaacacacaaataaaagaaaaataaaatacaggctgaatatcccttatctgaaatgcttagaaccagaagtgtttcaaatttcaaataattgcatatatataatggggtatcttgggaagggctccaagtctaactatgaaatttgtgtgtttcatctacaccttatacaaacagcctgatggcaattttacatagtattttaaataattttgtgcatgaaacaaagttttgactgcaacctgtcacatgaggtcagatgtggaattgtccacttatggtgctccagaagtttcagactttggaattagagatgcccaatctttagaagacagaatgaatttcaaaataattatgattaaagaaactaccccctccaaattatataccgttgattccatttacctaaaattctagaaaatgctaacttacctagtgacagaaagcaaattagtggttgcccagggatagggtgaggaaactgaggcagggagaagtattacaaaggggaaggtggaaatgtttaggtgtgaaatttttaggatattatgttttgattgtggtgagttctatgggtgtaaacatatgtcacaacttattaaatttaactttaaggctgggtgcggtggctcatgcctgtaatcccagcacttagtggaaggccgaggcgggtggatcacgaggtcaggagatcgagaccatcctggctaacatggtgaaaccctgtctctactaaaagtacaaaaaattagccaggcgtggtggcgggtggctgtagtcccagctactcaggaggctgaggcaggagaatggtgtgaacccgggaggtggagcttgcagtgagccgagattgcgccactgcactccagcctgggcgacagtgcaagactctgtctcaaaaaaaaaaaaaaaaaaaaaactttaaacaagtgcagttattgtatgtcatgtacacctcaataaagctattacaaaatttaaaataaagaggataaacagaaagtataagataccataaaatggtaagaataaatgcattgataaccacaataggctgggcgcagtggctcacgcctgtaatcccagcactttaggaggcccaggcagaagggttactcgagcccaggagttcgagaccatcctgggcaacagggcaagaccccatcttgataaaaactaattatgtagacacatatataaataaccatcatatatatgtaaataactataataaacgtaaatgaactaaattgccagagaagcagagatcaagttctggcggtcattgcacaatgtgaacgtactaaatgccactgatttgtatacctgaaaatggttaaaatgggaaatgttatgtatcacaataaaagaaaaaaaaagcagagattttatgagattaaaaaaaaaacaaaccaaaaacctagctgtgcttaagagacactcttttttttttttttttttttttttcctgagacggagtcttgctctgttgcccaaagctgaagtgcaatggcgcgatctcggcacactgcaacctccgcctcccgggttcaagcaattctcctgccttagcctcatgagtagctgggactacaggcgcaggccaccacaccgggctaatttttttgtatttttagtagagatggggtttcgccatgttggccaggctggtctcgaactcctgaccttgtgatttgcctgcctccgcctcccaaagtgctgggattacaggcgtgagccaccacgcccagccaagaaacactcttaatcatacagcatggcagagttaaaaataaaaggacaggaaacgtccttttcataaacatcctttatcaggtagagggaagctcccttctattcctagcttcagtcttttatcatgaaagaatattaggatttttttcaaatgcttttttttgcatctgctgagatgactctacggcttttgtctgttattctattgatatagtatattagttgattttcatattaaaacatccttctattattgggataaatcctccttgttattaaatttttttttaaaacttttttgggagatgagcccacccatcctccatccccctacaggcaaggagggggtgctcccatataatccttattgtatgttgctgtgtttggttttctactatgttgttaagaacttttgagtctgtatttataaaagtatagctttatagtcttagagttttttttgttttgtttcgttttctgagacagagtcttgctctgtcgcccagactggagtgcagtggcacgatctcggctcactgcaacctctgcctcccagttcaagcgattctcctgcctcagctttccgagtagctgggactacaggcgcctgccaccatgtctggctaattttttgtatttttagtagagactgggtttcactgtgttagccaggatggtctcgatctcctgacttcgtgatctgcccgcctcggcctcccaaagtgctgggattacaggcgtaagccaccgtgcccagccttgatgtcttaagtttaattttaggccccatttgctccctcagacaggagcctttgtgtaacacacatgtgcagtgcacatcacacaccagagtccacacaatgggagacttcaatacacaattattcaaagacaaaaacacaaagtacagtagatataaaagacctgaaccaatagtaacgctgatagttctgtaagatgtcaacaggttaaaaaaacgagtttcatgatcaagcaagtttttgagatggttaataaaacaaagttaggtatatttattctcatggaactttccagaggtggttgtaaaccctccaagaaggggtgtgatagacaatgtggcccagaccttgaccagtgttccctgaagcactggacaaaaaaggccttctcaacaaaatgcccaccaagtaagttgttcagcctctctagacctctagagggctggaaactcactacctccctaaagcagcacgaccacaacttttaaacacaggaaagcaaccttgagagcaataatcttcccattaaaagggtactatttgtctgggtgcagtggctcacgcctataaccccagcactttgggaggctgaggcgggaggatcgcttaagcccaggagttcaagatcagcatgggtaacatggtgaaatcttgtctgtattaaaaacacaagaattagccggatgtactggagtgtacctgtagtcccagctacccaggagcctgaggtgggaagatcacctgagcccaagaggttgtggttgcagtgagccaagattgcatcactacactccagcctgggaagagtgagaccctgtctcaaaaaaagcactttttatctgtagtctgtgcaaactggctaagaaaaaataaataaaagcactatttttagtgagcttgagatttcactcccatgggatacaaaagagcaggtatcacttttacttcaaagggagaaactaagacttaaggtcaagtaacttatacaatgttgtacagctgataaaggctgggagacagaatccacactgggatcctcccctattctgactgtcccagtaaaggtcatgaacacttgcggcagtctgtatgctgtatgtgtactaagaagttatcaggaagggtaacacagtagcaacgcacactgagggctcaccacacgtcagtcctagatgaactactttcttacatcacacctccctgtattcctgcagctattctggaagggagggttccctgccttattttacagatgagaaaactgaagattagacaggctaagtagtttgtccaatgtcacacaggtatcgggtgccaaagtgagatttgcacccaatccacacgcagtgagtaaggctgtgggtaaatatttggactctggagccttcaattctcatctttaggacacattagcttcgtgactttagccaactaatgtacttgactctctgatcctactgtaaaatgctaacagttggctgctccaacctaaaaggactccatggaagaatcaataaccttccagacaattaagagctttccaccagttccagtgtaaccctaggtcccactactttccttactttttaagaaatcttgaggccagcgcggtttgtttcccttcttcctcctctgagtcggaatcggaagatgtggaacctgtgtcccagtcttcatcatcttcggaatcttctgagtcctcatcttcatccttagagggaagaaaagaggatcagcaagaagacagggagattgactggtgtctcctccttactaacgcatgttcgagatttatttacatgagtagaacaagagcagctactcatggaatcaagataccaagggctgggactcaccatcaagtcccagagtgatgctgcaatttggccgcaggaacacacacagcttcccctggcagagctgggcccagatccctgtttgcccactgctctgatgtaagaggaagcttgttctcaactccactaaattccacccctcccaaccctaggggtttgagtcttgtctttttcccccagggactcaggaactacctctggcaggaaatcatccatctaaccctggctcttacatccatctttttgaggaacttgcgactctccccagaaggagcttctgatttcttcttcaagaaagttgcagcactgactccgtcctcatcctcatcctcatctgaagagcctagtggtaatggagggagaaaaagatcctgaatgttgaaaagccagactggagggcagccaagaaaccaggcgaagggcaacactaactctggacttcctatttgcaacaaaggttctttggctcaccttctgaatcctcctcatttttctcagcatcttcatccgcagactgctcggggttctggacagagagggaagtgagagaacaatcatggacgctgtccagccatcagcccaccccacccctccaccccagacagttctgtcatcttcctgctccagtcacacctcccactagcaattccatctttgggcctcagtcacggggtcactgttcccagttcagtaagtgtgcctctagcctccccacctgcttgtagcttgtgatatgggactcgaaatcacggttgtattttcggatcttctgacgcaaggtgctcagagccttggcattgttcttgttcatcttcttcttcccttccttatcttcccaaagctaaagggaagaagaggaaagaaacagagaacagtgatttgaaactaagtaacatttcctaaactccaggcttcttctccacttttgagtcttgctattggaacaccactggtactacttattaactacatctgttagcttatttttaaaagatcctatacatcccaccactaaaagtacaaaaccatgaataagtggtggtaataaatataggcatcacacctcattaagatagtcctctaggtcagccaggatgcggatatagaaccgggggacaccttctttgtccacaatgcttttggccttcccatatgcttttcccaggagctcaaactcttccaggcacttggtgacatcacgaatcttcatggcattacggatggtccggataaggttggtcagctcctcaaacctgggttgggagcccgataccacattgaacgtgcccaccgagggaaaactcaccactgctcccagagactcctatcacccagcctccccacagcttcattgctcccagagactcccatcacccagcctcgccatggctttacctcttgtccttggcactgcggacaactctcttggtatcttcttcatcctcgctcagcaacaatggcctgtttggaaggaacagaggccattaacctcctttcccagtctttccaagagatccgtatttccctactcaggacaggtagaactaagtaatccaggccatccacaccacacccatcctctttttgactcctcctcagggccacttcatatagaactcaatcttttaagtgtacactaagtaaggccttttgctcagtgttgtagcaacacaaagatgacattcactatcctctcaaaaacaaatgaaagtgctaatttactgtgtaactaatgacatagagacacaagtcaccacagaagtaatgaataaaaaaagaggtagagaaaaatgatacttgagctataatgaacagaaaaggctttagggaggtggtacctaaactagatcttagcaacatttcccaaagtatgagaggccaacagcaaggagaaagtctcaatggtattaacacctccactgctagtatttttctacgataataagaccagaccacaggctcacagtcagcaacagtatctctactctttttgtttgttaagagataaggtctcactatgttgcccaggcagcctccaactcctgagtttcaggggatcctcccacctcagcctccagagtagttgggactacaggcatgcaccatcttgcctgcctcttttccctttttattattttttggattattttagcggtgttttttgaggtggagttttgcttttatcgcccaggctgcagtgcaatggcgcaatctcggctcactacaacctccgcctccaaggttcaagagattctcctgcctcagcctcctaagttgctggggttacaggcatgtgccaccacaaccggctaatttttgtatttttagtagagacggggtttcaccttattggccatgctggtctcaaactcttgacctcaagtaatcagcctcccaaaatgctgggattaccggcttgagccacctgcccagcctggattatttggtattttatggcaaatgacactggtttccacctgtggaagtgatacgaaaccatatgcatattggcatatacatgtgcaatacatacttttaaaacagtagcacaaacgtggcagatgtttaagaaacaccattccagtggggcacagtggctcattcctgtaaccccaacactttagaatgctgggcgggaggttcacttgagcccaggagttcagaaccagtctaagcaacacagtgagacaccttctctacaaaaaattaaaaacaattagcctgctgcgatggcgtgcacctgtagtcccatctacttgagaggctgaggtgggaggatcgcttgagatctgaaggtcgaggcagcagtgagctatgacccctcaaaaaaagaaagaaaaaaggaaaaagaaaaaccattctattgttccaaagggtaaaaaaaaaaaaaattaatgtacagaaatggcggatgggtatttacgtagaggtgaacaggcatataaaatgtttaagcacctgcgtacacagcaggtgaccagacttcagagtcgcatcagggggctcccagataccaatcaagcattttgcatttccttctgtgagcagtgagaagtcactaaggacttctcggcggtaaaatgagaggagacaggtagaggctgtagacttaaggccagttaagaagctgatgcaacagatctggcttgggaaacctctgtgattctatcccttgtgcctggtgggtggctaccggctatcacagccctctaaggctgtctctctccaacaccgctccgatcctgcaaactctggtcattgtccaaacccactctccccgccctcacctccatcccctcccatgtgcactgcgttccacagcctgcctaaccccgcactcccagaatggtcacagccacagcccccgcaactcactgtttgccatagttgcctccgacaggtttggtgacgagctcctccccggacaaggacgactcggactcgctgtccgaaccggtggtgaaaaaccgcgacatggcgacggcgcggaggtgctacggccggacctgcgggggagccaaggcgtcaccggccacgcgaagaggcccgagccaacacctcccgacgcccaacccctcaccggccccacccggacctcgacctgggtctcccaccacgaagcacgaggcccaaaaaataccaaccagctgagcccgcgagtcacaccgcaggccctgacagcggaaacgccgagagagaaggcgggtcctcgcgtcacttccgggaagcgccgactaactacactgggagactacaactcccagtggccttcgcgccataagggggcggggacaagcctgagggaaccgggcgctgagaccttggctgcaggcgtcgcgaatcctaccgcgcgttggtgtcgggatttaaaacacgaagatcggcggggcgcagtggctcacgcgtgtaattacagcattaataggcattaatagtatagaagtagataatcctgccgggtgcggtggctcactcacgcctgtaatcctagcactttgggagaccgaggcaggcggattacccgaggtcgggagttcgagaccagcctgaccaatatggagaaaccccatctctactaaaaatacaaaattagccaggcgtggtggtgcatgcctgtaagccaagctactcgggaggctgaggcaggagaatcgcttgaacccgggaggcggaggttgtggtgagccgagatcgagccactggactccagcctggacaacaaaagcgaaactccatctcaaaaaaaaaaaagtagacaatgctagccaggcacagtggctcactcctgtaattccaacactctgggaggctgaggtgggtggatcacctgaggtcaggagttcgagaccagcctggccaatatggcaaaaccccgtgtctactaaaaaatacgaaaattagcctggcacagtgtcacctgcctgtaatcccagctacgtgggaggctgaggctggagaatcacttgaacccaggaggaagagattgcagtgagcagagatcacaccactgcattccagcctgggtgacagagcaagactctgtctcaaaaaaaaaaaaaaaaaaaaaaaaagtagacgatgctagatcttgcaggtctttataggcctgtggtttggagccgccatcggcagaggttttagtgcaagggactgtgttacatttttcaaggtggttttgatatgggagcgggacagggaagtgctgggaagggaagagcatgctcttccaaagtgctgggattataggcatgagctaccacacctggccgttttgttttttattgtgaaatatttcaacagacaagaataaagactattccaatggacatctatgtactcacaacccacccagcaccgtcaaaacttaatatgaggctgggcatggtggttcatgcctgtaatcccaacactttgggaggcagaggtgggcagatcacttgaggtcaggaattcgagaccagcctggccaacatggtgaaaccccatctctactaaaaatacaaaaattcgcctggcatggtggcagatgcctgtaattccagctactcaggaggctgaggcaggagaattgcttgaaccctgaaggtggaggttgcagtgagccaagatcgtgccactgcactccagcctgagcgacagagcaagactctgtctccaaaaaaaaaagttaaaaaaaaaaaccaaggggttcattgtacgtctgtaaatccctaaatatcttttttttttttttttttgagatggagttttgctcttgttgcccaggctggagtgcaatggtatgatcttggctcacttcaacctccgcctcccagtttcaagcaattctcctgcctcagcctcccaagtagctgggatttacagacgtgcaccaccacatccagctaatttttgtatttgtaatagagaaggggtttcaccatgttgtccaagctggtctcgaactcctgacctcaggtgatccacccgcctcggcctcccaaaatgctgggattacaggcgtgagccaccacacccagctctctttattttaaataatatgtgtacatttttacaaaatgaaaatggtacaacagaatacacaggaagaaaaaatatacaggaaaaaatgtttccttcctgccctgacctcatgttcatcagcttttctctctagaagcaaacacaattgtcagtttatagcgttatcttccagatgtcactttgtgccctctctctccgtatctctctttgtgtagacacacacacacacacacacacagagttgactcttgaagaatgtgtaggtctacgtatatgtggattttattcaataaatacagtcaattctccatacaggtgggttccacatctggaacgaaatgtcaatcaaaaataacagtattcactggatttgaaacccatgtataccaagggcccaaattttgtaactacaggttccacaggggcaactgcgggacttgagtatgtacaggttttggtatctcccaggaatcctagaaccaatcccctgaggataccaagaaatgactagatagagacagaaaggatatagatagatgtattgtatgtgtgtatgtatatatatatgtgtgtgtgtatatatatatattcaatatatgtatatgaattatatagatcagggtatgtgtgtgtgtgtgtgtgcgtctacctggaacatatctgtctctaccattgtttcctgcatcttatttcattattcatcatatatcttgcagctcattttgtatcagtgcatatggctctgtctcattctcttttttttttgtttggtttttgagacagagtcttgctctgtcgcctaggctggacataatcttggctcactgcaacctccgcctcctaggttcaagcgatacttctgcctcagcctcctgagtagctgggatcacaggtgcctgccaccacacctaatttttgtacttttagtagagatgagatctcaccatgttggccaggctggccttgaactcctgacctcaagtggtccgcctgcctttgcttcccaaagtgctgggattaaaggcatgagccaccacacccagcctgattgccttttaaaagtattcataataggctgggtgtggtggctcacacccgtaattccagcacattgggaggctgaggtgggtggatcacctgaggtcaggagttcgagaccagctcgactaacaatggtgaaaccccatctctgctaaaaatacaaaattagctgggtgtagtggcacatgcctgcaatcccaactacttgggaggctgaggcaggataattgcttgaacccaggaggtggaggttgcagtgagccgagatcacgccattgcactccagcctgggcaacaagagtaaaactccatttaaaaaaaaaaaaaaaaagcataataaccccagaaggcaggccacactgttccactttagagaggagaatgttgatgtcctaaaaggtcaagtgacctgtctaaggtcaaatcgatagtttgcattccaacccaaacattattccacagctatctaaactgttgagagatgtgttgttttagagccagactccaacaatttttgagtgaattcaacttagtcttttttttttcttttcgagacggagtcttgctccatcacctaggctggagtgcagtggcgcgatcttggctcactgcaagctccacctcccgggttcatgccattctcctgcctcagcctcccgagtagctgggactacaggcaactgccaccacgcccagctaattttttgtatttttagtagagatggggtttcaccgtgttagccaggatggtcttgatctcctgaccttgtgatccgcccacctcagcctcccaaagtgctgggattacaggtgtgagccaccgcgcccggccttttttttcttttttcttttttctttttttgcaatttctgctgcccaggctgaagtgcagtggtgtgattacggctcactgcagcctcaaactcctggcctcaagcgatcctcccacttcagcctcctgagtagctgagacaacaggcacacaccactacacccaattaatatttttactttttgtagagatggagtctcactatattgcccaggctgatcttgaactcctggccttaagcaattctctagcattggcctcccaaagctctgagattacaagactaagccactgtgcttggcctcaacttcatcttgtaaataggaaaaatgggaatgaaggcagctgacttaaagaaatcctaggtcgggcatggtgactcacacctgtaatcccagcactttgggaggccgaggcgggtggatcacctgaggtcaggagctcgagaccagcctagttgacaccgtgaaaccccacctctactaaaaatgcaaaaattagccgggcatggtggtgcacgcctgtaatcccagctacttgggaggctgaggcaggggaattgcttgaacccaggaggcagaggttgcagtgagccaagatcttgccactgcactccagcctgggcgacagagcaagaccttgtcgccaaaaaaaaaaaaaaaaaaaagggaaagaaaacctagtaatttacctaataatttcttcctttatgagtgtagtaggctctgtgactggagacaaacgtaacatgggtgtatttaataggtgaattttgttaatacccagattctgatggggtccttaatggtcccagagtgggaacgacaccctgaaagagctttgatcagtctggtgtctccagttcatgtgggcgtacgtatttctcacagcagattgactctcttcatgtgcctgtaataacacagccagcaagcaggaagatgataatcataactggcatttgaataacaatttcaaatgcatagaggtgcttgaaactcatgaaaacttataggtgggcaggaaaagcagctattactaacctcattttacaaatgagaaaagcaggactctgcagtgcgggggagggctctgttgtgacagcatgagattctgaaaccaggtcctctaactcgcaggtcacagaagacgcttccaagtatattattttattgcagaaggggaatgaactgaacggaaggagaggacagagcgtgggaaaaggggagggagtgccatgggaacccctctgtgggacaaaatgctgggtaccacactccccctcactcacgcaactccagccactgatatcccccctttttcttttattttttccttttctttctttttttaatcttaaaaattattattattactatttgagagagggtgtcactctgtcacccagactggagtgcagtggtgtgatcataggtcactgcagcatcaaactcctgagctcaagtgatcctcccatatcagcctcccaagttgggactacaggtgcacgccaccacgttggactgttatttatgtatttattttgagacagggtcttgctctttcacccaggctggagtgcagtgatacaatcattgtcctggaactacaggcgcccgtcaccacacgagacttatttatttttattttttattttttgagatagagttttgctctgttgcccaggctggagtgcagtggtgtgatctcggctcactgcaccctccacctcctgggttcaaacgattctcctgcctcagccttgtgagtagctggaattacaggcatgcaccaccacatccaactaatttttgtatttttagtagagacagagtttcaccatgttggtcaggctggtcttgaactcctgacctcaagtgatccacccaccttggcctcccaaagtgctgggattacaggcgtgagccaccgtgcctggctgagattcattttttaaatttttttagagatggattctcgctatgttgtccaggctggtctcaaactcctgggctcaagtaatcctcctgccttggcctcccaaagtgttggaattacaggtgtgagccaatgtgcctggcttcaatatcccctttctaaaataaatgtctcaaaagactttgaaattcaggctgggcatagtggctcatgcctgtaatcccagcactttgggaggccgaggtgggaggatcacgaggtcaagagatagagaccatcctggccaacatggtgaaaccccaactctactaaaaatacaaaaattagctgggaatggtagcgcgtgcctgtagtctcagctactcgggaggctgaggcaggagaatcgcttgaacctgggaggcggaggttgcagtgagccgagatcacaccactacactccagcctggcgacagagcgagactccatttcaaaaaaaaaaaaaaaaagaaaagtcaagactatgaaattcacagataatataactttctgatacacacaattttattgtattttgctttgtgtttaattttctcaaatagacctcaagtaccttgaagacaggaatgtcttagtatcccctcagtgcatttcacatagtacatgttcaatgatatgtttctattattattataaatttttcgtttggaaacagagccttgctgtgtcgcccaggtgtgagtgcagtggcacgatttctgctcactgcaacctccgcctccaaggctcaagcaattttcctgtctcagccactggagtagctgggattacaggcatgcaccaccacacccaactaatttttatatttttagtagagacagggtttcaccatgttggccacgctggtctcaaactcctagcctcaagtgatctgcctgccttggcctcccaggatgctgggattacaggcataagccaccacactctgcctattattgtaattattaaaagacaacatacatatagctaaatgaatcagctgcactaatcaatcactggtttggtgtctatcatcatctattagttttgcctgttttttgatttttttttactagagacaagatctcactctcttgcccaggctggtgtgcaattgcaagatcccagctcactgcagcagccttgaactcctgggtttaagggatcctcctgtctcagcctcccaagtagccgggaccacaggtgtacaccaccgagttcagctaatgttttttgtggggtttttgttttttgtagagacggggggggcctcactatgttcccaggctggtctcgaactcctggcctcaagcaatcatcctgcctcagcctcccaaagcatgggattacaagcgtgagccaccacgcctggccagttttgccggttcttgagcttcatataaatagaatcataaggcatatccttttttgtacctggcttctattgttgaccataatacttattatgagattcatccgtgttaagtgcaccagtatggtaggacattcttttttgtttgtttgtttgttttttgagatggagttttgcttttgttgtccaggctggagtgcaatggcgcaatcttggctcaccgcaacctctgcctcccgggtttaagcgattctcctgcctcagcctcatgagtagctgggattacaggcatgcaccaccacacctagctaattttacaattttagtagagactggttttctccatgttggtcaggttggtctcgaactactgacctccggtgatctgcccaccttggcctcccaaagtgctggaattacaggcgtaagtcaccgcgcccagcccagtcattctttttaaattcctgaatggttttcaattgaatgacgatcgataccacaatgtattcattctcctgtagattttttttttttttgatggagtctcattgtgtcctccatgatgaagtgcagtggcatgatcttggctcactgcaacctccgcctcccaggttcaagaggttctcgtgcctcagcctcccaattagcttagattacaggcgtgcatcatcacacctggctaatttttgtatttttagtagagatggggtttcaccatgtttagtagagaccaggccaggctggtctggaaatcctgacctcaggtgatcctcccaccttggcctcccaaagtgctaggattacagatgtgagccaccatacctagccatattataaataaagcttgtatcaacatttttttcaatatttacatcatatgttttaaatttttattattaggtacagagtagtttttgttatacatccctgttaaattgaatattttattttattttttatttattttttgagatggagtctcactctgtcacccaggctggagtgcactggcacaatctcggctcactgtaacctccacccccaaggttcaagtgattctcctgcctcagccttccaagtagcttggattacaggaacgtggcaccacacccagctaatttttgtattttttagtagagacggggtttcgccatgttggacaggctgggactattttattattatgagatgacactctttatctgcagtaatactttttgtgagtctattttttctgatactaatatagctttccaacttcattttagttggttttggcctgatgtatttttttattaattgcttttcaatatttctgtataataatgatatttatatacatcttgaaatagcatatagctagtagctagttttttttttttttttttttttgagatggagtttcactcttgttgcccaggctggattgcaatggtgcagctcgctgcaacctttgcctcccaggttcaagcgattctcctgcctcagcctcccaagtagctgggattacaggcacacaccatcatgctaagctaatttttgtatctttagtagagacagggtttcaccatgttggccaggctggaatcgaactcctgatctcaagtgatctgagtgcctcagcctcccaaagtggtgaaattacaggcatgagatactgtacctggcctatacttagcatttttatacttagaatcatggtgactgaggcactgcagtgcagctggtaagcaatggattttaatgtgtgtgttgccttcagtaaaggaattgtccaagtacagctcttggtaaagatcccaacgaagcaaaatacatcttccttcaatgacctgagattttagtcagctcaggctgctataacaaaataccataaacagggtggcttaaaaaacaatatttatttttcacagttctggaggctgggaagtccaagattaaggtgctggcaaaaccgatttggtgtctggtgagggctctgtttctggtttgctcacagctgccttcttgctgtatccccacttggtggagaaagagattgcttgtctcgttctctttctgtgagggcattaataccatcatgaagtctcccaccctcatgacgtaatctagccccaattaccttccaagggcctcaccttctcaccttcaaatgctatgacattggggattagggcttcaacatatgcatttggcaggagaacacaaacatttagttcatactaatacacgatagtcgaattcttgaaaaattcagtgtatattaaaaccaagcaagaaatactttgggtttaggctgggcgcagtggctcatgcctgtaatcccagcactttgggaggctgaggcgggcagattacctgaggtcaggagttcgagaccagcctggccaacatggcgaaaccctgtctctactaaaaatacaaaaattagctaggtttggtggtgcatgcctgtaatcccagctattcaagaggcagaggcaggagaatcgcttgaagctgggaggcggaggttgcagtgagctgagatcgcgccactgcactccagcttgagtgaccaagcaagactctctatctaaaacaaaacaaaacaagcgactttgggttcatatgtaaaatgaagttagattcttagcacatattgttggatgtctggcggggatattaaaaaaaccactcaaacgtagaagaatctctcttcatccaggaccatactgtgcatggcaggatggctttgctctctccctctaaggacattgtcacattcacagtgagatcaaagcccccacaaacaagcttccaaaatggccctagggggcagtactacctcactgagaaccactgttcagggagttagctgggtcgcagaggcaaaatgttggactacagcgtgtggggccacactgagcgatgatgaagaggagaggcatcccaacacccaccgggctaacctcttccgctggcagcaccaagcccgggtggagctcatggagcagttccagaaggagaaggaggaactggacaggggctgctgggagtacaagtgcaagatggccgagtgccagaggaagctgaaggagctggaggtgtcagagggtgccagggtggaggtggagtggctacacgaggagctgagctgggagcaaaagctggaggagatgcccaagaaaaagagcatgacctggaacgtggacacgctcagcaaaagcagtttcaggctgggtgaggtggctcacacctgtaatcccagcactttgggaggctgatgcggggcgatcacttgaggtcaggagtttgagaccagcctgaccaacatggcgaaacctcgtctctacaaaaatacaaaaagtagctgagcgtggtggtgggcgcctgtaatcccagctgctcgggaggctgaggcaggagaatcgcttgaacccgggaggcggaggctgcagtgagccaagatcatgccattgcacaccagcctgggcgacagagcaagactccgtctcaaaaaaaaaaaagaaaagacggctttagcaggagcatggtgaacaccaagcctgatgagaagatggtcaactacctggtcatctggtgtgctgatctagaggtgcaggagaaatgcgccctcatggagcaggtggtccactaggcaattgtcacgcagttcaacctggtgttggtcaggagccggaaggggtcccccgggtctgcttctggcagttcttcactgagattcagacggctgactgctagtgcatggagagcttcaaggacgagctggaagcctccacggagcctgtgcggggctgcgccaagctgcgcgtctagaaagcaggtggagcaggagtactaggaggaggagctcaagaagcagcttggccctgatggcctggaacccgtggaggtgacgagttcccccctgaggaactccaaaagggcttcaatgcgaaggacgcgcaaatgcagcaagatggaccccaccaaggccaagttccccatgcagcagtgtatcgacgccggcctccgggtccccaactctgaggtcagcgaggccaaggagggagaggaggagtgttcagggaccggctgctggaagctgttcccaagacaggcggggatgtcagtgcgtgacccaccccagctgcagctgccacctgtgtgcaagcccctaggcgccccttttcagaaaacaaaaatagacaccatctccccagctcctggcttcctccacttccgctgctccccctagccctgggggcctgccaggccttccctgccctctccccctccccgccctctccactgtccccactctccagcacccattcaagtctctgctttgagtcaagggacttcactgcccacagcgccccatcagcatcatgccaaaggcccaggggcccggggaggggcagaggtcgccaggctggtccgccaggtagaggggagggtccccagccactaggtggctcaggtcaccgggttctgtttccactgttcatctgctgtctgtgtcttctatttggcaaacagcaatgatgttctaaaaaggattttagatattaaaagaaaaaaaaaagaggctggatgaggtggctcacacccgtaatcccagcacgctgggaggctgaggagggtggatcacttgaggtcagaagttgaagaccagcctggccaacatggtgaaaccccatctctactaaaaatacaaaaattagccgggcatggtggcacctgcctgtagtcccagatacttggtaggctgaggcaggagaatcacttgaacctggaagatggagtttgcagtgagctgagatagtgccactgcactccagtctgagcaacagagcgagactccgtctccaaaaaaaaaagttggaggattcacatttcctattttcatgccctctccctctccctctccctctccctctccgtctccgtctccgtctccgtctccctctccccacggtctccctctcatgcggagccgaagctggactgtagtgctgccatctcggctcactgcaacctccctgcctgattctcctgcctcagcctgccgagtgcctgcgattgcaggcacgcgccgccacgcctgactggttttggtggagacggggtttcgctgtgttggccgggccggtctccagcccctaaccgcgagtgatccaccaacctcggcctcccgaggtgccgggattgcagacggagtctcgttcactcagtgctcaatggtgcccaggctggagtgcagtggcgtgatctcggctcactacaacctacacctcccagccgcctgccttggcctcccaaagtgccgagattgcagcctctgcccggccgccaccccgtctgggaagtgaggagtgtctctgcctggccgcccatcgtctgggatatgaggagcccctctgcctggctgcccagtctggaaagtgaggagcgtctccgcccggccgccatcccatctaggaagtgaggagcgcctcttcccagccgccatcacatctaggaagtgaggagcgtctctgcccggccgcccatcgtctgagatgtggggagcgcctctgccccgccgccccatctgggatgtgaggagcgcctctgcccggccgagaccccgtctgggaggtgaggagcgtctctgcccggccgccccgtctgagaagtgaggagaccctctgcctggcaaccaccccgtctgagaagtgaggagcccctccgcccggcagctgccccgtctgagaagtgaggagcctctccgcccggcagccaccccatctgggaagtgaggagtgtctccgcccggcagccaccccatctgggaagtgaggagcgtctccgcccggcagccaccccgtccgggagggaggtggggggggtcagccccccgcccagccagccgccccatccgggagggaggtggggggtcagcccctccgcccggccagccgtgccatccgggagggaggtgggggggtcagccccccgcctggccagccgtgccgtccgggagggaggtgggagggtcagccccccacccggccagccgccccgtccgggaggtgaggggcgcctctgcccggccgcccctactgggaagtgaggagcccctctaacaaagtgagaacctgtctcaaaataaaaataaaaataagtaaataggccaggcatggtggcgcatgcctgtaatcccagcactttgagaggctgaggtgtgaggatcatgaggtcaggagggnnnnnnnnnnnnnnnnnnnnnnnnnnnnnnnnnnnnnnnnnnnnnnnnnntcagccccccccgcccggccagccgccccgcccgggaggtgaggggcgcctctgcccggccgcccctactgggaagtgaggagcccctctgcccggccagccgccccgtccgggagggaggttggggggtcagccccccgcccggccagccgccccgtccgggagggaggtggggggggtcagcccccctgcccggcgagccgccccatccgggaggtgaggggcgcctctgcccggccacccctactgggaagtgaggagcccctctgaccggccaccaccccgtctgggaggtgtgcccaacagctcattgagaacgggccaggatgacaatggcggctttgtggaatagaaaggcgggaaaggtggggaaaagattgagaaatcggatggttgccgtgtctgtgtagaaagaagtagacatgggagacttttcattttgttctgcactaagaaaaattcctctgccttgggatcctgttgatctgtgaccttacccccaaccctgtgctctctgaaacatgtgctgtgtccactcagggttaaatggattaagggcggtgcaagatgtgctttgttaaacagatgcttgaaggcagcatgctcgttaagagtcatcaccaatccctaatctcaagtaatcagggacacaaacactgcggaaggccgcagggtcctctgcctaggaaaaccagagacctttgttcacttgtttatctgctgaccttccctccactattgtcccatgaccctgccaaatccccctctgtgagaaacacccaagaattatcaataaaaaaataaattaaaaaaaaaaaaaaaaactcaaataaagtttgcactttaggaatgcaaaaaaaaaaaaaaaaattagccaggcgtggtggcgcatgcctgtaatcctagctactcaggaggctgaggcagcagtatctcttgaaccaaggaggtggaggttgcagtgggctgagatcaccccattgcgctctagactgggcaacaggagtgagactctgtctcaaaaaaaaaaaaaaagatagtagtgtgcatgctataaaaaagaatcccagcctctgtgcggggtaaaaaacccaaaccattctttctggggtgtggtctctcaagtggtgccttaactgagtctttatttttttgagatagagtcttgctctgttgcccaggctggagggcagcggcatgatcttggctcactgcaaccttcacctcccagattcaagtgattctcctgcctcagcctccagagtagctggtattacaggcatgcgccaccacgcctggctaattttcatatttttagtggagatggggttttacatgttggccaggctggtctcaaactcctgacctcaagtgatttggcctcccaaagtgctgggattacaggtgtaagccaccacatcttgccttaactgagtctttaatacatcattgcaccacactaggggtcatgttgatttcttctgctgtctaaagataccacatgtgaggcagcagctgcaattggagtcaccatctaaatgagtttcccatagtccacagtcattctctaagatccatccaaccagcatatgccaaacgcctgcccattcaagtcttttttttttgacacagtttcgctcttttgcctaggctggagtacagtggtatgatctcagctcactgaagcctctgcctcccaggttcaagggattctcctgcctcagcatcctgagtagccaggattacaggcacctgccaccacactcggctaatttttgtacttttagtagagatagggtttcaccatgttgcccaggttggtctcgaactcctgacgtcaggtgatccacccgcctcggcctcccaaaatgctaggattacaggcctgagccaccccacctggccccttgcaagtctttgagggtggcactagtctctgcgactctccagggatgtgataatgcttctggttaactgtctttttaaaattttttttctttgagacagagtctccctctgttgcccaggctggagtgcagtaggatgatcttggctcactgcaacctctgcctcctgggttcacgccattctcctgcctcagcctcttgagtagctaggactacaggtgcccgccatcacacctggctaattttttgtatttgtagtagagatggggtttcaccgtgttagccaggatggtctcaatctcctgacctcgtgatccgcctgccttggcctcccaaagtgctgggattacaggtgtaagccactgcgcccagccctctggttaactgtcttgacaggaagtggaagttacagggactttcccttagccctttccaccatgattctctcactccatgggtgggagagccagtgtggagatttgtcagttgccatagatggctattcctattatactctcaggaatttggaaataaccacagggtgggaccatagatcaacggagccctctgtgagctggggctgagctaagactccatctagcacctgaccatctatctttaagcccctacttttagtgatgagccacagtggcattttggatcctcaggacttggcgttaattcagagccaatgtctaggaatcctcaaaaggttgggtattttcttctccctgatgcacactctagtaaacagggcatgttcctctctcagggagaaccaaacttctctccaattaagtgactctggatctatgctgacttaggtctaaaattcaggcgagagactacaactcttcactatggcaactcaacttaggtttttggctactagagcaagttttttgtttatttttttgagatggagtcttgctctgtcaaccaggcagaagtacagtggtgtgatcttggctcactgcaacctctgcctcccgggctcaagcaattctcctccctcagcctcccgagtagctgggattacagatgcatgccaccacacctggctaatttttgtatttttagtagagatggggtttcaccatgttggccgggctggtctcgaactcctgacctcaggtgatctacctgcctcagcctcccaaagtgctgggattacaggtgtgagccactgcgcgcagcttatttatttatttatttttaacaaggtcttgctctgttgctcaggctggagtgcgctggtgcaattatagctcactgcagcctcggactcctgggctcaaaccatcctcccacctcagccttcagagtagctgggactacaagtgtgcacaaccatgcccagctaattaaaaaaaaaaaaccaaaaaaacctttttttggtggagacatggtctcacaatattgcccaagctagtctcaaacacctggcctcaagcaaatcttcctgccacagcctcccaaagtgctgggattacaggcataagccactgtgtccagccagaatttgatgttttgacatatattttatatctatagccgtgaagtcattaccacaatcatgatagcgaaggtatgcatcacgcagaagtctccttgtgactgtaatctctcccacctgcctctctctgacccctcatacccaagaaaccactgatctgctttctgtcaccataggttgatttgcattttcttttttttctttttgagatggagttttgctcttgtcacccaggctggagtgcaatggtgcagtctcagctcactgcaacctccgcctcccaggttcaagcaattctcctgcctcagcctaccaagtgtctgggattacaggcacccactaccacacccaggtaatttttgtatttttagtagaaacggggtttcaccacattggccaggctggtctcgaactcctgagctcaggtgatccgcctacctcagactcccaaagtgctgggattataggcgtgagccaccacgcctgacctgatttgcattttctagagcaggggttggcaaatgttttttgtaaagggccaaatagtaaatattttaggtgttgtaggacaacagataaaaagtagtatattatggcagggcacagtggctcacgcctgtaattccagcactttgggaggccgaggcaggcagatcacttgaggccaggagtttgagaccagactgaccaacatggcaaaacccagactctactaaaaatacaaaaattacccagacatggtggcgcatgcctgtaatcccagctactggagaggctcaggcatgtgaattgcctgaactcaggaggcagaggtggcagtgagccgagatcacaccactgcactccaccctgggtgacagagcgagactctatctcagaaaaaaaaaaaaaaaaaaaagaacaaagttagtgttccctatcatcaaagtctatgacaaatgtttatctgttaattctaatctgtaatgagatttggcaaaaatagtttttcctgaagataggtattgccaaatacagatagcaatccacaagcatatgatgtcacgagcacattcatcatttgaaaggcatttatagaattctatttggactctggccaggtgcggtggctcacttaatcccagcactttgggaggccgaggtaggtggatcactcgaggccaggagtcccagaccagcctaggcaacacggcaaaacccccctctctactgaaaatacaaaaaaatcagccaggcctggtggcgtgtgcctgtaattccagctacttgatgctcagtatcatttgaacctgggaggtagaagttgcagtgagctgagatggtgccactgcactctggcctgggcaccagagcaagaccgtgtctcaaaaaaaaaaaaaatctatttggattggatttttctcttgctatctgccttttagcatgtcactacattatggtttaatcacttgagatgtgtctcagtttcactgaagtcctaaaaatgctactggaactgcagtttgagattggaaatgtagctcctaaaaatttatatgggaatggacatcttgctccttgttttaactttgatattatgggctgtgtataaggcagcttgacatcgcttgtgattcaaacaatataccatcaatgaagttactttacagcagcatacgttaaacatatacgtgctgttttgccttataattttaggttgaattattaagagatattatcaaaactgcttcaaaagctagctaacaaagcctctcagtgtttgatagcagtggttatgtgtggttcttctttgttgttgttgttgttgagacggagtctcgctctgtcgcccagactagagtgcagtggcatgatctaggctcactgcaacctccacctccccaggttcaagcgattctcctgcctcagcctccggagtagctgggactacaggtgcccgccaccaagcctggctaattttttgtatttttagtagagacggggtttcaccatgttagtgaggatggtcctcaagtgatctgcccacctcggcctcctaaagtgctggtaacacaggtgtgagccactgcacctggcccggttcttatttagaaaaatttcaggccgggtgcagtggctcacacctgtaatacccgcaatctgggaggccgaagcaggtggattacctgaggtcaggagttcgagaccagcctggccaacacagtgaaaccccgtctttactaaaaatacaaaaaaaaattagccaggtgtggtggcgggcacctgtaatcccagctacttgggaggccgaagcaggaaaatcccttgaactcgggaggcagagattgcagtgagctgagatagcaccactgcactccagcctgggtgacagagtgagactcagtctcaaacaaaaaaagaaaagaaaagaaaaaaaaattcaatctcagcccggagttaaaaaccatatggctgtgtgtggtggctcatacgtataaccccagcactttgggaggctgacacaggcagattacttgagcccaggagttcaagaccagcccgggcaacatggcaaaaccctgtctctgcaaaaaatgcaaaaactagccaggcgtggtggcacatgtgtgtagtcccagtttcttagggaagtaaccttaggtggaagggtcgcctgagcatgagaggcagaggttgcagtgagccaagatcacaccactgcactccaacctgggtgacagagtgagaccctgtctcaaaaaaacaaaacaaatcaaaaccataaaatttagcacttccaagacatcaaactactgtatggcatggcaagtcaggatattcagcttgtatttctaacaaaaatttatggaactgacagttaaatccacacaagcaaatgaagttcacaattgacagtactggttcaatatcttatgacagattcaaaaatgtgtgcaaagtaccagctgatgaatcatacagttaataaccataggcttttttttttttttttttgagatggagtctcccttatcgctcaggctggagggcagcggcgcgatctccactcactgcaacctccgcctcctgggtacaagcgattctcctgcctcagcctcctgagtagctgggattacaggcatgtgccaccatgtccggctaaattttgtatttttagtagagatggggtttcatcatgttggccaggctggtcttgaactcttgacctcaggcaatctacccgcctcagcctcccaaagtgctggcattacaggcgtgagccaccgtgcccagcaaccataggctttaaacaccttacatttgcacaagctttgtaaattcgtccaacaaaggctttttctgctccatatatatatataatatatatattatatatatatatttttttttgagacggagtcttgctctgttggccaggctggagtgcagtggcactatctcggctcactgcaagctccgtctcctgggttcacgccattctcctgcctcagcctcccaagtagctgggactacaggcgcccgcaaccacacctggctaattttttttttttttttgagatggagtctcactctgttgcccaggctggagtgcagtggtgtgatctcggctcactgcaagctctgcctcccaggttcacgccattctcctgcctcagcctcctgagtagctgggactacaggcacccgccaccacacccagctaatttttttgtatttttagtagagacagcgtttcaccgtgttagccaggatggtctcgatctcatgacctcgtgatctgcccacctcggcctcccaaagtgctgggattacaggtgtgagccaccgcgcccagcctatttatttttttttgagatggactttcactcttgttgcccaggctggagtgcaatgacaagatctcggctcactgtaacctctgccgcctggttcaagcaattctgcctcagcctcccaagtagctggaattacaggcgcctgccaccaggactggctaattttttgtatttttagtagaggcagagtttcaccatgttggccgggctggtcttgaactcctgggctccagtgacctgcctgcctcagcctcccaaagtgctgggattacaggcatgagccactccgcctgacccagatattattattgtttttgttactcttattatcgcaaagactctctcccaatttatggcttatcttttcattctattaagtgccttttttcccccaagatgaagtctcgctgtgttgccccagctggagtgcagtggtatgatctcagctcactgcaacttctgcctccacggttcaagtgattttcccacctcagcctcctgagtaactgggattacaggtgcctgccaccacgcccagctaatttttgtttttttagtagagactgggtttcaccatattggccaggctggtctcgaacccctgacctcaagtgatctgcccaccttggcctcccaaaatgctgggattacaggcgtgagccaccgtgcccagcccggcccacatgcattttagaaacagtacattgatttgtattctactccctttctaaaatcacttatcagttcttggaacattttttttttttttttttttttttttttgagacggagtctcgctctgtcaccaggctggagtgcagtggcgcgatctcggctcactgcaacctctgcctcccaggttcaagcaattctcctgcctcagtctcctgagtagctgggactacaggtgtgcaccaccacgcccagctaattttttagtagaggtagggtttcaccgtgttggccaggatggtctcgctctcctgaccttgtgatccacccaccttcacctcccaaagtgctgggattataggcgtgagccaccatgcctagccaagcctgtggttttctttctggaagtgacgcagtgcactgagaagaatccgtcccacgccacagcccttacagtcatcgttattgacatcacagtcaagtacagcagccacttgggctcccggggcatgcgctggagttggtactttataaagacaagctgtaggcaacagtctgattaactcgatgccacagcacatcacagattaccaacgtccagttcccattcccttggagctcagacaaagctcaaacccaagggcatggacaaaccagtccccaaatgctatccttgtggatctatctccaggcacccctcttgtaataatgctacatcgatcgggatccactcacaaggcggaaaccacagagtcatttaaacagggaagttttaacagaacaatgaactatttacaggggattgtgactaagtgtgaatcaaagagaactctaaaaaacacccatggggccgggcgtggtggctcacgcctgtaatcccagcactttgggaggctgaggcaggcagatcaagaggtcaggagttcgagaccagcctggccaacatagtgaaactccgtctctcctaaaaatataaaaattggctgggtgtggtggcacgcaactgtagtctcagctacctgggaggctgaggcaggagaatcgcttgaacccgggaggcagaggttgcagtcagccgagatcatgccagtgcactccagcctgggtgacagagggagactctgtctcaacacacacacacacacacacacgcaaacaacaacaaccaaaaaacacccaaagggtgagggagagagcccagagaaagaacaaacctggaagggggtagcctcgttaaggctgggtctcagacctcactggagagaggtggctgcagcccattggacggtgaggttggctgggttgccccaggtcacggctggtccacaaccagctggccgaggctggtggccaggggaccacaagcagaaacccctcctgctggggtgctggggtgccaaggttgtcaggctgggaaccacacactggggctggcaggcaggaagttgaatgccactgtgtgtccggtgcagggctgcctgccacgggggtgggacagaggaggaaccaggacaagccccttcctcctgtggtgtccctctggcgccctctactggcaaagaagaaatgtttgtcagttccacatctggtagcaagcggtgcaataaatggatttggaactgggaggcaacagatagaaaactggcaccagtatgtgctcatggtaaaaaaaaaaaaaaaaaaaaggaaaggcaagttttgtttctctttccttcttgcttgcttgctttctctttctttctttctattattattttgagagacgttcttgctctgtcgcctaggctggagtgcagtgacaatctgggctcattgaagcctcgaactcccaggctcaagtaaccctcccacctcagcctcccaagtagctgggactacaggtgtgtaccaccatgcccggctaatgtttatttatttatttattttttgtaaagatgaggtcctcactatgttgccctggcttgtctcgaactcctgggctcaagcgatcctcccaccttggcctctcaaagtgttgagattataggtgtgagccaccacacctggccacagtttcatttcagaatgtccttgttgaagcagtaaaaatgatcaattttattaaatctcaaccgttgaatatatttcttcttaatattctgcgtgtcaaaatgagaagaatggataaagtgtttagattaatcataaatccaatggttacctctggaaaggctctcagagatggagttgtgggatgagccaaccaccacctgtcatggaacaccatttatacatggaagaaccaagaacaatttattattattttgagactgagtctcactccgtcgcccaggatagagtgcagtggcgcaatcttggctcactgcaacctctgcctcctggattcaaacaattttcatgcctcagcatcccaagtagctgggattacaggtgcacaccactacactgggctaatttttgtgcctttagcagagatggggtttcaccatgttgtgctgggattataggcgtgagccactacgcccagccaaattattattattcagacttgggtagctggcagacattgtttcaaaaatgaactgagtcggtcacatcaagaaaaacaactgacagtgctaccaatgatgaaattcttttttttttttttttttttttgagatacagtctcgctctgtcacccaggctggagtgcagtggcaccatctcggctcattgccaagatctcggctcattgcaacctccatctcctagaagggtcaggtgattctcctgcctcagcctcccaaatagctgagattacaggtgcgtgccaccacacttggctaatttctgtatttttagtagagacagggtttcaccattttggccaggctggtctccaactcctgacctcaagtaatcttcccaccttggcctcccaaagtgctgggattacaggcgtgagccactgcgcctggccaaaattctactttttaagtgaaaattagaatttaaaaaaatgaaaaaaaatatctgttttcattagcctggcggctgcctaccacttacagattttatcctctcctttattattattattattattattattattattattattattattattatagagatggagtctcgctctgccccccaggctggagtgcagtggcatgatctcggctcactgcaagctctacctcccaggttcacgccattctcctgcctcagtctcctgagtaccttggactacaggcacctgccaccatgcctggctaattttttgtatttttagtagggatggggtttcaccgtgttagccaggatggtctcgatctcctgaccttgtgatccacccacctcggcctcccaaagtcctgggattataggtgtgagccaccgcaccccgcctcctttttttttttttgagacagagtcttgctctgttgcccaggctggagtgcagtggctctatctcagctcacaacctccgcctcctgggttcaagtggttctcctgcttcagcctcccgagtagctgggattacaggtgcccaccatcacgcctggctaatttttgtatttttagtagagacagggtttcaccatgttggccaggctggtcttgaactcctggcctcaggtgatccactcacttcggcctcccaaagtgctgggattacaggagtgagccactgcgcccagccagtttaatgtgttttattttattttatttatttattttgttttttgagatggagtttcgctcttgttgcccaggctggagtgcaatggcgtgatcttggctcaccacaacctccgcctcccgggttcaagtgattctcctgcctcagcctcccgagcagctgggattacaacaagcatgtgtcacaacgcccggctaattttgtatttttagtagagacggggtttctccatgttaggctagtctcaaactcccgacctcaggtgattcacccgcctcggcctcccaaagtgctgggattacaggcgtgagctactgctcccagccagatggactatcaattattaatagacacttcctggccaggcaccgtggctcatgcctgtaatcccagcactctgggaggctgagacgggcagaccatgaggtcaagagatggagaccatcctggccaacatggtgaaaaccagtctctactaaaaattagctgggcgtggtggcacgcgcctgtagtcccagctacttggaaggctgaggcaggagaatcgcttgaacctgggaggtggaggttgcagtgagccgagatcgcgccactgcactccagcctggcgacaaagtgagactccatctcaaaaaaataaaaataaaaataaaataaaataaaataaaataaacacttccatctatttgtctgagaccttctatctcatatgcaggcaattctaggagaggttggggttacaaggaagttgagggcaatggtgagaataacctaaaagcttgggagtggttattcccaagaactctcatcttgtggaccaaggagggttggagaaatagagcctttgattctattttaaaaggctcagggaggccaagcaaagtagctcatgcctgtaatcccagcactttgggaggcagaggtgggagaatcacctgaggtcaggagttcgagaccagcctggccaatatggcaaaacatcatctctactaaaaatacaaaaattagagccaggagcggtggctcatgcttgtaatcccagcactttgggaggccaaggcgggcggatcacctgaggttgggagttagagaccagcctgaccaacatggagaaaccccatctctactaaaaatacaaaattagccgggcatggtggctcatgcctgtaatcccagctactcggggggctgaggcaggagaatcgcttgaacctgggaggcggaggttgtggtgagccgagattgcgccaatggggcaacaagagcaaaactccatctcaaagaaaaaaaaaattagctggttgtggtgatgcatgcctgtaatccaagctactagggaggctgaggcaggagaaccatttgaacctgggagaccgaggctgcagtgagccaagatcacgccactgcactccagcctgggtgacagagccagactcagtctcaaaaaaaaaaaaaaaaaaaaaaaaaaaatggcggcgggggagcttgggaaaagtgatgagagaaacctgaggtctgacaggtgcatgaggaaatctcacctgtgacccagaagagggtcgtactgtgctgctctgcgtttcgcagggcatgccacatttttttaaaaataatttcaacctttatcttattattttcttgagatggagtcttgctctgtcgctcaagctggagtgcagtggtgcagtcttggctcactgcaacctctgcctcccaggttcaagtgattttcctgcctcagcctcccaagtagctaagattacaggtgcctgctgccatgcctggctaatttttgtatttttagtagagacggggtttcaccgtgttggccaggctggtcttgaactcctgacctcaggtgattcgcctgcctcggcctcccaaagtgctgagattacaggcgtgaggcacccaccgtgcccggccatattattattattttttgagatggggtgttgctttgttgcccaggctggagtgcagtagctcgatcacaggtcactgcagtctcacccccgcaggctcaagcaatcctcccacctcagcctcctgagtagctggtgctatagcaagttccaccacaccctgctaattttttgtaaaggtggggtctctctatgttgccaaggctggtctcaaactccttggctcaagccatcctcccacctcggcctcccaaagtgctcggattacagacctgagccaccgagcctggtctcccagcttttattttaggttcagggaggcgtgtgtgtgttcgtcacctgggtatactgcatgatgctgaggcttgggctatgaatgatcctgtcatccaggaagtaagcataatacccaacagtttttcaactcttactctccactgtccctccccactctaggaggtcccggtatctattgttcccatctttacatccatgtgtgtactcaatgttttttttttgttttgttttgagatggagttgcgctctgtcgcgtaggctgaagtgcaatcatgcaatcttggctcactgcaacctccacctcccgggttcaaatgattctcctgcttcagcccctcgagtagctgggattaaaggcacctgccatcatgcctggctaatttttgtatttttgtagagacagggtttcgccatattggccaggctgatcttgaactcctgacctcagatgatccacctgcctcagcctcccaaagtgctgggattacaggtgtgagccaccgcacccaggcaatgtgtactcaatgtttagatctcatttataagtgagaacacgcagtccttggttttctgttcctgggttaatttgcttaggataatgaccgccagctacatccatgtcagagcgaagaacatgatttcattagtgtttatggctgggcgtgctgcattctttcactgcttgctgagcatcagcagggaagcattgccttgggaacggaacttgatgggaggcctccttgggacctctctccttctccgcctcctcctcactctcctccttcctcctcctccataaattggaccaaaacatatcctgctggggaccaaaacatatctgcactggctcacgcatgtaaccccagcactttgggaggctgaggcgggtggatcacttgaggtcaggagtttgacaccagcctgggcaacacggtgaaactccatctctactgaaaatacaaaattgcttgaatctgggaggtggaggttgcagtgagccaagattgcgccactgcactccagcctgggttaacaagtgagactctgtttcaaaaaaaaaaaaaaaaaatatatatatatatatatatatggccgggcacggtggctctcacctgtaatcccagcactttgggaggctgaggcgggcagatcacaaggtcaagagatcgagaccattctggccaacatggtgaaaccccatctctactaaaagtacaaaaattagctgggtgtggtggtgcgtgcctgtagtctcagctactcaggaggctgaggcaggagaatcgcctgaacccaaaaggtggaggttgcagtgagttgagattgtgccactgcacaccagcctgataacagagtgagacttcatctcaaaaaaaaaacaaacaaaaatatatatatatatataaaaaatagaggaccaatttcagcagcatattaaaaggattttatggggccgggcatggtggctcatgcctgtaatcccagcactttgggatgccaaggtgggcggatcatgaggtcaagagtttgagaccagcctggccaacatggtgaaaccccatctctattaagaatacaaaaagtagccgggcgtggtggcgcatgcctgtaaatcccagctactcaggagactgaggcaggagaactgcttgaacccagggggtgggggttgcaatgagccaaggttgcgccactgcactccagcctggacgacagagcaagactgtctcaggaaaaaaaaaaaaagtattttatccatgaacaagttggatttattcctggaatgcaaagatgttttaacatatgaaaattaatcaatgtcatataccacattaatagaataaagggaaaaatcttataattgtctcagttgatgcagaaaaagtattcggcaaaatccaatactctttcaagatttaaaaaaaaacactcagccaggcacggtggctcacgcctgtaaccctagtactttgggaggccgaggcaggtggatcgctggagctcaggagttcaagaccagccttggcaacatggcaaaaccatgtctctaccaaaaacaaaaattaagctgggtatggtggtgcatgcctgtagtcccagctacttgggaggctgaggtgggaggacggcttgaacccaggaggtggaggttgcagggagccattatcaggccactgcactccagcctgggtgagagaacaaggccctgtctggaaaaaataaaataaaactagaactagaagaattttcctcaacatggtaaaggccatacatgaaaaacagagttaacatcatattcaatgatgaaagactgaaaattttccccataagatcaggaacaaaacaagaaccaccactttggccacttctatttaacagagtattggaatttctagccagagaaattaagcaagaaaaataagtaaaagttacctgaattggaaaggaaaaagtaaaattatctgtacttgcagatgaaatgatttcatacgtggaaaaccctaaagcttacatacatacacaactattagagccaataaatgaattcaacaaagttgcagcatacaaagtcaacacacaaaaatcagttgcatttctttacactaacgatgaataaccccaaagagaaattaagaaaacaactctatttaaattaccatgcggccgggtgcaatggctcatacctgtaatcccagcactttgggaggctgaggtgggtggatcacctgaggtcaggagttcaagaccagcctggccaacatggtaaaatccagtctctactaaaaatacaaaaaactggccgggtgcggtggctcacgcctataatcccagcactttgggaggccaaggcgggcagatcacctgaggtcggatgttcgagaccagcctgaccaacacagagaaactctgtctctactaaaaatacaaataaaattagctggccgtggtggcacatgcctgtaatcccagctactcagaaagctgaggcaggagaattgcttgaacccgggaggcagaggttgcggtgagccgaggtcacaccattgcactccagcctgggcaataagagcaaaactacatctcaaaaaacaaaaacaaaaacaaaaaattagctgggcgtggaggcgggtgcctgtaatctcagctacttgggaggctgaggcaggagaatcacttgaacccagaaggcagaggttgcagtgagccaagatcacaccactgcaatccagcctgggcaaaaagagcgaaattctatctcaagaaaaaaaaaagccatgaaaaggaatcaaataggaagaaatgtaaccaatgaggcaaaatatttgtaactgaaaactacaaaaaattaaagagacataaataaaaagatatcctatgtttatagaatgtaaaatttattgtttgtttgttttttgagacagagtcttgctctgtcacccaggctggagtgctgtgatgcgatcttggctcactgcaacctctgcctcctgggttcaagtgattcttctgcctcagcctcctgagtggcgggaactacaggcacgtgccaccacgcccagctaattttttttttttgcatttttagtagagacaggattttaccatgttggcagggctggtctcgaactcctgacctcaagtgatctgcccgcctcagcctcccaaagtgctgagattacaggcatgagccactgcgcccggcctgaatgtaagatttaatattgttaagatgacggtactacccagagcaatctacagattcaatgcaatttgtatcaaaatccaaatggtatttttaatattttacagatatacaaaaactcatcctaaaatttatgtggaatcacaaggcatcctaaataacacaaaaaaagacggaaaaaaaggtctgcagaaaaagaagaaaccaggtctctcatttcctgatttcaaaacttaaatactaacctaccacaatgaaaagagtgtggtactggcataaagacaaacatataaggccgcctgtaatctcaacaatttgggagactgaggtgagtggattgcttgagcccaggagttcaaaatcaacctgggcaacatggcaaaacccagtctttacaaaaaatacaattagctaggcgtggtagcctgcgcctatagtcccagctactgaggaggaggctgaggtgggaggatcactcaagcctaggaggcagaggttgcagtgaactgagatcatgccagtgcactccagcctgggcaacagagtgagactccgtctcaaaaataaagaaagagagaaaaaaatagacacatatattagaccagtgtgagaggtgacagcgtgctggtagtcctcacagccctcgttcgctcttggcgcctcctctgcctgggctcccactttggcggcatttgaggagcccttcagcccaccactgctctgtgggagcccctttctgggctggccaaggccggagccagctgccttagcttgcggggaggtgtggatggagaggcacgagtgggaagcggggctgcgcgcggcgcttgcgggccagctggaggtccgagtgggcgtgggcttggcgggccctgcactaggagccaccagccggccctgccagccccgggcaatgagaggcttagtacccgggccagcagctgcggacggtgtactgggtcccccagcaatgccagcccacgggcgctgctctcgatttctcacggggtcttagctgccttcccgccgggcagggctccggacctgcagcccgccatgcctgagcctcccaccccctccatgggctcctgtgaggccggagtctccccaggagcactgtcccccgctcctcggcgcccagtcccatcgaccacccaagggctgaggagtgcaggtagacagcgcgggactggcaggtagctccacctgcagccccggtgcgggatccactgggtgaagccagctgggctcctgagtctggtggggacgtggagaacctttatgtctagctcagggattgtaaatacaccaatgggcactctgtatctagctcaaggtttgtaaacacaccaatcagcaccctgtgtctagctcagggtttgtgaatgcaccagtcgacactctgtatctagctatctggtggggccttggagaacctttgtgctgacactctgtgtctagctaatctggtggggaggtggagaacctttgtgtctagctcagggattgtaaacgcaccaatcagcaccctgtcaaaacagaccactcagccctaccaatcagcaggatgtgggtggggccagataagagaataaaagcaggctgcccgcgcccacagtggcaactggctcgggtcttgttacacgctgtggaagctttgttctttcgctctttgcgataaatgttgctactgctcactctttggctccacgctgcttttatgagctgtaacaccgcgaaggtatgcaacttcacttctgaagccagcgagaccatgagcccaccgggaggaatgaacaactccagacgcgccaccttaagagctgtaacactcaccgcgaaggtctgcagcttcactcctgaaccagggagaccacgaacccaccagaaagaagaaactccaaacacatccgaacgtcagaaggaacaaattccagacgcgccaccttaagagctgtaacactcaccgcgagggtacgcggcttcattcttgaagtcagtgagaccaagaacccaccaattccggacacaagtggaatagattagagagcccagaaataaaccttctacatggaagattaatttttgacaagggttccaagaccacttaatgggggaaagaacaaccttttcgataatagcagtgggacaactggatatccatacacaaaagaatagtccgggtgtggtggttcacacctgtaatcccagcacattgggaggccaaggcaggcagatcacctgaggtcaggagttcaagaccagcctggccaacatggtgaaaccccatctctactaaaatacaaaaaaatgagctgagcctggtggcatgcagctgtaatcccagctacttgggagactgaggcatgagaatcgcttgaacccgggagggggaggttgccatgagctgagattgcgccactgcactccagcctgggtgacacagcaagactccatctcaaaaaaaaaaaaaaaaaagtctttacaatagatcaatttaggttttatatttctttttttcttttcctttttgagttggaatttccctcttgttgcccaggctggagtgcaatggcgccatctcagctcactgcagcctcagcctcctgggttcaagtgactctcctgcctcagcctccagagtagctgggattataggcacatgccatcatacccggctaatttttgtatttatttatttatttatttttgagacagagtctcgccctgtcacccaggctagagtgcaatggcacaatctcagcttactgcaacctccacctccccggtttaagtgattctcctgcctcagctgggattacaggcgtgcgccacttgcctggctaattttttgtatctttagtagacatgaggtttcaccatgttggtcaggctggtctcaaactcctgatctcagatgatcttcttgactcagcccctcaaagtgctgggattacagacgtgagccaccatgcctggcctagattttatatttcttcttaagtttggtgtttaaattcccctaggaatttgttcctttcatctaatttgttggcatacaactgttcatagtattccctgataattcttttacttatctaatgttggtagtgatgtctcctcttttgctcctgttttgcagtttgagtctcctctgcttttttcttggtcagtccatctaaaggttaatcaattttatggatttttcaaagaaccaaattattttggttttacttacttcctctattttttattctctgctgcatttatttctgctcatctttattatctttttttttttttttttttgagacgaagtctcttgtcgcccaggctggagtgcagtggtgagatctcagctcactgaaaactacgcctcctgggttcgagcgattcttgtgcctcagcctcctgagtagctgggaccacaggcatgtgccaccatgcctggctaatttttttatttagcagagacaggctttcaccatgttggccaggatggtgtcaaactcctggcctcaagctgtctgcccgcttcagcctccctaaactgggattacaggtgtgagtaatcctctgcctctgggaggcagaagttgcagtgagccaagatcacaccactgtactacagcctgtgcaacagagcgagactccacctcaaaaaaaaaaaaaattagccggacatggtggcacatatctgtagttccagctgcttgggggactgaggcagggggcttgcttgagcctaggaggtcaaggctgctataacccatgtttatgccactgcactgcagcctgggcaacaaagtgagaacctgtctcaaaataaaaataaaaataagtaaataggccaggcatggtggcgcatgcctgtaatcccagcactttgagaggctgaggtgtgaggatcatgaggtcaggagtttgagaccagcctggccaacatagtgaaaccctgtctctaccaaaaatacaaaaattagccaggtgtggtggtgggcacctgtagtcccagctactcgggaggccaaagcaggagaatcgtttgaacccgggaggcagaggttgcagtgagccgagatcatgccattgcactccaggctgggtgacagagtgagactccgtctcaaaaaaaaaaaaaaaaaaaaaaggaaataaatatagcttcctaggggattctgtttgcagagtgtgtcgagaatatgaagcccagaattcaagactgcattatggactgtgaaggctgaggagggctgtgaggaaagagtgggtagattaaaggagcagaagcaactgtcatgccctttggctcttctataggaaaagaggaaagagtgagccttgggctgtgttttgtgagggaatagtgccctccctttgtgggtaagcaaagttggctcggaagatgaagacagatgagtcaagaacgtcagggtgtcagggggagcacaaaaagaaggcgaaatatgcccttctacactcaaacttgaaggtatttggggcctggtggctggatctgaggccatgctgagtcctgaagaggggaccaaagtcttgctttgtgaaaactgtctagactgtcctagcaattccatttgtttttgactgtcctagcaattccgttttttttttttttgacagcatctcactcttgtcacccaggctggagtgcagtggcacgatctcagctcattgcaacctccacctcctgggttcaaatgattctcctgcctcagcctcccaagtagctgggattacaggcacctgccactgcgcccagctaatttttgtatttttggtagagacaggatttcaccatcttggccaggctgctcttgaactactgaccttgtgatccacccaccttggccttccaaagtgctgggattacaggcgtgagccactgtgactggctttttttttttttttttttttttctgagacggagtctcgctctgtcacccaggctggagtgcagtggcgcagtctcagctcactacaagctctgcctcccgggttcgcgccattctcctgcctcagcctcctgagtagctgggactacaggcgcccgccactgcgcccagctaattttttgtgtttttagtagagatggggtttcactgtgttagccaggaggttctcgatctcctgacctcatgatctgcccgccttggcctcccaaagtgctgggattacaggcgtgagccactgcgcccggctgcctttttaaatttaaaaaacttttttttttttttgagacagtctctctctgtcccccaggctggagtgcagtggcgggaatctcagctcactgcaacctctacctcccaggttcaagcaattcttctgcctcagcctcccaagtagctgggattacaggcacacggcaccacacctggctaatttttgtatttttagtagagataggttttcaccatgttggccagactgctctcgaactcctaacctcaggtgatcctcctgcctcggcctcccaaagtgtgagtacaggcgttagtcaccactgcacctggcctccattctcatcttttctgattggagaactcggttctccagagcacagaagtagcacttctttcccctggtccctggagagtaaggtcttgttcacatctgtgcatggggctcagatcagggcctggtgcagagaaagtgcacaataaatgggtgtttaagtctgggcatggtgcctcatatctgtaatcctagcactttgggaggccaatgtgggaggatcacttgagcccaggaattcaagaccagcctgggcaacaaagcaagaccccgatctctaccaaaaaatagaaaaattaaccaggtgtggtggcacgttccagctacccgggaggctgaggtgagaggattgcttgagctgggaggcttcagtgagctgtgcttgtaccactgcacaccagcctgggagacacagtgagaccctgtctcaaaaaatataataaaagtctaaaaaataaatgggggctgggcgtgctggctcatgcctgtaatcccagcactctgggaggccaaggtgggcagatcacctgaagtcaggagttcaagaccagcctggccaacatagtgaaactctgtctctactaaaaatacaaaaattagctgggcatggtggcgggtgcctgtaatcccagctactcaggaggctgaggcaggagaattgcttgaacccaggagacggaggttgcagtgagccaagatcacgccactgcactccagcgtgggcaacagagcaatactctgtctcaaaaataaataaacataggccaggtgcagtggctcatgcctataatcccagtactttcagaggctgaggcagaaaaatcacttgaggtcagaagttcgagaccagcctggccaacatggtgaaccctcatctctactaaaaatacaaaaattagccaggcgtggtggtgcatgcctgtaatccagctacttgggaggctgaggcagaagaattgcttgaacccaggaggcagaggttgcagtgagccaagattgtgccactgcactccagcttgggtgacaaagtgagactttgtctcaattaaaaaaataataagatagccaggcgtggtggctcacgcctgtaatcccagcactttgggaggccaaggcgggcggatcaactgaggtcaggagttcaagaccagcctggccagcatggcgaaatcccatctctactaaaagtaccaaaattagccaggtgttggggtgggcgcctgtaatcccagctactcaggaggaggaggcggcagaatcacttgaacccaggagacggaggttgcagtgagctgagatcacgccactacactccagtctgggtgacaagagcaagactccgtctcaaaaaaataaaataaaataaaataaataaaataaaataacaaatgggtgtttaaatgaatgatgttcatggaatctctccccagtgctttgctttccacaaagttctgcatggaagtctcaataaattgtggttgaatgcttgacagtaactgtgatgaaagcagaattcacctttcatcacctggccagcaaatgttttgttgtcttattattattattattattatttgagatggagtcttgctctgtcgcccaggctggagtgcagtggcgtgatctcggctcactgcaagctccgcctcctgggttcacgccattctcctgcctcagcctcccaagtaactgggactacaggtgcccgctaccatgcccggctaatttttttttgtatttttagtagagatggggtttcaccatgttagccaggatggtctcgatctcctgaccttgtgatccgcccacctcggcctcccaaagtgctgggattacaggcttgagccaccgcgcccggcctgcttgtcttatatagtattgaccagtaaaatgtttttttttttttgagccagagtctcactctgtcaccaggctggagtgcagtggcgtgatcttggctcactgcaatctccacctcctgggttcaagcgattcttctgcctcagcctcctgagtaactgggaccacaggctcccaccaccatgcccaggtaatttttgtatttttagtagagacagggtttctttttctttctttctttctttctttttttttttttggagacggagtctcgctctttcacccaggctggagctcagtggcatgatctcggctcactgcaacctccacctcccaggttcatgccattctcctgcctcagcctcctgagtagctgggactacaggtgcccgccaccacacccggctaattttttgtatttttagtagagatggggtttcaccatgttagccaggatggtctcgatctcctgaccttgtgatccacccacctcggcctcccaaagtgctgggattacaggcttgagccaccgcacccggcccgtagagacagggtttcaccatgttgaccagtatggtctcgatctcctgacctcaggtgatccacctgcctcggcctcccaaagtgctgggattacaggagtgagccaccgggcctggccaagatgtctttcaaataattaaagccacatctttttgtagttcataaacgtgatgactgtgttttcatgctcatgcgtgagttgcacctccctcaaaccttgttttgacattgacacattatctgcctgatgtaaaaataatgaaatccaatatactaagatcaggagatttcacaataaaatcccaatttctgtttcttttaaaaaatcaggccagccatgatggcttatgcctggaattccagcactttgggaggcccaggcagaaggatcacttgatcctggaagttcaagatcagcatggttaacacagggagacctggtctcaatttaaaaattagctgggcatggcactttgggagactgaggcaggtggatcacccgagatcagaagtttgagaccagcttggccaatatggtgaaacctcatctctgtattaaaaaaaaaaaaaaattagccagttgtggtaatgagcgcctgtaatcccagctactcgagaggctgaggcaggggaatcactggaacctgggaagtggaggttgcagtgagccaagatctcaccattgcatttgagcctgggtaacagagtgagactctgtctcaaaacaaacaaacaaacaaacaaaaacattagccatagccccagttatctggaggctgagatggaggctgagaacccacgagttcgttcaaggctgcagtgagctatcattgcactccagccaggatgacagagcaagaccctgtctcaaaataaaataaatactttgggaggccaaagtgggcagatcacctgaggtcaggagttcgagaccagccaggtcaacatggcgaaacccatctctactaataaaatacaaaaattagccaggcatggtggtgtgtgcctataatcccagctacccaggaggctgaggcaggagaatcacttgatcccaggaggcagaggttgcagtaagccgagattgtgccactgcactccagcctgggcaacaagagcaaaaccccatctcaaataaataaataaatagaaataaataaataaaatggttactttatgttatttcacctcaataattttaagtaaaataaaattagataactgatagccaggcatggtggtggatgcctgtaatcccagctactcaggaggctgaggcaggagaatcacttgaatccgaggcagaggctgcagtgagccaagatcacgccactgcactccagcctgggtgacagagcaagactccgtctcaaaaaaaaaaatttagataactgattagaaggtactgaagtttgccatcctttggaaacgatcctcttcattagaaagatgaggatcctgaggccctacaagggaagtgtcaggtcagtggaagagactgaaagggaagtttggttcccaccccggcagcacagtcgctgcctcctctcccctttacttaggctatgaactctggtgtgatacagaccacaacccgttcaccataggttacaccccacatcttctggctcggaccctggcacttgaactgtcagcctccaagtagctgggacaataggccagctcaacaaatgccccctgctcattaaaattttttttttgtagagttggggtcttgttatgttgcccagggtggtctcaaattcctgatctcaagcaattctcgccttggcctcccaaagtgctgagattacaggcatgagccactgtacacagtcttgatgtattaccttttattttttaaaaaatttttataaagacgggtgtcaccatgttgtccatgctggtctcaaactcctgggctcaggcaatcctcccgacttggcctcccaaagtgctgggattactggtgtgagccgtgcctggcttgctttttttgtttttgtttttgagatggagtctcactgttgctcaggctggagtgcagtggcgcaatctcggctcactacaacctccgcctcctgagttcaaaggattctcccgtctcagcctcccgagtagctgggattacaggtgtgtgccaccacacctggcttatttttgtatttttagtagagatggggtttcaccatgttggccaggatggtcttgatctcctgacctcatgatccacctgcctacgtctggcttttttaattaaaaaaaaatttttttaagtactttttttcttttgagatggagtctcactctgtcacccaggctggagtgcaatggcacaatcgtggctcactgcaacctccacctcttgggttcaagcaattctcctgtcttagcctcccaagtagcttggactacagtcatgcaccactatgcctggctaattcttgtatttttagtagagatggggttccaccatgttggtcaggctggtctcgaactcctgattttgtgatccacctgcctcagcctcccaaagtgctgggattacaggcatgagccaccatgcccagcctaaagtacttttcattagagacagtactttattcaaactgcttctcttctcgtgcttttgtgtcttgagacagtctgtctgtcacccaggttggaatgcagtggtgtgatgacagctcactgaagcctcgaccttccaggctcaggtgatcctcccacctcagtcttctgagttgctgggactataggtgtgtgccaccatgcctggtggatgtatgactgtttatgtaggaacgtctgttaattgtaaatttcctccaaaaccaccctgttgcagaaatgacaggctgtgagcactgtagccacctatacattccttccagagcactatgcttttgctccaagacataagcggtaggtcttggggctgtggtgtggagatctgtcatggcgcagcccaagaccatgcttttgtgtgtaagttccttaataaatcacccaaaactgacaaactggatttgtctgcttcctttttttttttggctcctttggcatgagggtcacttggcatatacggccctttcacggaatgcacagcaactccaacaaagagagatgatctttcacagatgaagccgctgaggcttagagaagcgagattgtcccaagggtggcagcttctaagggaagggctggaatgtgaacccaggcatcttgacttgagccttgtccttttggcccctatgccctcccaccttccaacccaggggattagctaaaatttaggaaagcagttcatgttatttaaagggaggggaggccgggcatggtggctcatgcctgtaatcccagcactttgggacgctgaggcgggcagatcacttgaggccaggagttcaagaccagtctggccaacatggtgaaaacccatgtgtactaaaaatatgaaaattagccgggtgtggtggcgagtgtctgtagtcccagctactcgggaggctgagattgcagtgagctgagattgcaccactgaactccaacctgggtgacagggcaagactctgtctataaaataaataaattataaaataaataaaatttcagaaagcagctcactttatgtaaagggacaggaaacagcaacagatgacatagatataggatgattccagtctagtaataaatatacacacaccagaaagagaggcattaaaatgttaacggtagttaacagcctgggcgacagagcggagaccctgtctcaaaaaaaaaaaaaaaagttaagaaaaggagtgacaatccacgtgtggcccacaaagcttaaaatatatactatctagccctgggcagaaaagggtttgacaatgctgttcaaaggtcaccattggtagattggaaactgaaaaaggtatataccctggcattggacaacacaatggctgtgcctcctgcctaagaatgctgaactggccaagtgaggtacttggcagcccagccctgaaatgcataagctctccagccttttcatcactgctcctccctggttcttaacctctggccactcgatcctctggcttcccttccaccaagcactcgcacgttgagtccagtccctaggcctctcctctaggctgccccctctggaaatgtaagcagcaccaggtataagagccaggcacaggctgccttgacgtgcacctagcccccttacttccccattgtgtggaaggtaaatcacttctctttgggtctgttttcccatctacaagttgggaatgacaatagggttattctgagattaagtgagataaggcagctaaagcacgcagtatggaagtggtcaacatgctggctctgatgtcagccacgaccagacttcgggtaactatttataagtcattcccttcaaaacctttctctctgttctttctcttctgtgacagactaatacttgtgccccttcccttcatttagaaacaaaatgacccaagtttaaatgaacatgtaactatccagctagaggcattttagtctcacatatagggtggtaagaaggtgagactaagttctggccaatgggatcagtgtaatttccaggccctgtatttccgcttccttttacatgggcttgaacgaggacttggggctggtgagccgctttaaccacacagatgacaaccttggggatgcaagagcaacatgacagcgcagccctgggtccctagatgattttgcataacggttgttgtctaaccctaaccctggaccaatcacctctgaactgtcacatgagaaataagctattttgctgagtcactgtttggggctccttgtgacagaagctgagtctagaatctagttagtgcacgtcagaaggcttctcttcaacttcagtatcagtccgccctccatatgtgctgttcttgtacttctgaacacaaagaatattccagctatttcttgaaaacagtcatatttgtttatcctccagtcaggagaatgtgtcattcttgactccttcaactcccgaatccactggtcacagtagcttcagttttttacatctgcacctcttcaatcctccccccacctctgaccccaggcaccctgacttcagatggttttttttttttttttggcttcatgctctttgcttccaatttcatagtcttacacaatgatgcttcattctcttaaaatggaatccattcatgttattttgttacctttttttagagacagggtcttgctctattccccaggctggagtgcagtggtataatcacagctcactgtaccctttacttaaatagaccttaagttcctgggctcaagtgatcctcctgcctcagtctccccagcagcttggactactggcacacacaaccatgtccggctaaattttaattttttgtcctctccctccccctcccccttcctctcccactttccacagtctccctctgatgccgagccgaggctggactgtactgccaccatctcggctcactgcaacctccctgcctcattctcctgcctcagcctgccaagtgcctgggattgcaggcacgcgccgtctgtgttttttggtggagacggggtttcgccgtgttggccgggctggtctccagctcctgaccgctagtgatccgccagcctcggcctcccgaggtgctgggattgcagacggagtctcgttcactcagtgctcaatggtgcccaggctggagtgcagtggcatgatctcggctcgctacaacctccacctctcaaccgcctgccttggcctcccaaagtgccgagattttgcagcctctgcccggccgccaccccgtctgggaagtgaggagcgtctctgcctggccgcccatcatctgggatgtgaggagcccctctgcctggctgcccagtctggaaagtgaggagcctctctgcccggccgccatcccatctaggaagtgaggagcgcctcttcccggccgccatcccatctgggaggtgaggagcgtctctgccaggctgcccatcgtctgagatgtggggagtgcctctgcccggccgcgaccccgtctgggaggtgaggagcgtctgagaagtgaggagaccctctgcctggcgaccgccccgtctgagaagtgaggagcccctccgcccggcagccgcctcgtctgagaagtgaggagcccctccgcctggcagccaccccgtctgggaagtgaagagcgtctccgcccggcagccaccccgtccgggagggaggtgggggtcagcccccacgcccggccagccgccccgtctgggagggaggtgggggagtcagcccccccgcccggccagccgccccacccgggagggaggtggggggatcagtcccccgcccaaccagccgccccacccgggagggaggtgggggggtcagccccccacccggccagccgccctgtccgggaggtgaggggcgactctgcccggccgccaccccggctgggaggtgtgcccaacagctcattgagaacgggccatgatgacagtggcggttttgtggaatagaaaggggggaaaggtggggaaaagattgagaaatcggatggttgccgtgtctgtgtagaaggaagtagacatgggagacttttcattttgttctgtagtaagaaaaattcttctgccttgggatcctgttgatctgtgaccttaccccaaccctgtgctctctgaaacatgtgctgtgtccactcagggttaaatggattaagggtggtgcaagatgtgctttgttaaacagatgcttgaaggcagcatgctcgttaagagtcatcaccactccctaatctcaagtacccagggacacaaacactgcggaaggccgcagggtcctctgcctaggaaaaccagagacctttgttcacttgtttatctgctgaccttccctccgctattgtcctatgaccctgccaaatccacctctgcgagaaacacccaagaatgatcaataaaaaaaaaaaaaaaaaaaaaaaaaaaaaaaaaaaacatggtttctccatgttggtcaggctggtctggaactcctgacttcaggtgatctgcccaccttggcctcccaaagtgctgggattacaggcatgagccactgtgcctggccccaaatgtgttttacattttcttcctatttgattcatctttgtcctgcaacataaatatgctacttttccaccgataaaaagacaaaatggaatttaaatctggcctggacttctcaaaaaagtcagtgtgatgaaaacatgttctagataaaacagaaatgagactgggcatggtggctcatgcctggaatcccagcgccttcggaggccaaggcaggagaatcacttgaggccaggagtttgttaacagcctgggcaacatagtgagaccccagatctactaaaaatttaaaaattagctgggcatggtggtgcatgcccatatgtctggaggctgaggcaggaggatcgcttgagcccaggatttggaggctgcagtgagctatgattgtgccactgcactccagtgtgggtgacagagtgagaccctgtctctaaaaaaaaaaagagagatgagatgatcaggatgagcgcagtggctcacgcctataatcccagcactttgggaggccaaaccaggtggatcatatgaggtcaggagttcaagaccagcctggcctagatggtgaaaccccgtttctactaaaaatacaaaaatcagctgggtgtggtggcgcacacctgtgatcccagctactcgggaggctgaggcgggacaattgcttgaacctgggaggcagaagttgctgtgagcaagattacaccactgtgctccagcctgggcaacaggaatgagactctgtctcaaaaaaaaaaaaagggggggatgatcaaacacaatgcatcaacctcccggagccatataaaccctaaccctaacccaggaagcaggcaagcctgtgtgtgagtttccactctattgctggtaccactcggctctggcaacccagaaggccaccttcccctgttgttactgtgtaaggaggaaggagcactggtttgcaagtcagaagcctgggttgaagcctctgcttgggttcctgctggctgtgggaatgtggggttacctttcccagctggcctcgtttccttcatgtccaatgcaggggttccagtcacatgcgttgggcaccattacatgtccaagctgtgccaggatctagaaaaatggctggactcaggccaaggggccttcctgtctggcagtgaaaataagaggagataccaagggccctgagtctggaggggaagtcatgagcacagggcagtgccagggcccgggagctgccacagaggagcccaccttggtgacagacacctgtaggcacatccgtgatgcccagtgcccaacacagggaactggacaaacgtttcatgcacgactcttttttcccttcttggctaccttgaggaccttgattataatagttatcctttttttctttttctttttttgagactcttgctctgtcgtccaggttggaatgcagtggcaaaatcttggctcactgcaatcttcacctctcaggttcaagtgactctccttcctcagcctccctagtagctgggattaccggtgtgcaccactaggctcagctaatttttgtatttttactacagatggggtttcaccatgttggccaggctgatcttgaactgctgacctcaggtgatctgcccacctgggcctcccaaagtcttgggattacaggtgtgagccactgagcccagctggattataatagccttttcatgcaccaggggctttatactcattatctcatttcattcatatgagttgaaatcagcttatcccccatttcacagatgaggaaaccaaggcccagagaggttaggaattcatccaaggtcacacagctaggaagtaggattcaaacccagacagccaggctgtaacacctaggctcttctcaggctcatgcccttcccaggggtctgggaagccctgacctgcagcctgtcacctttgtttaccccccagcctccaggatattatgtgtgcaccggcgtgggatcctggaactggcaggaattgtgggttgtgttggtccctagactcccatcgcctatacgaaatatggttccttttgtggcttgggaggccatggccagccctgcgatgccattgactggtgagtgcatgcctgggaccaggctacaaaatccctcacactctggggtagtcaaggcttatgaggaagtacccaaaactgaagctgggatttggtccagggagatcccagtgtgcagtactactttgcaggcaggcagaggcctcttggataacatggccagtgaagccagatcttggtaccagctgccccttaccctggccatgggctgaaaacgttgccttaaaaaattggccaggagcggtggctaactcctgtaatcccagcactttgggaggccgaggcgggcagatcacttgaggtcaggagttcaagaccagcctggccaatatggtgaaaccccatctctactaaaaatgcaaaaattagctgtgtgtggtggcaggcgtctgtaatctcagctactcgggagactgaggcaggagaattgcttgaacccgggaggtggagtttgcagtgagttgagattgcaccgctgtattccaacctggacaacagtgccaaaccctgtctcaaaagaaaaaaataataataatataaagtggccaggtgtgttgactcatgcctgtaatcccaccactttgggtcgaggcaggaggatcactggagcccaggagtttgaaacgagcctaggcaacagagtgagaccctgtctctatattaaacacacacacacacacacacacacacacacacacacacacacacacacacacacacacacacacacacaaaggcagccagactatgcactaggaactgccctgggaatccctttgtgttctcacaacaatcccatttcacagatgaagaaacctaggcacagaaatattcagtaacgtgtccaggtgcggtggctcacgcctgtaatcccagtactttgggaggctgaggcaggcagatcatgaggtcaggagttcgagaccatcctggccaacatggtgaaaccccgtctctactaaaaatacaaaaattagctgtgtgtggtggcaggtgcctgtaattccagctactcaggaagctgaggcaggagaattgcttgaacccgggaggcagaggttgcaatgaaccgagatcacaccactgcactccaacctgggtgacagagcaaaactccttctgaaaaaaaaaaaaaaaagaaatattaagtaacttgtctgaggccacttagttaccaagacgtgggagctgggacttgaacccaggcagtctggctggattcatgcctgcagcctctgcactcctgctacttactgtgtgagaagcgcctgttctgtggaaggttgtgggctgagatctttccatgagttccactcatttacccccaaggctgttcttaaagaccggcatgacagttatgcccattttacagatggggccctgaggctcacaggggcatgccactcgcccatttccacaaagctatagttagttagcagagggcagaattcggccgcctctcccctagcttgaaggctgtgattgacacggaggtttttttgttgttgctgttgtttgttcctttttcttttttttgagacagggtcttgctctgtcatcccggctggagtgcagtggtgcgatctcagctcactgcaaactctgcctccaagatgcaaatgattctcgtgcctcagcctcccaagtagctggaattacaggtgtgcactaccacgcccagctgttttttgtagagatggggttaatagagatttgttttatagagacggggtttcaccatggtctctactaaaccctgtctctactaaaaatacaaaaattacccaggcgtggtggcacatgcctgtagtcccagctactcaagaggctgaggcaggagaaccacttgaacctgggaggtggaggttgcagtgacccaaaatcatgcactctagcctggggtctcgcttttgcccaggttagagtgcagtggcacaatcatagtggctcactgcagcctcaaactcctgggctgaagggaatcctcccacgtcagcctcccaagtagctaggactataggcatgtgccatcatggcgagttaattttttgtgtgtttttattgtcttgagacagagtcttgctctgttgctcaggctggactgcagtggcatgatcttggctcaccgcaacctccacctcctgggttcaagcaattctcctacctcagcctcccgagtaactgggattacaggtgcgtgccaccatgcctggctaattttgtatttttagtagagacagggtttcgccatgttggtcaggctgctctcgaactcctgacctcgtgatccacctgcctcggcctctcaaagtgttgggattacaggcatgagccactgagcctggcctggtgagctaatttttaaatttgttatagagacaagagtctctcttatgttgcccaggctggtctcgaccccctggcctcaagtgatcctcccacctcagcctcccaaagtgctgggattacagatgcgtgtcaccgcacctggcctctgaggaggatttcattataaacctgccctgaagggagggaatccaattttacgagagggtgtagcctggtgaggcctggatgacctccggaggcaggggcttgtgcctgggctgaggcctaagggacaatgggcagacatgaagttgccccaggcagagggtacagtgtgggcaaggtcaggaagtggcagggcttggatcactccaggaagagagaggagtcatgtgtcacaggagctcgagacccagagagtgaggcaggcaggcaggcagggaccaagcttgggcacagccaggaaggcaggacagggcatggtggggccaatggaatcattatcgaagtcggggattttcagggaaacagcttagataaggccaggcgtacagtagctcccacctgtaatcccagcatttggggaggctgaggtaggaggactgcttgagcctgggagttcgagaccagcctaggcaacatagtgagaccccatatccacaaaaaatttaaaaaaggagtttgtgttcctgtagtagcatacttgggaggttgaggtggcagtatcacttgagcccgggagttcaaggctaaagtgagctgatggagccattgcaccccagcctgagcaacagagagatatgctgtctcaaaggaaatacaaattaaaaaaccagccgggcatgctggcgtgtgcctgtagtctcagctacttgggacactgaagtaggaggatcgcttgagcccaggagttcaaggctgccgtgagctatgattgtgcctctgcagtccagcctgggcgacagagaaagaccctgtctcttaaaaaaaaaaaaaaaaaaaaaaaaaaaaaaaaaaaacttagataagaggatgctgtgcctccctgggggtcttcagtcacccatggtcctggcaagagaggagggccaggagagagcttcacccacctgctgtcctgcccatgtgacatccgcaggtgctgccatggccacgactgttgttacactcgagctgaggaggccggctgcagccccaagacagagcgctactcctggcagtgcgtcaatcagagcgtcctgtgcgatgagtccccagcagcaccatgccacccaccccgagtatcccctgggcatcctggcatagccagatgacttccgtgcccctgttgcaataaccactgcttccaactctctatagaacgccccttgggtatatctaatgtaagtgatatttattttatttattttttgagtcagagtctcgctctgtcacccaggctagagtgtgctgacgtgatcttggctcactacaacctctgcctcctgggttcaagcgattctcatgcctcagcctcccaagtggctgggactacaggcatgcaccatcacgcccagctaatttttgtatgtttttcagtagaggtggggtttcaccaagttggccgggctggtctcaaactccccacctcaagtgctctgcccgcctcggcctcccaaagtgctgggattacaggcatgagtcgtggtgtctggccctaatgtgagtgatctttaacaatgaggacttgaaaaagaaaaccctgaagaaacctaattctttgatgtctggacgacaaggaagaagatagaaatggcatcagataataaagtgtaaatgtttatcagaaagaggctggtggtcgggaccagtaggaggatcgcttgagtccaggagtgcatctctacaaaaaagttaaaggattttttaacattggccaggcgtggtggcacacatacatctgtgatcccagctacttgggaggctgaggcaggaggattgcttgaagcccaggaggttgaggctgcagtgagctgtgatcgagccactgcactccagcctgggtgacagagcaaaacccagtctcaaaaaataataataataataataatattttacataaccaaccacttctaaagattaaaaaaaaaaccctacaattaattaaaaacctcaggtccctcaggcaatcataccagatattgaaacaaagcaataacataaggactgcagtatttattttatttttatattatttatttattcttcgttagtttgtttttggagcgtgggttttgttttgttttttgatttttttctttttttcgacctacggatttattcttattgcccaggcttgagtgcaatggcgtgttctcagcttactcaacctccgcctcttgggtttgggtaattgttgtgcctcggcctccctctgcctcttgggcttgggcgattgttccacctcatccaccctccgcctcttgggtttcggtgattgttccacctcatccaccctccacctcttgggtttgggtggtttttccacctcggcctcctgagtagctaagggaggagtcttgagattatcatccactgagggtggaagaggagagggtggaagcgggacaaagagacattccttcagattatcatccactgagggtggaagaggagagggtggaagcgggacaaagagacattccttcagattatcatccactgagggtggaagaggagagggtggaagaggagcaagaggacactccttgatattatcatccactgagggtggaaggggagtgagcagacactcaggaggtgtcttgaggctcagggagttatcagttatagaatgttgttgagttggaggaggtggctggcggcccatcctgttttttaaagtttcagctgtgaggtagagccagtagggcaatcctgaagaatgacgatgctccgctgccgccattctgacctgtagggccaaaggagggaatgttttcacacatattcatttgatggacaaaattaccaccaccaacacagtctgcaccttctgttgctggtgatagatttttgcacctttccatcctccaggtttcaaaatagcagtatcagtgtcataatatcacccttccactgagtactgccgacagctggggggtaaagaaaagtcattgggacacactgttgtctccacatgccactgtgtctgtctgcaaatgtaggcaggctggggtcctgccccagggaagacagagtcataacagagtaataaagaagcatgtttgagacacaggagtgtctatgtctatcctcattcctccctcacagccatcaccagagcatgtttcttgcaccaggtcaacagacagtaagagacagtaagagaggcatgaaaagcccattgtccacacatgttgcagcttctttttggagaatgttttccaggcctttcatgttctgtctctgactctcagaactctgcaaggtcagtgtgaccaccctgctccaaatctaagaaaacagaggtttccagaggaaggagaaattgtgcccagggtcacacagcttgcaagaggcagagtggaagttgattccagctctgcctgcaggaccctctcatttcccctctgtttcccttcttgacaaaggatcttcttcactctggaggtgccacccatgagaacaaagagctctggagagatgtggattcctgaagagctgcaggggaactgggagagggttttctgacagaacaatctcacctcaagaagtcacttaggcatggctgtaatatttcttttcactcccaggtaataccaaattgtaagtgcactaggacataaagaatacttttgtccatggaaaaatgaggtgggaattctaaacaaagcaagttttaaaactgtgtttcacttcaagtgtacaagtcccatcacgtgtaatcataggactcggcagcttttgaaggtacagaggccacacaagaaccagcttagctgagcatcatttaaggccttcatttggaattgtccctgtgggtaataagttacattcactcttcactaatttacagtcagggcccatttgctattacaaatatggaacctctgacactttgaatttagatcaggggccccactgggtggggatgaaggtgtttttgcacaacacggttaccaacagggatgggactgtgatgcctgtaggcagccttcctctctgccatctccctctgcagggcttgagcacagagctgtagggagaaaaatgtatccatgtcctgacctggcagactatgttcaaaagcaaggaaaacaaacaaacttacccagttgcaaagaggctttcttgcagaaggggggatctgaaaaagccaacacatgagaaattgaatgttgagagagtctaagagccgtggcatcatctgcatcagcactgaactatcctgcaactgcggggaggaagctccttactttgcatttgtggtagtcctctgcccgccgccgcaactcttgcgcacgttgaaacattttcctatggattacaatcactttcatcagataaagcaccacgttcaggatgattttaaataatctgccatgtttctgttatcctcacaactgtacccttacacaatctatctctacctagaaaacgtatttcagatggctataagagtacagtctgagccggtcacggtggctgatgcctgtagtcccagcactctgggagggcgaggcggatggatcacgaggtcaggagattgagaccatcctggctaatacggtgaaaccccgtctctactaaaaatacaaaagattagccgggcgtggtggcaggcacctgtaatcccagctactcgggaggctgaggcaggggaatcacttgaacctgggaggcggaggttgcagtgagccaagatcacgtcattgcactccagcctgggtgacacagcgagactccatctcagaaaaacaaaaacaaaaacaaaaacaaaaaaactgtacggtctgatccaaactgttgctgtattgattcctcctcttgcttactgcctgttgacttctgagatgatagtttccttccccattctcagtatatccctaattcatccttcattgagcatcttttatcataaagctgtattctctttgtattaatatccttaccgtgtttcacagggcagaaacagctgggcttataaacaggcatagtccttttgaaggatgtggttgatcctacaacaacacactttcctaaggatgacaacaactcaccccacccctagaatggctggtatgaaccgagtttccacacagtctagctggtaatggggtcaggagccgttttgttacttcacatcttttggtcactggtaaatattaaggtactttgttttctgttttgtgaactctctctctctctctcacgatatgtcttctgaccgtttgtttctatttctgcatttactgggtctaaacattgtacagaggttaaaaacaacactccaatgggcgtttcccaggagggtggggttcagtttctgaactcacttgtaggtgtgtatttctttcatatccaatttcccattttcctctgcctctgatacctgcctctccttttctgcgtgctcacattctttcatgcttagtttcctcaggttagaagggagagaaatgcacacacatgatccaccagtccatgtgggattccctctgcccttctggcatctgaaggctgtgattcaaagatcccccctgcaaccttcccacaaatgaaccaactgattctcacaaccgaagggagaatggacacctcccattgagggaccaaaaaaaatcacactctggcctgctggcaagtcacctgtcatttccagctcatcttcatagttccatagttagtcctattctttagtaaatataaagactattaaaagcttctatgaggtgcactatgtgtgtctctggggtcagtcttgtgcttgacacagcgaaagatcattttagttcagtgtgaaaaaccagacctcaccaactcatcacaactaactccatcggaagcagaggattgctcctcatctgactcttcctgtgtgagacctgcttctcagtcagaggctgatgccggaactgagaccatcagccatagagagatccttccagaatatggtgtcattaacccctcagttcactactgcactttgccatgattcaggactggaactcttgtcatcgactttaaagatcctggttgagagaaaaggcaatctgaatgctgggcgcatctattgaattagaaatgatcggaatggctcctaagtcagggtgttatgtcctgaaaataggtgacaacggcaaaccatccaccctggtgttgactgactttaacaaggttcacttcacagacattgagggcagaaaaaggaaatggcctaaaaagggtaagtttgctgtgttgccctcacaccacttgattcatggtcctgatcctaaggatctcacctgatacttggttttataggaaggatgtgtaaaattcccagaacgctaggaaacaggggcgaaaacacttcaaagagaaagttaatgaacttgtttctgaccacagggcatccttcagcacatgctgtctggagtggcctccaacaaggagtgtgtggtgtggtgctgagaatgcaatgggagcagggtcctgtccccacggtaaagaagctcacagcttaatgcaaatgagaagccagtgaggacatcactactcctgctgtccacttgggaactagaaacacaaaacctgactctggagggaagctaaggaagcattctactcttgagttgacataagtgcatctgaagcttctgatctctgatgagaacaatgggggacaccaaacagaatataaaacccatgattgaatacatcaaattgctaacatggcagtaaacagacatgaggtgaagatggagaagaaggaaacccaggacgaaagtcagcctcgcatttggaacccatttccctgagtttcattgctgaatttcagaaggaactactgagatgcaaagaagcacagcagcttttgcacacatgcgtgggattagatggaaaacaagtggattgagggtctgccaatgaaagcgacccgtactgaaatccactggctctggttgagacccagaagagtcatgcatcagaatagaggtggacaggaaataccctggcctttgtagggactgagcctgcaccgacgacctcaattgcagcctgtatggaggacccgtgaccatcccccagaagtagactcccatctcttctgcagcaagataacatgccactaggcctcaattcattgctaaatattttttaacaagtatctcacatttaacaaaaagagatcagtcatatggcagcaaaatacaatgtaatatgaccaaaacatgaaagactgtgaaaatgaatctggaggtgacccaagcattgaattcaacaatccaggctgggtgcggtggctcacactgggaggctgaggtaggcagatcacctgaggtcaggagttcaagactagcctggccaacatggtgaacccctgtctctactaaaaatacaaaaattgggccaggcacggtggctcacgcctgtaatcccagcacattgggaggccgaggtgtgtggatcatgatgtccagagttctagaccagcttggccaatatggtgaaaccccgcctctactaagaatacaaaaattatccgggcatggtggcatatgcctgtagtcccagctactcaagaggctgagggataagaatcgcttgaacctgggaggcggaggttgcagtgagccaagatcatgccactgcactctagcctgggtgacagagtgagactctgtctcaaaaaaaaaaaaaaaaaaaaaattggccgaatgtggtggcacacacctgtaatccaagctactcaggaagctgaggcagaattgcttcaaactgggaggcagaggttgcagtgagccaagattgcaccatagcactccagcctgggcgacagagcgagattctatctcaaaatttaaaaaaaaaaaaaggctggatgtggtggctcacgcctctaatcccagcactttgggaggctgaggcaggtggattacctgaggtcagaagttcgagaccagcctggacaacatggtgaaaccccatctctagtaaaaatacaaaaattagctgggcgtggtggtgggcacctgtaatcccagctacttgggaggctgaggcaggagaattgcttgaagccaaaaggcagtgagctgagattgtgccattgcactacagcctgggcaacaacagcaaagctccatctcaggaaaaaaaaaaaaaaagagagaaaggaaaaccaatgccagtactagcaactcctcttcccccgaaaaaattacaaacaagaatgtaggaagggaaaggaattatacagcttaaactaatgaagcagaaaggacaaactcaattttgagcccactgaatttgccacaaatattgtagaaaatattctcaaggactttacagttgtctactttgattggcacatggttcatacaacagtatttgtgtcaaggcacatcttactgttttctggcggtcttcctctttccattgattttgtcatgacggttgattttcgttgtcaccttcctcttacggattttagytctaacttttgtttccacatgcctccgtagagtaatgacgtctttcaggccaattttatttcctcgaaaggaagaaactcttttctttgtgtgcatacaaatggacctcagcccttggtgagagtgaggagaggagaaggtgagaaacctgaggtcaagaagctgttctttccctttccagggcaaactcatttccacactatggggactccaacagagccatacctttctgtctactgyggttggacctccaggctctctgctgtacatccatggatccatcatgtccatttcgagaccagaagatagtcttcaggaaagacacctaggaaataataatataagaatgacggctgggcacggtggctcatgcatataaataatcccagtactttgggaggcggaggcaggtggatcacggggtcaggagttcaagaccagcctggccaagatggtgaaaccctgtctctactaaaaatacaaaaattagccaggcatggcagcgggcgcctgtaatccaagctactcgggaggctgaggcagagaaccgtttgaagctgggaggcggaggttgcagtgagccgagatcacaccactgtactccagcctgagcgacagaatgagactctgtcacacacacacacacacacacacacacacacacacacacacacacacacacaagaatgacatgaggctggcacggtggctcactcctgtaatcccagcactttgggaggccgaggcaggcggatcacctgaggtcgggagtttgagaccagcctcaccaacatggagaaacgctgtctctgctaaaaatacaaaattagccaggcatggtggtgcatgcctgtagtcccagctagtcgggaggctgaggcaggagaatcacttgaacccagcaggaaaaggttgtggtgagctgagattgtgccattgcactccaaacctgggcaacaaaattgaaactctgtctcaaaaaaaaaaaaaaaaaaaaaaaatagcccaggtgcggtagctcacgcctataatcccagcactttgggaggctgaggcgggtgaatcacaaggtcaagagatggagaccatcctgggcaacatggtgaaaccccgtctctactaaaaatacaaaaattagctgagcatggtgatgcacgcctgtagtcccagctactcgggaggctgaggcaggagaactgcttgaacccaggaggcagaggttgcagtgagccaagatcccaccactgcactccagcctggtgacagagtgagactccgtctcaaaaaaaaaaaaaaaaatgacatgaatatacttcacataactgaactgtacacttcaacacggttagatggtaattatcatcttataagtattttaccacaggttaacatgtttcacaagttgaaaaggaagtaattaccttcagytctctgagttctagaatttgtaacatttcaccccctgctccttcctgatctgcactggagcatcttccttttgtccctgctctactcagagttcactttcccttccctcacatcagcttcattgaggctggtttgaacttaacgcaaaacattctcactaatgactgaattccctccaagatttccatattatcacagtatgcttttaatcttctaagatattaaatatttgttctcatcatagcgaaaatgcaatgcaaatcccatctcagatgtgggtcagatacctatgaatgtcctgaggtagtcattgaaatgacttttttcttgagatggagtgtcactctcaaccatgctgaagtgcagtggcactaccttggctcacggcaacctccacctcccagattcaagcgattcttgtgcctcggcctcccaagtagctgggattacaggtgcctgctaccatgcctggctaatttttgtctttttagtagagatggggtttcaccatgttggcccatctggtcttgaactcctgacctcaagtcatccacctgcctcagcctcccaaagtgctgggattacaggcatgagccaccacacctggcctgaaataatatctttcaaattctttgtagaatttgttttttcctgatttctgcacataggataaaaaaaaaaaatcatgtactaggatttcgagagaagcaatgggtaatctaaaaagatgaaaagagcaaccacgtcaatcccacagctactactagatttcataggaaaggtagctggcccagtttggagctaggagaaatgtcaaacacatgaagaaatgacaagcaaagaaatgccatcacgcatgaatgcttcatggcacccatgatgtccctgcttaggaggtaatggtatagatgactagatgacaaggacaaagatgagaggtgcgaagttgtccaagtccagcagctcaactgaactttcctaaatggaactgttaaaaagtggtaaatttaaaaacttcccctggctcacgtggtggctcacgcttgtaatcccagcactttgggaggctgaggcgggtggatcatttgaggtcgggttttgagactagcctggccaacatggtaaaaccccgactctactaaaaatacaaaaatttgctgggcatggtggtgggcacctgtaatcccagctacttgagaggctgaggcaggggaatcacttgaagccaggaggtggaggttgcagtgagccgagatcacaccattatactccagcctgggcaacagagggagactcgtctcgggggtgagaaaagaaaaaaaaaaaaaaaagcttcctccaatttataccgaaaattctctgttcaggactaagtggcatagagaatgttaaatgtgcctagatatcttcataactcatatattttctgttttctacatatcttgaaaggcagtgccaaatgacgtgtaattatctaggtggtaaaactgaaacatacttcctcttcccttgaatataaaaaagcattgtggtattagtacttttatcttggatcattgttcaggaggttcagcccccagaaaaccacatttttactgtcatgaatggcaagacaaaatgtagagctcaacttacccaaaggaaaaaaggctcaaaagacaaattatggcacaacttagcagccaaattcttaccaagtacagacttttgacatactgatctctctccagttgcaagtgggaacatgcactttgaatgatgtcattcaaaattaccctgcccagacacacttttcattgattctcttggagggcagttctaagagattctctggggctttctctgcatcatgagacgcagtgcagttctgcccttcaccttccggcagtttgtcacctcgtccctatgacctcagaggaactttgtctcaggccaattgtttgttccttggcctctttcatttcccctaaaaatcatttgctgcccctctaaatggcctacatctccatctatctccctctcccctcagaagagggtgctctttaagcatcaaccatccggcccttctagcagtctcatttttcagctggttcccatgtttatgcctgttctatgtttttcttttcctgttaagctgtctgttgtcagctcatttctgcagtgaatcttcagagaggagattggaagctttccttccacccatacgatagaactataaagcagaagagtttagaaagaatttcctatttaagtgacgaaacctcatactccatttgtgataaatagcacaaaggctaaaaaaacttatttttgaccaaaagctctgttgacattctattaaacaaacaccgacctatttaattttcataatgtaaatggcagacattttcataattcttatgctaataaatcatttccctgattttttgggtaaaaccacatattcataatgaagtccagaaacgtgaattgttttatataatttattcttatttgtgattacaagtatacctctacagaaagttagtatactcacacaaaggcaacttgtgcagaagagaatgttaaatgtgtaacgtctcagaaacccaataatgataattatcaaattatccaatttttgtggagatggggttttgccatgttggccagggtggtctcgaactcctacaccaaagtcagtctcacgatgacgatagacagccagactattgataacctggaataataatagttgaaataatgaaaaggtcaatgacaccgacaatatttcactcagaaagaatcatccttagaaaccgtcaacctcctccaaaaggtaaccacatccctcagatatcaccgtgggattccactgctacaaaaaagaacagaagttagaagtctcatgtttttcagatggctggtagtgtttttaggcattgcaaatgtggggtgttgtctttcttggtataaagcagggatatccaatcttttcacttccctgcctatattaaaagaaacaaagttgtcttgagccacacataacatacactaacactaacaatagctgatgatctaaaaaaaaactctttttttttttttttttggagacagagttccgctccactcagtcgcccaggctggagtgcagtggtgcaatctcggctcactgcaacctccagctcctgggctcaagccattctcctccctcagcctcccgagtagctgagattacaggtctctgccaccatgcccgactcatttttgtatttttagtagagatgaggtttcaccatgttggccagtctggccttgaactcctggcaggcgatctgcctgcctcggcctcccaaagtgctgggattacaggtgtgagccaccgtgcccagccatttttttttgtttttgtttttgtttggtgttttgtttttgagatggggtctcactctgtcacccaggctggagtgcagtggcgtgctctcggctcactgcaacctctgcctctcaggttcaagtgattctcctgcctcagcctcctgagtagctgggagtacaggtgcctgacaatgcactcagcaaatttttgtattttttgtggagatggggttttgccatgttggccagggtggtctcgaactcctgacctcaggtaatctgcccgcctcagcctcccaaagtgctgggattacaggcatgagccactgtacctggccaaaatctcctaatgttttaagaaagtttacaaatttgtgttgaactgcattcaaaactgtcctgggccacatgcagcccgtcactcatggctaagacaagctaagtataaagtaattatcttttctttttgtttggagacaaagtcttgctctgtcacccaggctagattgcagtggcatgatctcagctcactgcaacctccgcctcccgggttcaagcgattctcctgcctcagctactgagtaactgggattacaggcgcctgccaccgcactcggctaatttttgtattttgagtagaaacagggtttcaccatcttggccaggctggtctccaactcgtgacctcttgatccacctgcctcggcctcccaaagtgctgggaatacaggtgtgagccactgcacctggccagtagttatcttttctttaaagttatttacttgttttttaaattgatgtataacattggatgcatttattatatatcacatggtaaaagaatccctctaaataatacttctctcttggattatatgaatctttgtcatttgaagctcagcataagtaaaaaaaaaaaatacaatgaagagattacttcattcacaaataagtatcaaattttagtgctcaaaaattaacaaggtgggccgggtgtggtggctcacgcctgcaatctcagcactttgggaagccgaggtgggtggaccacgagatcaggagattgagaccatcctagctaacacggtgaaacccatctctactaaaattacaaaaaattagcagggcatggtggcacgtgcctacagttccagctacttgggaggctgaggcagaagaatcacttgaacccgggaggcagaggttgcagtgagccgagatcgcaccactgcacttcagcctgggtgacagagcgagactctgtctcaaaaaaaaaaaaaattaccaaggtggagatcatgaaaatggcatgaatagtgtgggatttctctaagattgttgatattaattccagtagactcttatgtgagtgaagacgaagacttcccctgagtaagttcagacagcttgtgataacatttctacatcgattcctcaggatttaactatatattcttgaaaacatctcaattttaaatgtttctttcaagatggtgaattaaacagagatagcccttcaacaggttgaactcagcatatgctgagtctgaaatggaaatgatggagttagagaaccatacaacaatggtaatgatttcagaaacatggtgttgagcagaataaagcagacacaaaagagtacctatggcatggcacgcatctgtatacgcgaaattccagaataagcaagctaacctatgataagaaagagactggctgggaagagtgagagttcactttctggggtgacataatagtgtagatcttggctgggcacggtggttcacgcctgtaatcccaacactttgggaggccgaggcgggcggatcacctgaggtcgggagttcaaaaccagcctgaccaacatggagaaaccctatctctactaaaaatacaaaattagctgggagtggtggcacatgtctgtaatcccagccacccgggaggctgaggcaggagaatcgctcaaacctgggaagcagaggttgcggtgagctgatattgccccattgcactccagcctgggcaacaagggagaaactgtctcaaataaataaataaataaataaaataatgtagatcttgaaagggggtcggtttatgctggtgtaagtactttccaaagttagtaaacttacacttaaggttatatattttggccaggcgcggtggctcacgcctgtaatcccggcactgggaggccgaggcaggcggatcacgaggtcaagagatggagactatcctggcgaacatggtgaaaccccgtctctgctaaaaatacaaaaattagccaggcgttgtaatctgagctactcaggaggctgaggcaggacaattgcttgaaccccggaagcggaggttgcagtgagccgagatcttgccactgcactccagcctgggcgacagagtgagactctgtctaaaaaaaaaaaaaaaaaagtcatcaaaccagatgacacaaatcaaatgacatttcactttgttttggtccattttgtttgttagagacaagagtgcagcggggccatctcagctcactgcaacgtccagctcctcggcccaagcgatcctcccacctcagcctctccagtaactgggataacaggtacgcaccaccaggcccgactaatcttttttggaattttttgtagagatggggtttcgccatgatgccctggctagtcttcaactcctggactcaagtgatctgcccacctcggccccctaaagtgctgggattacaggcctgagctgtgtaatttcatgccgcgtgacacagyccagtaaaaaggaagaaaccccgcgggtccagcgtctactcacaggggtgggctgatggctgataaatcccagcaggagccaaatgaggagccaaaagcgcagccgcatgtcctgatcctttcagggtgccctgaggcggccaggacagaggtggaggtggcttagggcaggggggagggaaggggacggggaccggggccggatctgagttggggcgggggaggggagggggaggggaaggggagggggaggggaaggggagggggaggggaaggggaaggggaggggaaggggaggggagggggaggggaaggggaggggaaggggggaagtaagggaagggaaaggaggagaagggggctgttgggcacctggaggaggtggaggaggagaagaagaaaggggtctgggaaaggatccggttcaaattaagttctcaagcgctggtggaaggtttagctacaggtcacggagaagatcagggaagcaacaggacacgcggggcaagggagcgtgaggcttaggagcaattagagggagacaaaaaggttctgctatccgccaaaccttcttcggtctgggccctcccttagcaaacctggggctttatactccctctccaccaatccctgatgaccccggtggtgcctcacaatggacaatgccaagtagcgcccgcatcattccaatgacccctcccccatctcagtctcccacactcctcgcaaggacaggtcctctctggaaccttcacaaacctgatttctggtcctccccaaccagctccctgtccctgcttctgggcgctccttccttcctgagctcccagggttcctcaaggtcacttttggcgacaaaacataaaaaacaaatgatggcaggatggcaggaagaacctcatacccaagcagagtgccaggttttacagcctccgctcagccattcatatcctaagcaacaaaacatcagcaggatgcggaaggtcccgatagtaaaccatctccatcacatccatgtagccatccgtccatcaacctgtatctcaggaacaaatgtagatacattcattttaagcaagcatggtacatttacaaaaattaacctgacttattttgttccagcaaatctcaatatatttgagagcaatcaaatcacacagcacgtttctgatcatataactgtgctagaagtcaatgattaaaagctaattcaaaattattatttgcttggaaattcaaagtgcccttataagacataaacataagaaagaatccaaaatgaaacaagattgcctttcaactcaatgataagatcataacatggcaataaaatgtctccctctggcctgggaattcctctttgtggcacaaggttgtgtgatctcaaatcacccctaacccacctagacattttaacatccgaaaccgagtgatgatgtccttatctataatcatcttactgcctgtgtgtgtggactttaaattctgaacccaaatgagggggagaaaaccaagttgaccttcatgattgacctctcagggatgtccaaggaatctgtgcatggtggcacctgcctgtagtcccagatacttggtaggctgaggcaggagaatcacttgaacctggaagatggagtttgcagtgagctgagatagtgccactgcactccagtctgagcaacagagcgagactccgtctccaaaaaaaaaaagttggaggattcacatttcctattttcaaaagctcactacaaagctatagtaattaagacagtgttgtattggtgtaagaataaacctgggtctggtgcagtggcccacgcctgtaatcccagtatctctggaggtcaaggtgggcagatcatttgagctgaggagtttgagaccagactgggcaacatagtgagacaccgtctctaccaaaaaaatgtacaaaaggtagctgggtgtggtggctaattgggaggctgaggcagaggagcccaggagttcaaggttacggtgagctatgatcacgccacttcactccatcctgggtgacaaaaaccctgtctctaaacaaaataaaaaataaaagtaaaaataaagttagcagttagggtctactatgttaacttttttctgcacagactgctgtatcacaccacctgcaaaaaagttaattcaaaatgaaaacaagatctaaatgtaagagctaaaactataaaactcttagaagaaaatgtaggaggctgggcgcgctggttcacgcctgtaatcccagcactttgggaggccgaggtgggcggatcacttgaggtcaggagtttgaggccagcctggccaacacggtgaaaccccgcctctattaaaaatataaaaaattagctgggtgtggtggcacacccttgtaatccccgctactcaggaggctgaggcaggagaatcgcttgaacccgggagtctgggcaaaaagaatgaaactctgtttcaaaaaaaaaaaaaaaaaaaaggagatggggtttcaccgtgttaggcaggatggtctcgatctcctgacctcgtgatctgcccgcctcagcctcccaaagtgctgggattacaggcgtgagccactgcaccccgcccctctttgtttgttttttaagagatagggtcttgctctgtgcccacattggggtgcagtggtatgatcatagctcactgcagcctcgaattcctaggctcaagtgatcctcccacttcagcctccagagtagctgggagtacaggcacgcagcactacacctggcttattttatttttattttttgagacagggtttcattcctgtcacccaggctggagtgcaatggttcaatctcagctcactacaacctccacctctcgggctcaagcaattctcccgcctcagcctcccaagtagctgggactacaggcataccttgccaggataattttttcttttttctttttttgccatgatgcccagactggtcttgaactcctggcccaagttgtcctcctgcctcccagaatgctgggattataggcatgagccaccacgcccggcctccttttatcattattttaattttttatagagatagaaccttgcaatgttgctcatgctggtcttgaactcctggtctcaagcaaacctcccgccttggcctcccaaagtgctgggattacaggcatgagccactgcacctggctcccacttagatatgttaccagaagcacaagcaaccaaacaaaaaatagataaattggacttcatcaaaataagtgtctttccgtaccaaaagacaatatcaaaaaagtaaaaagacaacacagaatgggagaaaatatttgcaaatcatgtatcttataagggacttctgtctagaatatatgaagaaatcttacaactcaaaaagacttcagatctctggctctttaataaaaaaagacaatcccatttaaaaatgggcaaaggatctgagaagacatttctcaaagaaccatatgtacggtcaataaggacatgaaaagatgctcagcatcattagtcaccagggacatgcaaatcaaaaccacagtgagataccacttcacactcactagaaaggctataataaaaaccaaaccagacaaccaaaggaaaaaaaaaaaacaaaaacggaaaagaggctgggcacggtggctcatgcctgtaatcccagcactctgggaggccaaggccggtggatcacctgagtttagaagttggagaccagcctggccaacatggcgaaacctcgtctccataacaaatacaaaaattagccaggtgtggtggtgggtgcctgtaatcccagctacttgggaggctgaggcagaagaatagcttgaacccagaagcggaggctgcagtgagcagagactgcgtcactgcactccagcctggtgacagagcaggactccatctgaaaaaacaaaacaaaacaaaaacaaaaaacaacaacaaaaaagaattagccaggtgtagtggcgcatgcctgtaatcccagctacttgggaggctgaggtgggagaatcacttgaactcaggagactgagattgcagtgagccgagatagcaccactgcactccatcctgcgcaacagagcgagactgtctcaaaaataaaaaaaaaagagggaggctgaggcaggagaatcacttgaaccggggagacggaggttgcggtggaaaaagaatggaaaagagcaagtattggtggggacgtggagtcctcgtacactgccagtggaatgtaaaattgcagccactttgggaaacagtcgggtagttcctcaaaggatcaaacaaaattaccatcaacccagcaattccactccttgatattatccaagagaaatggaaaacatgtgtccacacaaaaactttacccaaacatttatagcagcatgattcatagttaagtcaaaaaattgaaaccccaatatccatcaactaacaaatggataaataaaatattgtggctgggtgtggtggctcatgggtaataatcccagacctttgggaggctgaagcaggtggatcacttgaggccaggagttccagtccagcctgagcaacaaagcaagacctcgtctctacagaaaaaaaataaaaattagccaggcagggccaggtgcagtggctcacacttgtgatcctggcactttgggaggccaaggtgggtggatcacttgagctctggagtacaagactatcttggacaacatggtgaaaccccatctctaccaaaaatataaaaattagccaggtatggtggtgcgtgcctgcagtcttagatactcaggaggctgaggcaggaggaccccttgagcccaggaggttgagactgcagtgagctatgatcatgccactgtactccagcctgggtgacagggcaagactcttggtctccaagaaaacaaaaacaaaaaacaaggcctccagtacacactaaggtttgagaaacacgggtataatgcaatgcaaaggtgagaggcaggagtcatatcatagcatgatcagagctgatgtttattgagtgttgacatgatctcatgtagtttccaaaagcaacttatgaaatgctggtgctactattatcccattggacagatcaggaaactgaggtgcagagaggtgaagtgacttgcccaaggtaatagagctagtgaatggcagggttggcacctgaaagtcagttccttctgcccccaaagcccatgctattaaccagtgggtcagcatttcctagatctgggtccacaaacatcactggtcgtaatggagtagtctcagggggaacttgcatgttcattttaaactccaatagttacataactatttaaagtaaagtagaaaatacatatatatcacctcaaactcatgattttaatagtgtttccctttaaaataactgaatgtatattaaaggttagttgctttaatgaaaaatattaagtaaataaaagtactgttaggttcagatatggcaaatatagtagaaagggtaacaatgaagtatgagaaacactaagtcagactcagtttttttttttttttttttgagacagagtcttgctctgttgcccaggctggagtgcagtggtgcaatttcagctcaccacaacctccgcctcctgggttcaagcaattcttgcgcctcagccttccaagtagctgggactacaggtgcaagccaccacacctggctaattttttatatttttcgtagagacggggttttgtcacgttgtgcaggctggtctcaaactcctgacctcaggtgatctgcccgcctcagcctcccaaagtgctgggattacaggtgtgagccacagtgcctggcccagactcagtttactgtaaaaatatgtaacaatttatacattttactgtgtataaaaactgtacctaaataacaggatgccaggagcagtggctcatgcttgtaatctcagtactttgggaggccaaggcaggactgcttgagctcaagagttcaagaccagcctgggtaacataggaagatcgcgtctctacaaaaaaaaaaaaaaaattagctgggcttggtggcatgcacttgcagtcccagctgcttgggaggccaaggtgtgaggattgtttgagtctaggaggtcaaggctacagtgagccatgactgtgccactgtacttcagcctgggtgacagagtgcaaccctgtctctaaaaataaaaaaaaataataaaataaaatgcctcaggtgccaaccctgccattcattagctctatctactcactgatggaacagtgaatacatagatttgatgggggctggactacatgataaaacaactgtaacaaaatgttaacatagaacagggtggcgcatactcaggatgattcactgcacaattctttccacttctctgaaaactttcatgctggaaagaatgtccaacatgattgtttacagattgtcccaaacaatgaatgcatgaatgaatgaatacgtaaggcctcaaagatggcagaggccaggtacagtggctcacacctgtaatctcagcactttgggaggccaaggtgggcggatcacctgaggtcatgagtttgagaccagcctggccaacatggcaaaatgtcgtctgtactaaaaatataaaaattagccagacatggtagtgaccacctgtaatcccagctactcgggaggctgaggcaggagtattgcttgaaccgggaagtggaggttgcagtgagccaagatcacgccattgcactccagcctaggtgacagagtgagactctgtcaaaacaaacaaacaaacaaacaaacaaacaaaaaagggagaaatctgctgacataccttctttatgctgtctatatataggaaagtgggcatgtattactttcataataaaagtttctttttagagacaaaaacgatataagaagtccatggataaaatcggcatttattcagaaggcatgatgccaggaagaaactccccaagtgggagacaatggctggcccccctgcaagggaaacaaggcttcagcccttccctactcccagacctgccgggaaggctgggagcacagttcatggagggtctctggggtgggcctgggtgtctgacctgtccctctgcccacaggtgaatgtgacctgcgtcctgaggatcccgagtatcaggagagctggcagaggaagtcatgcagaggcaaagccaggagccccgacagggagatccccagtgtgtcagagatgcaggtggccgccattgcaaactcccggtgctcatcactggtctgggagggcagagagcaggggtgaggcttcagtcccagacatccctgccctgggtgtccctggacaggccacccccagcccttgcccggccaatgctgacctccagggcgatgttgtggaaggtgttcacgtaggctgcgcctcccaggagcccctcatacagaatgatcaggaagacgaggtagatgcttggcagaaagccgaaccacacgtctgccagcaggaacaccaggttgaggcactgtgaacagggggagaggctaagcctgggaccagggcggggcagggaaggagaggtggcctcccctccaggggtccctggttttaggagttactggtgaaggagagggctgccaggtctagataaaatctcaacaccagcccggtgcggtggctcacacctgtaatcccagcactttgggaggctgaggtgggcagatcacctgaggtcaggatttcgagaccagcctggcctggtctctactaaacatggtaaaaccccatctcaactaaaaatacaaaaattatctgggtgtagtggttctgtagtcccagctacttggaaggctgaggcaggagaatcacttgaacctgggaggcagaggctgcagtgagccaagatcgcagcactgcactccagcctgggcaacagagagagactccatcccaaaaaaaaaaaaaaaaaattctcaacctcagcctggtgcagtggctcatgcaggtaataccagcacattgggagaccaaggtgggatgatcacttgaggccaggagttcgagaccagcctgggcaacataacaaaactccgtctctacaaaaaatttaaaaattagttgagcatggtggcacgcacctgcagtcccagctactcgggagtctgagacaggaggattgcttgaacctaggaggtggaggctgcagtaagctatgattgtgccactgcactccagcctgggtgacagagcaagatcctgtctcataaaaaaaaaaaaaaaaaaaatggaggcttcttaaaggaagtgggaccatcgaaaccaggatttctcaattgcagcactcttggcgtttggtgctggttgttctgcatggtgagggctgtcctgtatatggcagcgcatttagcaggatccctggcctctgcccgctagatgcccatagcatccctcagttgtgacaaccaaagcatgcctgcagacgttgccaaacatccgctgggcagcaaaattgcccctattggaaaaaccgttggttcactatggtaaaacaaggtgggagtagccgggcatcctattcagctgggctcgaactcctggtctcaagcagtcgctgcccccctgcctcagcctcccaaagtgctgggattataggcaggagccaccgcacctggccaggaagcctcttcgatccccaccccagggtgtaggtcccacctctgtgccccagtctctcaaggaggtgccatcctcccagcactgaccacgccacattgcctcttgtgcagtgtgtaggcctcctcgtggcggttcatacttttcgtatatgtaagaatcgcctggggatctaggtacaaatgccccaagcggggcttaccctagaggtcctaattcattaaatctgaggtagacttaaagatgagcattaaaaaggacacacctctagccaggtgtggtggctcacacctgtaatcccagcactttggaaggccaaggcgggtggatcacctgaggtcaggagttcaagaccagcctggccaacatggcgaaaccccatctctactaaaaaatacaaaaattagccaggtgtggtggcacgtgcctgtaatcccagctacgcaggaggctgaggcagaagaatcgcctgaacctgggaggcggaggttgcagtgagccaagatcacgccattgtactctagcctgagctacaagagcaaaactctgtctctaaaaaacaaaacaaaacaaaacaaaacaaaaaatttgctgggcgtggtggcgcacctgtaatcccagctactcggaaggctgaggcttgagaatcgcttgaatctgggaggcaggggttgcagtgagccaagattgcaccgctacattccagcctgggcaacagagcgagactccatctcaaaaaacaaaacaaaacaaaaaacattatagctaaaaacatgtagcttaaaaccataagctacatgtttcagtggtatctacaagcaccctgagttataaatttggggttttgtgggtacaaaccctgggcttgcagcactgctcagataaataaggaaggaggctggaggatatttacatgcttttgccataatatgaaagtgtaatctttttttttgagatagggtctcacccaggctggggtacagtggcatgattatggctcactgcagcctggaactcctgggctaaagcgatcctcctgcctcagcctcccgagtagctgggattacaggtgaatgtcaccacaccctgttgttgttttttgtagagatgaggtctcgtgatgttacccaggctgctctctcaaacttctgggctcaagcaattctcccacctggcttattttttttttttaattttttgtagaggtggggggtctcactatgttgtccagtctggtctcaagctcctggcttcgagtgatcctcccaccctagcctccaaaagcattgggattacaggtgtgagccacaacacctagcctaaagtataatctctatttctgtattttgctatcacagaattgagttcctaagtctttttttttggagatggagtctcgctctgtggcccaggctggagtacagtactgcaatctcggctcactgcaacctccatatccggagttcaagcaattctcctgcctcagcctagcgagtagctgagatgacaggcaggtgccaccacgcccaactaatttttgcatttttaatagagacggggtttcactgtgttggccagactggtctcaaactcctgatcctgacctcaggtgattcacctgccttggcctcccaaagtgctgggattacaggtgtgagccaccaggactggccaagttcctaaatttcaaaggcagaagactttcctgtcacagttgacagtttattgtaacagttacctgcaggggctgtggatttgtaaccttgaaacaatgaatgctggttatatgaaactccttttattagactgttgtaaggaagggtgtttgcgcccttaaagctgtaaactactgtttgccaagggcagttgaatttgctcaccaccctcaagataaataacccactgacttcaaagtcaccaattctattataattaactatctagaataaaagaactgtacattttcttatagttagaaacattatttgaaagcctgtctctttgcctgaggtaaatgacctatgatcatgccactgtactccagcctaggcgacagaggaaggttccgacttttcctttcttttttctttttctgggagacagggtctcgctctattgcctaggctggagtgcagtggcatgaccttggttactgaagccttgacctcatgggttcaagtgatcctcccacctcagcttcccagtagctaagactacaggtgtgcgccactgcacctggctaatttttgtagagatgtgattgtgccatgttgcccaggctggacttgaactaccaagctcaaatgatccacctgcctcagcctcccatagtgctgggattacaggcatgagccacctggcccggcccaatcccaatgcttaaaacacacacacacacacacacacacacacacacacacacacacacacgcacacacacacacacactacaaaatcttgttcttcgattctttctctcatctctatttcttacaactaccctgaaaaataggtattggccacacccaatttatacatgaggaaattgaggctcagagaggttctgagacctgccctaagtcacacagtggctgagtactgaagctcagttttgcttggctcctgaggctatacattttacatggagctctgctggactttggttccctgtgctaagaaatgatagtgtacaatttacacttccctgtaatcccagcactttgggaggctgaggccggcagatcacctgaggtcaagagttcaagaccagccaatatggcaaaatcccatctctactaaaaatacaaaaattagccaggtatggtggcgggcgcctgtaatcccagctactcaggagactgaggcaggagagtcacttgaacccgggaggcagaggttgcagtaagccaagattgcgctactgcactccagcctggacgacagagcgagactctgtctcaaaaaaaaaaaaaaaaatttacacttcccactgatagtgggaagcagggggtttggggaagctgggagccaagctgggagccaaggtgggagtgaagtgaggggcaggggtttggtacctgcagcagggccagggcccaggtgaaacggatgcgacagcagcggagagaagagcgggaggcaaagacgccagcctggtacagcatctggtacctgaggttagggttggggggaggagaggaggctcctccagggaccatcccgctccccccggtgcctactgggcagggcagctgcatcaccacggcgccctcccagcccactgccctcgctcctcttaccagcggtattgctgagcgtgactcagggaagtgttccagaaaaagaggagttcaaactgcaacaaataccagacaggggagatggacggggctgtgtgggtcccagccccaatcgccacctccacacccctcctagcacccctcacttacaagtccctggttaatgaaatactcggcaaagtaaactacgaccaagggaacaatgtaccacagcagaccctggaaaaggcagaagatataagcggggggcctggaggtgagcaagccccacagggacataccccagccatcatccgaaccttgaacactgtccacctttcccgaagggagaggctggagctggagcctgcaggggaacagagagagaagggcagatgaagttttcacactgaagactcggcaaagaggcaccggtatgacagaattaaccagaccacgcaacagtgggaactcacttccatgccactggattggacacttaaaaatggttaaaatggctgggcgcagtggctcatgcttgtaatcccagcaccttgggagactgaggtgggcggatcacctgaggtcaggagttcaagaccaccctggccaacatggagaaaccccatctctactaaaaatacaaaaattagccatgtgtggtggcaggtgtctgtagtcccagctactcgggtggctgaggcaggagaatcacttgaacccgggaggcagaggttgtagtgagctgagattgcgccattgcactccagcctgggcaacaagagcgaaactccgcctcaaaaaaataaagtaagataaaaaataataaaatggtaaacttcaagtaatatacatactttatcatgatgaaaataaaagctaaccaggtgagacctcttcacgtctctttgatttttaattttttttattttttgagacagagtctcactcagttgcccaggctgcagtgcagtggtgcaatctcagctcactgcagcctctgcctcctgggttcaagtgattctcgtgcctcagcttcccaagtagctgggactacaggcatgcaccaccacacctggctaatttttttatttttagtagagacggggttttaccatgttggccagactggtctcaaactcttgatctcaaatgatccatctgcctcagcctcccaaagtgctgggattacaggtgtgaaccaccacgcccggccaatgtctcttgtacagctccacagatggccattggcccaccctgcccagtctcactggccattctctggttctagaacatcccagcttatccccaccgcagggcctcagcacttgtgattggaatgcctggcacatggtaagtactcaattaatatcccttcttctctccctcccttccttcctttcttttcttttttttttttttgcgacaaggtcttgctctgttgcccaggctggactcagacttctgagctcaagtggtcctcctgcctcagcctcccaaagtgctgggatattacaggcgtgagccactgtgctcgtcctcaacaagtatttctcaaatagacaaaggcttttcccataaccagtacactcactctctttcccctcttaactttgcctattgcagagaggaaaaggccaaacccagagagaaagaaagtgacctctctgagggtctgtgtctcctacctggcttcgactccggggcctcggttcttatgaggggctgccgggctgcgctctctgcttcttcttcccctccagggtcctgggcctcaggagatgtgagcaacaagaaatagctaggagtaggatgaaggcagggtcagaaaaccctactggctgggaaggtccccagggaccatctaggccacttttcccagggaacacctctacctttgaacactttcaaagatgggtagctcactgcctctaaggctcctacgctgtgcgggagagctccaattgtggacaaaggcttctttctttggacctgaatttatctccttattcctattcatgggccttcattttgttttgatttttttcagagacagggtctttctccagcatccaggctggaatgcagtggtgcaatcatagctcactgcagctgcgacctcccaggctcaagcaatcctcccgcctcagcctcccaagtagcggggactacaggcacgtgccaccaagcccgcctcatattttccattttttgtataaatggagtctcgctatgttgcccaggctggtctcaaatttctagcctctagtggtcctccagcctcagcctcctaaagcactgggattacagctgtgagccactgtgctcagcaggcccttgttcggactgctggctcatacctagcgagtcagttctgttttctggccattattattctaatggtcgctctagctcccattaattatacgttcactctgtgctaggccagaacttcctcgattttagtcacttaggttctggcttcatgttatttgccatatccatattcctcctgtatatatatatttttacttaatatttttctttaaatggactcactttttctacttagacttgtcctaagcactaatcttgtgaagggccaggtgtgtctggctagttcaaagtgtgtgttttttttttttttagacggagtctcgctctgttgcccagcctggagtgcagtggcacaatcacggctcactgcaacctctgcctcctgggttcaagcgattcttctcctcagcctcccaagtagctgggactacaggcaagcgccaccaagcctggctaatttttgtatttttagtagagacggggtttcaccatattggccaggctggtctcaaactcctgacctcgtggtgcgcccgcctcggcctcccaaagtgctgggattacagatgtgagccaccatgcccggccaaagtgttttgtaatatgcatgaaaatacacagaactaatcaggccgggcgcggtggctcacgcctgtattcctagcattatgggaggccaaggcaggtggatcacttgaggtcaggagtttgagaccagcctggccaatacagtgaaaccccgtctctactaaaaatataaaaaattagccaggcatggtggcatgggcctgtagtcccagctactcgggaggctgaggcaggagaatcactagagcccgggaggccgaggctgcagtgagctgagatcacaccagtcactgcactccagcctgagtgacaccatgagactccgtctcaaaaaaaaaaaaaaaaaaaaaaaaaaaaagggagtcgccatggttcaggcctgttgccctggcactcaggcaggcaaggctacacattcgaggccaacctggtcaacactgattaaaaaaaaaaaaaaaaaaaaaaggaactaatcaaataaagtccaccctcatccaacttctaatcaccttgggaaccacactgtgctgaatgcattaccctcatcacctccaaggaaagcaagaacaactgccatttgagatatggggaaactgagggttcagagaggtggagtaacttgttcaacgctacaaagctaaaaagtggcagctccaggactcacacctggggctatcagagtccagattccgcctcccttcacagcaaggtagggacttgaagattgcaatcataatcaagttttcttttctttctttttttttttttcttcctgagacagagtctaactctgtcgcccgggctggagtgcaatggcacgatctcggctcactgccaccactgcctccggggttcaagcgattctcctgccttagcctcctgagtagttgggactacaggcacccgccaccacacctggctaattgttgtatttttagtagagacggggtttcaccatgttggccaggctggtttcctgaccttaggcgatctgccctccttggcctcccaaagtgctgggattacaggcgtgagccaccacacccagccatggccaagttttctctccttggacccctctccctcccggctcagggcagctcacctggccagcagcagggcagggatacccagcatggacagcagggtctgctgaggggagaggccggcctgggtgaggcccaggtaggacagggcccccagcagcccagctcccccagtccctgaggaccaccaggagatcacggccctgggaaggagaacacaggaacattcaggaggacctaggctgaccatgggacagcctctccccacactccctgctccacctgcttacctggggtagaaggcagtgagggagaggaaggtgacctccccaaggcctgatgagatgctagcgaagaccacacctggggggaggacaagcactgggatggtcacaccacaccttgccacactgcccaggcctctaatgtgtctggccatggcctcctcagtatcagctcatagaggctccaatagatcccatgcataggccaggttccaggtctgaagcagagccccactcccctgcgtgtcccttcatggagagtggcacctccatccacccagttatcagaccaggggcagacatgcacccttgatgtctctgccccttcatcagtctttttcttttcttttctttttggagacggagtctcgccctgtcacccaggctggagtacagtggcgtgatctcggctcactgcaacctctgcctcccaggttcaagagattctcctgcctcagcctcccgagtagctgggattacaggctcctgccaccacacccagctaatttttgtatttttggtagagacggggtttctccatgttggccaggctggtttcgaactcctgacctcaggtgatctgcctgccttggctttccaaagtgctgggattataggcatgagtcactgtgcctggtccatcacagagtcttgactttgttcacctcaatctccatctaattcatccattttctcccatctcctccactgcctacccctccaaattgtcccagtctcccatcgcctactgctgatagccctagcaggcttctaagggtgacagaatgaatccctttcctctgggaggctggggagactcttcccacaaatgctctgatgtggttcctcggggctccccatctgacacagaaccacacactcaccacacaggctggtccccacagaatgagaaaaggcaaccaggacgaagcttccagcagcacaaatcccactgacgagaacccgggggctgagggggtgagaagggaagggagggggaaggtcggtctctactctcagcatctcagccatcccagcctcccctttctcagctcctgcccaccctgcctcccactaccctcacccagacctgtagggcagcaggtgaaggccaagaggagccaacaatttgatgacgagtgtggggaggatgtccgccaggagcacagcctgggacaggagaatagagtgagaccgcagagcttccaggggacaaccctcccaaccacgtggccaaggagaggcaggagctggccaaacaggcctgctacaaacacaggctctggagtcaggcacgcctgggttcaagtctcagctctcccactccttagttgtgtgtcaagagtttatactctctgagcttcagtttcctcatctggaaaatgggaatatcatagcgcctagctcacaggactgctgtgtggcttaaatgagctaatatatggtgcagacagaaaggactcagaaactatatatatatatattttgagagtgagtctcattctgccacccaggctggagtgtagtggctcgatcttggctcactacaacctccacctcctgggttcaagtgattctcctgcctcagcctcctgagtagctgggattacaggcgtgcaccaccatgcctggctaatttttgtatttttagtacagatggggtttcaccatgttggccaggctggtcttgaactcctggtctcaagtgatccatccgcctcagcctcagaaattatattaaggtctcaattattatatatatatattttttttaatttttttccttaagatgggggtctcactatactgcccaggctggtctcaaactcctaggctcaagtgatcctcccaccttggtctcccaaagtgctgggattacaagtgtgagccagtgcgcccagcccaggtctcaactgttttaatcatgacagtcccagctgggtagtgaagggctgggagtggggtctatagacccaggggccctgggtcaggcaaggaccaggtgagatgagtacgcacagccgtagagacagagttgcagtcaaatcgtgatgagctgttgtgggggatcggcgttgggcctgggtccacctaatgggagaaaagcatgtctttcaccctggaggcagagggatagacacacagagcctggctcccgtcccagctctgccttcacttgaaggatggctttgggtcagcagtgactgacttctcaggacctcagcgtctctgcatgcacaatgaagagggggtttccatatgagtctcacactactagaccacaggccacagatggccctgtaaatggactttgtttagataacacattcaagagctttcttttttttgagatggtgtctcactctgttgcccaagctagagtgcagtggtgtgatcttggctcattgcaacttccacctcctggcttcaagcaattctcctgcctcagcctcctgaatagctcagactacaggtgtgtgccaccacacccaggtagtttttgtatttttagtagagtcggagtttcaccatgttggccaggctggtctcgaactcctgacttcaagtgatccgcccgcctcagcctcccaaactgctgggattacaggtgtgagccactgtgcccagccagagactggaaactttaccccaccttgtcccaccccctcatcttcccacagggactaaccatggtggtggtggtagagagtcacttacatggctctggtttcccgatgtcctcttgtggctaaggatgtcgtgggcggcactcagcatcaccacataagagaagttgttgcaaaggcccagcagcctggaaggagcaggacaggtctcaactccctcctcatcctgcagccatctgtagcctttgtgccaaaccttcccttacctgtgcccttcaatcagccccctcttttttttccctctatcaccagatcccatcctcattcaatgttggggtcaaaaatacaggctttggtgcttgggcaagatagtgagacccccatctctacaaaaaatttaaaaattagccaggtgtggtggcttgcactgtagtcccagctacttgggaggctgaggtgggaggattgcttgagtccaggagtcagaggctgcagtgaactgtgatcatgccactgcactctagcctgggtgacagagcaagaccctgtcacaaaaataaaaaataaaaaggaagaggccgagtgcagtggctcacacctgtaattccagcactttgaggggccgaggcgggcggatcgcctgaggtcaggagttcgagaccagcctgagcaatatggagaaaccccgtctctactaaaaaatacaaaattagctgggcgaagttgcacatgcctgtaatcctagctactcaggaggctgaggcaggagaaccacttgaacccgaaaggcggaggttgcagtaagccgagattgtgccattgcactccagcctgggctacaagagcgagactctatctcaaaaaaaaaaaaaaaaaaaggagagtggtcacagagagtttctgggagaggccttggaggctggaagtgaatccaagtctgtgatcccaaagcccctatgtcagggcggggcacggtggctcacgcctgtaatcccagcactttgggaagtggaggcaagcggatcacctaaggtcaggagttctagaccagcctgaccaacatggtgaaatcctgtctttactaaaaatacaaaaaattagctgtgtctggtggcacgcacctgtaatcccagctactcggggagctgagacaggagaatagcttgaaccttggaggtggaggtttcagtgagccgagattgtgccactgctctccagcctgggtgatagagtgagactctgtctcaaaaataaaataaaattaaaaaaaaaaaaaaaaaagctgggcgcggtggctcacacctgtaatcccagcactttgggaggccgaggcgggcggatcacgaggtcaggagatcgagaccatcctggataacgcggtgaaaccccatctctactaaaaatacaaaaaaatagccgggcgtggtggcaggcgcctgtagtctcagctactccggaggctgaggcaaaagaatggtgtgaacctgggaggcggagtttgcagtgagccgagattgcgccactgcactccagcctggaggacagagagagactccgtctcaaaaaaaaaaaaaaaaaaaaaggttcaggcccggcatggtggctcatgcttgtaatctcagcactttggaaggttgaggtaggaggatcacttgaggccacgagtttgagaccagcccaggtcccatagtgagacccccatctctataaaaaaatataaaaattaggcagatgcggtggtgcacacctgtagccacacctacttggaggctgaggtgggagaatcacttgagcccaggagttccaggctgcagggagctgtgattgcactactgcattccaacctgggaaacagagcaagaccctgtctcaaaaagaaaaaaaaataagataaaataaattaaaaaaataaaaaagttttagtagtgatgcatttatttaaacgttcactaggaaaacgctggttttccaagtggagtcgtgatttaaagttttctttttaaaaatatgtgcactaaaaaacgttaaggctgaattggctggaagaaaaaagtaaataatcctacaggtggtaggtatgaggatcttgctaaatccggaaggtgataaggagtgaagtttggaaattttacatgctgcccctggggcaaaccagtggattcagtaaatatttgtgggttcagctcctttgcgcagcttaactctttcttccccctttcctccggtcacttccctcttctcatgccattgtcactcgctgaagtctcaggccactcaccagaagcccaccgcgttcttccaatgcgcgccctgatggtccaacagagggagccggggctccgggacggtctcctcccctgggagagcgagaagagggcatgacccccacctactctcaggtgcacgaccgctccttgcgtgtcctcccggggccgagtcagctctcattcccctcaggtgggctgcgagccagaggtggtcgttccatgagggtgggcgggaatactcaccctcggaatccgaaaagcgccgccgcgagcctgcacagcctcccatcgcatcaagttcaggtcccccgagggtccagggtcatagagtgtccaaagggggctcccacgggagggatgagggtctgcgacaggtgacaaggatcaacgcccgattgccggtcccagctccggcttgtctagggcactcgcgccccgcgatccatcaaggaagctgggggctccatctcgagcgccctacgacccaccacgccccacccatcgtactctcccccgccccgtctacagcagggaccctgaggcctgtacctttaagagcagcagaatgttctgcactatgcagaggccgtttgtcggatcacgtgacagcacccgcgtgttcccccatcacgtgctcagaggttttccctacttccgggtcctctctgtcttcgctttgggccttctcggcttcggagcgtgaaaaagggaggggctggagaaccctggaaccgcaggttttaaactggagcgggtgggagcagcaagcagagccgtgaccttagatcagtggcgcccaagaccgagacagtagcctgccagcaccagttatgactgtgggaggcttcagctcctttccttcagcactcacttgccagaaacaaatatggccacctgcctactccctttttttttttttttttttttgaggcaggactgtttctggttgcgaacaaagacgaccagcttcaggtcattcttatccccatctgttgaccttacaaattgttttagagacctaagtaaacataacactcatctaaagggatttcgtgaatgatctattggcagtatccaagatgttaagagatccctatttccaaattatcctagaaccaaaaaatatcacagcacttcaacccctggtgttacagatgagaaaaccaaggtacaaatatatatatatatatatataacaaaattagccgggcatggtggcgcattcctgtagtcacaggtaccttggaagctgaggtgggaggatcacttgtgcccaggaggttgaagctacagtgagctatgatcacgccactgcactccagcctgggtgacagagtgagatcctgtctcaaaaaaagaaaaagtaaaaaataaaataaaaaaaatatatatatatgaaaaaaattggaaagttgctgacaatcattcatacaatgttagacctaaaggtgaccttagagacctgtatggtgataagaaatagagcaccagaggcagggagccattgggttggctccaggctgctgcaggattcctgcctccatcaaaggtggtgcttagaccagattttttttttttttgacagggttttgctctgttgcccaggctggagtgcagtggcaggatcttggtttgctgcaaccttgacctcccaggctcaggtgatcctcccacctcagcctcccgagtagctgggacagcaggtgcgcaccactgtgcccagctaatttttgtgttttttgtagagactggattttgccacgttgcccagggtggcctcaaactcctgagctcaagcaatccacctgccttggcttcccaaagtgctaggactacaggcgtgagccactgcacctggccagactaaatgattttaaggcctaagattctgatgctgtgatttcatagaattgccctaattggaataggaaagtggggctggggaggggagaaggagggtatggggaagagaagtagagcaaggtcactttatgtagttccaaataaggaatcatacccttaccttcttctaggtggaaagcggcatcctgcattctcttcttgtccttggcctcatctctgctatgggctgtgccacctctatatgctctttctcaccaccaggccttcagaatgcagttggaaatgtgccctctcgtctgggtgtggtggctcatgcctgtcatcccagcactttgggaggccaaggtgggcagatcacctgaggtcaggagttcgaaaccagcctggctaacatggtgaaaccctgtctctactaaagatacaaaaattaaccaggtgtggtggcacgcacctgtaatcccagctactcgggaggctgaggcaggagaatcacttgaacccaggaggcagaggttgcagtgagctgagactgcgccactacactccagcctgggtgacagagtgagactgtctcaaaaaaaaaaagaaaagaaaagaaaagaaatgtgccctctctagtgtgcctcccaggtcactcagctgatggaaaatggaatcctactaacgtgcagggctctagaaattcagcagcgtttcatacatggcatctgccatcaaggaagtcacaggaaggtgggaggcagacacagatatccacaatataaagtttagccaagttcttttttgcaagcctaatcataggtgaggggatgcaccccagagccaccaatccggccccttccgcccctgggggaagcattaatgacgccgaaatgtgtcagagctcccaccagccccctcttcactgctactctttcttcccaggcaaaacaggaaccacaaaccccagcttcctcttgcagagtggctgtggcttgtaggggaggcagaaatggctgaggtgcggatacgagacctgagtcacttgagctgctgttgccacatgtcccctccctctccccctccccagttctaaggtctcctgctcccactttgtcctttctggcctcttgcttgtcctttatttccaaatgtgcacctgagtcccctgtgtgatgtacacccatttcccgggctgcagtgggggctactgtgggcatcaggggccgtgggcagggcctggggtggggacgcatcagggagacaggggaagaggaagtgcctttggtcctggggaaggttggcttgtcttggtgggtggggacggtcattatcagctttctggacacacagacagagacagacaggatggacttcctccggctatacctccctgggctgcaccaggccttgaggggggcactggtgagaagggcagacagctgccagatacttgcaccccattccctggggcctcacttccgggcacctcccctggggcctcacctttcccctcctccttctgatctcctcaaactggagattgctttctcaggttcaggcagactcctggcctaatattttctgaatttcagtccccacctccaaccatgcgtcctcgtacccctaatcgatgccccttctggctccttctgcaaatcctcttcttctcctttcagatcccagtaccctcttccttaacctgggctcctccagccagggcccccagggaaagggctgggactctcctcaatgactctcccctctctctctcttttttcctaggattccctcggcacctttgtctcctacctcctgggagatgcagtccccactgtagagcgggaggcgcaggcggctgaggaactgggggtggtggcggtgggaaagacagggaagattgtagaggaggaagcccaggaggacctggagggccttagaggcagccaaaacgagggggctggaaggctgagagggcctggagatgacagaagacatgaagtggggagctcagctgtagaacagacctggggctggggagatggcagctcccatgggtcccaagcagagaggcaggacagtggggctggggagacagccaaggctgccaggtgccaggagccaagcgcccacttggaggccagaaagaaatccaaggcagggtctggggcttgccaagacaggagcggccaagcccaggagaggcaggagtcccatgagcaggaagtgaacagagaggagaggctgagaagctgggaacaggaggaggaggaggaagaggtcagggcaagagagccagggatggccagaggggcggagtcagagtggacctggcatggggagacggaggggaaggctggtgctgttgggccaaaggcggcaggggacaaccgggagatggagcagggggtcagggaggcagatgcaggggaaactgaggagcctggggccgaaggggctgggaaaggagaagaggtggtagtggtggagaaggcctgtgaaagcactagggcatgggggacgtggggcccaggggcagagcctgaggactggggaatcttaggcagagaggaggccaggacaaccccaggtagggaagaggccagggcaattttagatggggaggaagccaggacaatctcaggcggggaggaggctgagacagcctcaggcggggaggaggctgaaacagcctcaggcggggaggaggccgggacagcctcgggaggggaggaggccgggatagcctcaggcggggaggctgggacagcctcaggaggggaggaggccgggacagcctcaggaggggacgaggcctggacaacctcaggcaaagaggaggctgacctgctgggagtcagacagacagaatatggagcagtcccaggagaaaggctcctagaggctactggaaaagtctgggtcctagaggaggagggggatgaggagagagaggctgaggtgagccctttccccaaacaggcccaggtcctgggcactgaaagaacagaagaggctgctgagagccagaccgcagggagggaagctgtgggaggccaggaggcaggggagagctttgagggccaggtagacctgcgtggtaaggaggctgagatgaggcaggacttggggatcagggccgaccgggccaggatggaagagctggtacaggcagaggaggcccaggaggagagagggagcagcagggatccagtggctgagctgccctcagatggagaggctgaaggcactgccgacttggaggcaactccagaggccaggcctgaggaggagctcacaggggaggagagtgaggcggcccagactagctgtggcctactgggcgtggaatggggtggcctcacacacagcgtcaccaaaggccagggacctgagctgatggggggtgcccagaccccaactaagcaacccgaggaaagggaggcaggggaggtggagctcatgggagttctggccctgagcaaagaggagcaggagaggagcctggaggcaggtcccaggcacgcggggtctgtaaagcctgaggcctccgaggccttcccaggagcctgggaaaaccgcacgagaaaggacatggagagaggaaatactcaggaggatgcggccgatggcgagcagcgggaggaggaggagactgcgggaggccagaccctggcggctgaggctgaaggagaccgagagtctgaactatcagaagtcccagaggcaggcggggaggggctgacaacccaggacgcgggatgtggaactgaggagggagaggcgtctgtctcagagaaccaggagctggacggaagcacaggggcagacgcagggccttgcccgtcactgggagaggcctatgccagagaaactgaggatgaggaggcggaggctgacagaacatccagaagaggctggaggctgcaagcggtggctgtgggcctcccggaccgtgaggatgcacagactggctctgtggctgctgggattatggggggtgatgtggtcccacacatcagcgctgctggcgctggtgaagctttggaaggggcgcttgggcaaggctgggactcgaaagaaaaggaagaggcagcagcaggagagcatgcaggtgggcaagaatttggtctggagggctcagcagaggaagaggtgactggcagaggcagccaagtagaggcttttgagtccagggagggaggaccttggggagggcgggtagaggccgaggaatctgcaggcgcagaggacagctgtgggctggatcccgcgggctcccagacagcgagggcagaggggatgggagccatggtggaggctggggggcttctagaaaagtggacgctgttggaagaagaggctgttggatggcaggagagagaacagagggaagacagtgaggggcggtgtggggactaccaccctgagggagaggcaccaaggctccttgatgcagagggtctcatggtgaccgggggccggagggcagaggccaaggagactgagccagaaagcctggaacatgtcaggggccaggaggagcagccaacacaccaggcccctgcagaagctgcgccggagtcagtcggggaagccgagacggctgaggccatgggcagtgccagaggaggtgctgccaacagctggagcgaggtgagggctcttggtggggtctcggggggaacgagtggaatcccgaagccggccccatggtcctctgtgccccctttcctgcaggccccgctccccgggtccctcctagacgtctctgtcccaaggagtcgcgtgcacctctcgagaagctcctcacagcgtcgctcccggccctcttttcgtcggactccggcctgggagcagcaggaggagcccccagcccccaaccctcctgaggaggagctgtcagctcctgagcagagacccctccagctggaggaacccctggagccaagccctctgaggcatgatgggaccccggtgccagccaggagaaggcccctgggacacgggtaggcacagggcaactcagctggggtggggaagagaccgcgggcacctgggaacctgttctcacgggcctgacttccgcctccaggtttggcctcgcgcaccctggcatgatgcaggagctgcaagcccgtctgggccggcctaagccccagtgactgagacccggtgctctgggagccaggccctgagtgggtgccagaaggcttgctccaatgccactgagccctgctccctctgccactgtggacacatcctctccaccctctgggcctcagtgtcttgatgtatcattcatggagcaggcaaaaccagacgtctgggaagaccgtgaacttaaggagtctgattctccgacacaggctggtggaccacgtaccccactgagaccacctctcagggtgcctgccctggttcctccccagcctgagtcagctgtctggactgcaaggaggctgggcacgggggctcacgcctgtcaccccagagctttgggaggccaaggtgggaggatcgcttgagaccaggagttcgagaccagcctgggcagcatagcaagatccccatcttttaaaaacaaaataaaacaataaagactgcaaggaagactgagggaacagcgaccattttccttacaggccttcctctctaactcccacttcccagcccaactccctgcaccaagaccctcagaactgggcggggataacacaaacctctggagttgcatccaggccaaaggaaggcggttgggagggcttaaggagcactgttcagaatcagagatgagctgccttgagcttccaacacggtagctcggcctcaggatgctgctggttactatggcaactgcctgccggagcaggacgtagtaggggaaggtgggccagagaccccaaaaatgtaggagcagagaggggttcaggatggctagaggttgctgaccccgttccaggctgccctgccctctgggtgtcagacagcccttacccgaagagaagcggaggccaggggtggatgagagtgctttattgggcacccagcatgggggcttggcccgaggaggaccatcgggccccaagacaataaataaaccatcatctccctaaacaataaataaatatccaagaaataaatagctggcgaggaccagaggggctttcagttactgggtagggcctggggcagggggctggaagagccctcccttgtccaaggctgatgatgcgaaggctgccctgatgccaagactccagtcctaaagttctaaagggtggggggcagggggctaagaagccaccgatcagggctgggggctcaatgttgggaaccccaagggccagactgagtgcccagccttggacagcagcagcaactcccgcacggcccgagataagacgagctccaaggagtgcagcaggcggtaggtggagaggagctggggccaggacacctgggccgggccctgtaaggcgctgcccagtgcccctgggagcagccccttcctctcctcctcctcctcctcctcttcctcctcctcctcctccgggaggttgaatcctgcagccagcacctgtgaggagaggccatgggtcagggaggggccaggccgagaacctgagaggaatcctcattccctattcatgcccagcggttcccaatgacatcagtgaccacaaggtcatgatttccccggacattccctgcttgatcttccatgatgtcacctgctaacgcgtctcacctgatctttcagttcgagaaaatggaagtcaaggagcaagaggatgctcacagagctagatcaccccaaggactgccccgaggcgtggggttcaggaagtttctctctgctgtgaaagttgcttttgggtcgggtcagcaacaggcagagggtgacatagctcagattccctgctgcttgccattcctctctctctctctttcttgggagccccgctctgtcgcccaggctggagtgcagtggggtgatcacggctcactgcaacctctgtctccccagttcaagcaattctcctacctcagcctcctgagtagctgggactacagacgcgcaccaccacgcccgactaatttttgtatttttagtagagatggggttttaccatgttggccaggctggtctcgaactcctgacctcaaatgatccacccgctttggcctcctaaagtgctgggattccaggcgtgagccaccacgcccagccctgctgcttgcattttctattctcatttcattaagtgtaaaattctgatttccctttgaaaggttctggaggatctgggtgacatcagagaatcagagggagaaaggaaacaggaggcagacgctgtgctgggcactcaggacacaccccgagtgacctcacagcccaatggcctcctgttgaagatagagccccaggagaatgtgaagattgaggggcagcaccagggcctggtgtggctgtgtgtgcgcctgcacacacgcacacactcacacacatactcattctcacaacgcacccacactcattcccatacagtcacattcacacaaaacacattcatggctgggcacagtggctcacgcctgtaatcccagcactttgggaagccgaggcgggcagagcgcgaggtcaggagtctgagaccagcctggccaacatggtgaaactaaaaatacaaaaaaattagccaggcctgatggtgcacgcctgtagtcctagctactcaggaggctgaggcaggagaattgcttgaacctgggaggcagatgttacagtgagctgagatcgcaccgctgcactccagcctgggcgacagagtgagacttagtctcagaaaaaaaaaaaagtcgttcacgtacccacatactctcacactcacactcatcctcacacactgacatacctatacccaaactctcacccacacacctcactttcacactcacaacactcacattcacacacccacccacacactcccacactcttacactcacagtcccatacactcacagtctcacactcatggacctacacacacacggtcacgctcacactcatacagacccacacacactcacagtcacacccacacactcacacactcacagtcacacactttcacactcagacccacacactcacagtcacactcacacacggacgcacatacacacagtcatgctcacactcatacagcccccccccacacacacagtcacacccacacactctcacagtcaggtacactcacacagacccacacactcactctcacactcacggacccacaccctcacacacagtcatgctcacactcatacagacccacatgcactcacagtcactcccacacactctcacactcacagacccacactcacacactcacagtcacactgtcacactcatggacccacacagtcacactcactctcccacactcacggacccacacagtcactctcacactcatgaacccacacactcatggacactcagtcacactcacactctcacactcacacacactcagagcatgggatcactgaatgagccagcgagtcttctttcccacgtggtctggggtggtggagggtggccgggctctacctggaagcggaggtgccgctgcagatcgcggaggtccagcctcatggcccacagctgcatcctctccatgttggtccagcggccctgggtccccagccctcccagcggggcatggaagggctgaagcgtggtggagatgaagcagagacgctccgggtcctgaaggggagggagatggtcaggaaaggtccacaggccaaggatggccatatcacacccaccccctccctatctgggtctccttcccattccacgctccagcctccagtccatccctgtagctcttcccccacctcagcccagctgtgtccccattccttccatctccactgtctgggacatttgtcccatctccttttccagcctccctttcactcctatgccaatgatcttctctaacccaccccctctcagtccctgaagcactctccatccacagccctgttcccttccctcttccaccatcccatcatacctcctgcccatgtgtttccatcccatcttcagcctcattcccattcctaaccccaactccatccttcctccatgtgcccagactcactctttccatctttccatcccatctccaacctcattcctaaccctattccattcccttccccaccagcaatccccatcccttctccatcccatgcttaacgttcaccctcatcatcaccttctcatctctaactatccgcattctcacccccagtgccacctccacccaccctccatgctgctgtgatctgtctccagcctcattccagtcccatgcctgccgcgttccatgcctagctccactcttacctcttcccaaccccacttccttattccagcttcatctttattgttggtttgttttgagatggagtctcgctctgttgcccaggctggagtgcagtggcgcgatctcatctcactgcaacctccacctcctgggttcaagtaattctcctgcctcagcctcccgagtagctgggattacaggcgcacagcaccatacccggctaatttggtatttttagtagaggtggggtttcttcatgttggtcaggctggtctcgaactcctgacctcaggtgatccacccacatcagcctcccacagtgctgggattacagtcgtgagccactgcgctcagctaatttttgtattttttagtagagatggggtttcgccatgttggccaggctggtcttgaactcttgacctcaggtgatccgtgctcctcagcctcccaacgtgctgggattacaggcatgagccaccacgcctggcagtttatttatttttctgagacagggtttccctctgttctccatcctggagtccaggatcataactcactgcagcctccaactcctgagctcaagcaatcctcccatgtcagcctcctgagtagctgggaccaaaggtgtacaccaccatgcctggctaactcttaaatttttttttgtagagacaaagtttcactatgttgcccagactggtcttgaactcctggcctcaagcagtccttccacctgggcctcccaaagtgctgggtttataggtttaagtcaccatgcctgtctttcatctctatgtccaatgacatattcagccttatccaggttctatccccaatgcatctccagctcaatctccagcctcatcttgcaccctggccccagcctatcacaagctt

SEQ ID NO: 61707 - DNA, 3429 bp, Homo Sapiens
tttttttttttttttttctatgctacattttaaattacattcttcaagtcatattttgggtgtcggttccacttgctctgatacacgctatttcacttcaatgaagtaaatgatgccaaccctgagggaagacctcttcttattctgcccagcatctgggactttgaaaccagcccagaactccaacaggaaaccccagtccagaaaacaaataataaagagaatccaagctcccattttactcctaacaaggcattttgttaattttaactattctagtccataagagaagtagattagaataatggaaacgctagttggtttttcccccaaagtgagaacagagaaaactagtctacatattaaccccacttattcaaactccccaagatatgtctagctctgcagctgccatttatggtgtgctccaaccacatgcaggcattgcactccagggcaccttcaattagttagtccttatgatgacacagtaagagggatttttttaaatttcaacttctcagatggggaaccaaggctcagtatggcaaaataacttatgaaagggccagacagctaaaaaataactgaactaagatttgaacacatagcctagcactagagcctgtgtctgtaaccactacactccattagacaaacactggtctccattttaggtaacagaataacatcacgtgcatagctcatttaatctcacaggagctctctgtggagtatactattatttaacagaggaagataaaaagagatgcaactggatggaataatttacctaggtacatacagctaggaaatggcagaactaggattttaagtgagaccctaaattgtgggtcagcaaacattctccagtactatggcccaatatgctcccctgaaatacactccacctttgggctggtagataggatcgatgtgaaaaaaaatgaaggaactgagaggaagaaacaaaaatttccaacattagatcttattcagaagtggctcccctcatgtcatatgtccttcctctaagcattgtcaaaatattgtcccaaaattttgtgtatagccttctcacaagtaacaaagtgtcaggaaaaaccacctataacccaaggacctgttctacaatgaaatggcagagtcatagatacaactgatgtataactgcccgccacctccccgccaccacccgcaaatgaaagaaagagaacaaaaggaaaccaaatcaaatgtccaacagaaggaacatagttaaccaaattatggtttaaactggtgatcctcaattgggagttagaagggggttgatattaggagctgtgtgggagcatttttggttgtcacaacgacctgggaggcatcctgcaaaataaataccctgcaagctatgacacacacaaaaagaactgttacatctctaatagtgatgacgtcctcatggagaaagacagtaattaattatgaagccctacatgggtgggacatgtcacctgaaagatactgaacatgccctggcacagagtaggcacctaataatatctgtgtaatgactggatgatctattacaccgttcataaaagataatatggcaatatgaaaatagttacgttaggaaaagaaagtaggataaaaagttataagcacaagataattgcaactatatatttatttaaattccaaaaaagactagaaggaaatacacttagatgttttattgtttcacaatagcacgagaattagtggcttttctctctgtggcttaagcatagtataattgatcatgaaacagtaaaaaacctaaaccacatttaactggccaaaagaggactagaaaagaagagtagagtgcaaccactcctgaataaatgtgatcaagagaaaagaacaagaaggtttttgaagaaagataaattatgactgtcacctgggtatttctagacagatttctgaccctcatctccaaattctgagtaccctagttcaggggtccccagtccccgggccacagactggtttccgtggcctgttagaagccaggctgcacagcaggaggtcagcgtcaggcaagcaagtgaagcttcatctgtgtttacagccgctgcccacagctcacatcaccacctgagctctgcctcctgtcacataagcagtggcattagcttctcatagaagcgtaaaccctattgtgaactgcacatgtgagggatcaaagttgtgcactccttatgagaatctaatgcctgatgatctgtcactgtctcccatcaaccccagatgggaccatctagttgcaggaaaacaagctcagggctcccactgattctatattatggtgagttgtataattacttcattatataatacaaggtaataataatgaaaataaagtgcagaataaatgttatgtgcttgaatcatcctgaaaccatcccttcctctggtccatggaaaaaccgtctcccatgattctggtccctggtgccaacaaggctggagaactgctgtagtttacaggccctgcccactgaagccttcctcatggagtttcccatctctgttatgcacactgccatccgctgtgtcaggcaagctcaagtctgaagtcatgattttctcttctccatcctatggctcccacctgcaggcagccctcacatcctctcagccctcactacaattcctattccatctcaccttcccccctgcttctatttccaatgccatcccccaacccaagaccctccctctctcctggatgctaaccccatgccgtcctataatttcctatcatgtgcaaggaacacccaagcatttttattaagcaggctaagatgctcaaactccacgattaaaatgctcagtggaagaaggagcaactataattttttaagaagtaatgattagcacagaaaatacgtttggtctcaaatattcccaccaaaatatacctccatggcaatcggggaaagggagagggtggtaaatgtcaacccatgagaaaggaagggtctggaggcacaaatcaaaggggacctaagtaggcaggaagtatcactgaaaaccttcaaaatcttgcattatacaacagcattaatttggccatttaaaatgtaaaaatgggccaggcgcagtgactcacgcctgcaatcccagcactttgggagggtgaggtgggcagatcacttgaggtcaggagttcgagaccagcctggccaacatggtgaaactccatctctactaataatacaaaaattagctggtgtggtgctgtgcacctgtaatcccagctactcaggaggctgaagtaggaggggatagtttgaatcctggaggtggaggttgccatgagctgagatcatgccactacactgcatcaagcctgggtgacagagccagacgttggtctaaaaaaaaaaaaaaaaa

SEQ ID NO: 61708 - DNA, 495 bp, Homo Sapiens
ttcacgcttagaaatgtaatcgggggatctagaaattctacacaatgagaagctcaaaaacagccccaaagctgccaacaaccagagccgactggggcccaccccagccatcctgagatttctccctggccagcctggctgcttccttcacttcctggaacttctcggcaaactgtgtcagatgctgttcagaggcaaagcccaggccatagactgtgttggcgcgactgtcggcccactgcccgaacttctgggaagttttggtgaaggtcatgttgggagtgacagtgctgttgatgatggccttggcgcctccgatgctgatgatgcggtacacattgcgggtggcatcgtagaaataggagacagtgagtgcgtgcttgcccgctgggatccagtttcgcttggtggctgggtcaatttggaacacgtgcgcccgtgtgctgaagattggctgctccctggctgtggacattggtcaggctgggatgggca

SEQ ID NO: 61709 - DNA, 1561 bp, Homo Sapiens
gcgcggcgctgctgggttctccgaggcgacctggccgccggccgctcctccgcgcgctgttccgcacttgctgccctcgcccggcccggagcgccgctgccatgcggctggcgctgctctgggccctggggctcctgggcgcgggcagccctctgccttcctggccgctcccaaatataggtggcactgaggagcagcaggcagagtcagagaaggccccgagggagcccttggagccccaggtccttcaggacgatctcccaattagcctcaaaaaggtgcttcagaccagtctgcctgagcccctgaggatcaagttggagctggacggtgacagtcatatcctggagctgccacagaatagggagttggtcccaggccgcccaaccctggtgtggtaccagcccgatggcactcgggtggtcagtgagggacacactttggagaactgctgctaccagggaagagtgcggggatatgcaggctcctgggtgtccatctgcacctgctctgggctcagaggcttggtggtcctgaccccagagagaagctataccctggagcaggggcctggggaccttcagggtcctcccattatttcgcgaatccaagatctccacctgccaggccacacctgtgccctgagctggcgggaatctgtacacactcagacgccaccagagcaccccctgggacagcgccacattcgccggaggcgggatgtggtaacagagaccaagactgtggagttggtgattgtggctgatcactcggaggcccagaaataccgggacttccagcacctgctaaaccgcacactggaagtggccctcttgctggacacattcttccggcccctgaatgtacgagtggcactagtgggcctggaggcctggacccagcgtgacctggtggagatcagcccaaacccagctgtcaccctcgaaaacttcctccactggcgcagggcacatttgctgcctcgattgccccatgacagtgcccagctggtgactggtacttcattctctgggcctacggtgggcatggccattcagaactccatctgttctcctgacttctcaggaggtgtgaacatggaccactccaccagcatcctgggagtcgcctcctccatagcccatgagttgggccacagcctgggcctggaccatgatttgcctggaatcccgcccctagtggtaccctccagaccagcgccaccgcctccgacagtgtcctcgctctacctctgacctctccggaggttccgctgcctccaagccggacttagggcttcaagaggcgggcgtgccctctggagtcccctaccatgactgaaggcgccagagactggcggtgtcttaagactccgggcaccgccacgcgctgtcaagcaacactctgcggacctgccggcgtagttgcagcgggggcttggggaggggctgggggttggacgggattgaggaaggtccgcacagcctgtctctgctcagttgcaataaacgtgacatcttgggagcgttaaaaaaaaaaaaaaaaaaaaaaaaaaaaaaaa

SEQ ID NO: 61710 - DNA, 685 bp, Homo Sapiens
  misc_feature (493)..(493): n is a, c, g, or t
gtcagaagaggagcagagcagcagctccgtgaagaaagatgagactaatgtgaagatggagtctgaggggggtgcagatgactctgctgaggagggggacctactggatgatgatgataatgaagatcggggggatgaccagctggagttgatcaaggatgatgaaaaagaggctgaggaaggagaggatgacagagacagcgccaatggcgaggatgactcttaagcacatagtggggtttagaaatcttatcccattatttctttacctaggcgcttgtctaagatcaaatttttcaccagatcctctcccctagtatcttcagcacatgctcactgttctccccatccttgtccttcccatgttcattaattcatattgccccgcgcctagtcccattttcacttcctttgacgctcctagtagttttgttaagtcttaccctgtaatttttgcttttaattttgatacctctttatgacttaacaatanaaaggatgtatggtttttatcaactgtcttccagtagttgcttcctaactgcaagggcatctcattaattgagtagctcttgaaagagctttgagttagaaatatgtgtgttacaccctcacattagtgtgctgcgtggggaagttaacacaaatgttacaatgtatttttgtgaatgaaagttggatgtca

SEQ ID NO: 61711 - DNA, 1797 bp, Homo Sapiens
gaatgtgagtatagaagacgagtccaggcaccaggagcataatagcggtcagagaaccaagtccaggaccccaggcagattagctagagttcaggcagggtgtcagcgccagtggggaagaaagaaaccaaggagctggaataccgtctgtaagttgagacagaaggatagccatatggcctggaaaaagatgacaagtttgaggaaatagtttgcatgtcagagggaacactcgagggaccctggccagagggagggatatatccagacaccccatgtctgagtcaggataggctcaaaggttgcccagcactggacatcttcaaagatttttattactgtttattgcgtcaggtgaaatcaacaacagctaagaaaaaggagaaacacattacaatgtaactagtataaacagtggaaaatcactgtggtttgaagaaacaagtttaactaaagaaatctgaggtctgtgtctcctaaagagaggtgactgtggaacagtaacacagaatatcagatttcaatcttcatgtttctccttttgatgggcacacaatccaaattcgagattttaaggtcctgcacaatttcgtttcacccacgtgtccttccttattccccggcccctttcatgagacgtgctcccttcctcctccagtgccttaatgcagcttctccagcttccgcagctctttactccaatcccagccatctgggctcacttcagatcacaccttccctatggagatgacaaaatctgctctactgtaatgatgctggcaaagcttaattgttcttcacttatttcatggctgtttgttttatcttcccagctaaataaattgcagttcttttgaaagaaaggatcggctgggtatggtggctcatgcctgtaatcccagcactttgggaggccagagcaggcaagtaacttgagcccaggagtttgagaccagcctgggttgcatggtgaaaccccatctctacaaaaaatacaaaaattagccagacatggtggcgtgtacaagtagtttcagctacttggaggctgaggtgggaggatcacttgagcctgggaggcagaggctgcagtgagccgagatgtgcaactgcactccagcctgggtgacagagtgagatcctgtctcaaaaaaaaaaaaaaaaaaaaaaaaaagatcatgtcaaaagttcccttgtttcctttatatctttcacagtgctcagaaaagagctggtcaccaggtggctgctaggtaaacagaaatcgattgattgactcagcctgagtatatgtattcaaattcacatttcctgaattagcagacatggtcttgtttttaaaattgactttataagatctcgtgttttcttatatctgatggtgatgaaaatgaatagggctgggggagagagatgttcagccaagaaagtctaaaatagaaagggaatgttcagttataacaaaacaaatttttgtaattagagtgctgggttgtgctcagcatcattggagttaaatgtggagcagtggcttacacttgtaatcccagcactttgagaaactgaggtgggcggatcccttgaggtcaggagttcgaggccaccctgggcaacatggtgaaactccatctctacaaaaaatagaaaaattagccggctgtggtggcaggtgcctgtggtcccagctaaggaggctaaggtgggagaatctcttgaaccctggaggcagaggttgcagtgagctgagatcacgccactgcactccagcctgggcaacagagcgagagaccctttctc

SEQ ID NO: 61712 - DNA, 2503 bp, Homo Sapiens
cgatattgctggaggaaaagcatctcagcccagtgttgtcattagtcaagtgattgacatgagggatgaagaattttctgtgagttcagtcttggcttctgatgttatccatgcaagtcggaaagatataccctgtatatttagggtcacagcttcccagctctcagcatctaataacaaatgttcaatcctgatgctagcagacactgagaatgagaagaataagtgggtgggagtgctgagtgaattgcacaagattttgaagaaaaacaaattcagagaccgctcagtctatgttcccaaagaggcttatgacagcactctacccctcattaaaacaacccaggcagccgcaatcatagatcatgaaagaattgctttgggaaacgaagaagggttatttgttgtacatgtcaccaaagatgaaattattagagttggtgacaataagaagattcatcagattgaactcattccaaatgatcagcttgttgctgtgatctcaggacgaaatcgtcatgtacgactttttcctatgtcagcattggatgggcgagagaccgatttttacaagctgcagaaactaaagggtgtcaaaccataacttctggaaaggtgcgccatggagctctcacatgcctgtgtgtggctatgaaaaggcaggtcctctgttatgaactatttcagagcaagaccgtcacagaaaatttaaggaaattcaagtcccatataatgtccagtggatggcaatcttcagtgaacaactctgtgtgggattccagtcaggatttctaagataccccttgaatggagaaggaaatccatacagtatgctccattcaaatgaccatacactatcatttattgcacatcaaccaatggatgctatctgcgcagttgagatctccagtaaagaatatctgctgtgttttaacagcattgggatatacactgactgccagggccgaagatctagacaacaggaattgatgtggccagcaaatccttcctcttgttgttacaatgcaccatatctctcggtgtacagtgaaaatgcagttgatatctttgatgtgaactccatggaatggattcagactcttcctctcaaaaaggttcgacccttaaacaatgaaggatcattaaatcttttagggttggagaccattagattaatatatttcaaaaataagatggcagaaggggacgaactggtagtacctgaaacatcagataatagtcggaaacaaatggttagaaacattaacaataagcggcgttattccttcagagtcccagaagaggaaaggatgcagcagaggagggaaatgctacgagatccagaaatgagaaataaattaatttctaatccaactaattttaatcacatagcacacatgggtcctggagatggaatacagatcctgaaagatctgcccatgaaccctcggcctcaggaaagtcggacagtattcagtggctcagtcagtattccatctatcaccaaatcccgccctgagccaggccgctccatgagtgctagcagtggcttgtcagcaagtaagtgccggggctacaggaaggtgcctctgagacagggtgacccccagctccctcccctcctgtcccgtgggtgacatgtccttcacttacgtgtgcccattgcattctcaaggggctgcagtgtctcagaccctgctgggtaatgcctaataggcacaaatgcagttgttaagaaaatagtcccagagtccttctagagtgtacaggccatctgggagacagacaaatatgattacaaattgtgatgataaaggctctgaaggaagtaaacagcatacattaatagagaataacaaggggtagctgttagggatgaatccctacttggcagaataattaggaaaatcactccctagaggtggagtcatgtttgagtaatgtttggttaactgaaagaaggctagtatggctacatggtagtggtgaggaagtaacaaaaattagagcggggtagcaggtaagggtcagaccagcagggacttgaagaccaaggtaagacattttttactttattcaaaaggaaaaggaagacttttaagtagggaagaattttctttcaatttacattcttaaaacaatcctgcgggctgccaagtggagaatggactagaggcaggaagagtggaagccagcatccagataggagactcctagagtggtcccaatggaaaccaatgagggcttgggatgcagcaggggcagaaggagagaagatggtagattctccagatatattttcagagttaaaagcagtaagacttgatgatgaattagtcatggaaaagtaagggagagagttaaagatgactcccagacttcctgctagggccttagtatgataccatttactcccatttaccaccgtttaagaaggggctgaggcaggacattccacgcatgtccaaaggtcccgaggtagcaaaaaaaaaaaaaaaaaaaa

SEQ ID NO: 61713 - DNA, 622 bp, Homo Sapiens
ttttttagccatatgaaagcatatatttagacatgatctaagttggaaacacaaaggaaaaagattatccaaatcttgatcttgtgtttacagtaacacaaaagcagagcatgaattcaaacacttaatgttcatccctcttatggatgattgttccagtatttccctacaggttacagctgctcctggacatagtttttttttccaaattcagacctccaataactctaggtggcatttagctaaaacagctttcctaccctcttacctttctccctttttgtgcttaacactatgagggccagcacagcctcttcacattctattttctttcatttcttactttcattttactcaaaagaaagaaatctaagaactgacccagtaaataataatcatttttatctagagcatgcagagaataaatggctctgaattgtcatttattaatcatttttctttgttttctagtgataacatactgacaactcagcagtagataggtattagcatatgtggtggtcaatacaagtgatacagagtatggagaatagcagatatatttaggaagtgacccaagaaactctctttaatggagggttgatgttcaatgatcttgagg

SEQ ID NO: 61714 - DNA, 5401 bp, Homo Sapiens
ctgttagtgaaattgagagtaaagcaccaacggttgagtcaggaacaattgccagcaaagagagaacgttatcctctgggcaggaacaagttgttgaaagtgatacactaacaattgagtctggaccacttgctagtgaagataaaccactttcgtgtggtacaaactctggaaaagaacaagaaataaatgagactctgcctatcacaactgtagctcagagttcagttctacttcatcctcaagaagaagcagccaggattagaatgtcagcaaggcagaaacagataatggaaatagaagagcagaagcaaaagcaattggaattacttgaacaaattgaacagcagaaattaagattagaaactgactgcttcagggctcagctggaagaagaaaaaagaaaaaaaactcaaccgactggggtaggatgcagaaaatctcatcactacataaatcatttggttggcattgctccagcatcatgccctgtaatttctgatgaagatagtcataggcagatgattcgtaactatcaacatcagcttttacaacaaaacaggttacacaggcagtctgttgaaacagccaggaaacaattacttgaatatcaaactatgttaaaaggaaggtgcccatcggtgtcagctccatcattgataactgattctgttatatcagtgccatcatggaaatctgagagaccgactgctatatcagagcattgggatcaaggtcagagactcaagttgagtcctaacaaataccaacccatacaacctatacagacctccaaattagaacaagatcattttcaggtagcgagacaaaatcactttccacaaagacaggtggaaacaacagaaacattacgcgcttcagatattttaaccaatcaagctttagaatcacaagaacatctaaggcaattctctcagactgaaacacaacagagagactataaattggtccccaaagattctgagacactttcaagggctttgtcacatgacaggcagctaatatcacaggatgctagaaaaatatctgaaacatttggggcaacaacttttcaaagtttagaatcccaacaattgttctcagagaatagtgaaaatatatcttaccatttaactgaaccttcttcatttgtaccactggtacctcagcattcttttagttctctgcctgttaaagttgagtcaggaaaaattcaagaacccttttcagccatgagcaaaagtacagtttccacaagccattctataatcagccaaatgcatgataggcctttgctgccgtcagagaatatcacagcccagcaaggtaatatgaaggccctccaagaacagttagacctacagaagaaagttcttcaggcaactcaggaagctcaggaacagttgcttttgtgcaaacagaaagaagtggaacagcaaacgggcctctcggtattccttcccttggtaactccagattcatctgctttattgccttctgccaaagcagatttggggagaatccaggaatcttcaccaaccaagaataatattgcagtttcctcagaccatcatgtgatctcacaacttcaggataagcgtttgagtctttcacagcctatcctatcacagcaaaataattttaaatttctccaagagcagttgaatattcagaaggatagccttcaggctaggcgagaagcccaggaagtattgtatgtacataaacagagtgaattggatagaagagtatgttccgaacaggctgagccctctttcccatttcaggtagctcagcatacatttacttcactaccatctgctgatacaaaatctggaaaaatacaggagcaacattcatctaagagcgagaaaggacttgtttcatgccaatctgacatccccatatctcaggatgggtctttgagtttcctacagcagttcctacctctacatgatagtttgaagttgctccaagaacagttgactaaacagagggatactcttcaggctaggcatgaagctcaggtggaattacttttacatagacaaagagatttgggggacagtaagtctgggctggtgagctcttcatcctcaccagtggttgttcagcattcagttgcttcacaagcttctgctaaagctgagcctaggagaattcaggagctttatttatctgagaaggagaatgtaggtccctcctgtcatttgataatcccaacatttcaggataagtctcttagttttccacagcatagcctggcacagcaagaaaatttgacaatactccaagaacagtcacaaatacaaagggtaatacttggtgctaaagaaggaactcaggaatttgtacacacagaaagtgaattggagaaaagaatttcttctgaacagactggcacctcctcatccctttcccaggtggatgaatctgagagattccaggaatgtatatcaatcaagagtgacagtaccattcccttaagccatcctaagatcccaagatgtcaggaaagacttttgagagtttcacaacatatgctacctctacaagataatttggaggaacaccaagcatggctagacactgagaaagaagcctttcatttcagccagaaaacccaagaaaatacatcttctgaacaaactggttcatcttcattcataccccagttggtacagctttcatttacttcgttagcttcagctgagtctggcacaatcctggaacctctttttacagagagtgaaagtaaaattttttcaagccaccttcagatcccacaattgcaggataggcttttgaggatatcgcaacttatccagcctcaacaagataatttgaaggcacttcaagaacagttagctacacagagagaagccatcattctagctagacaagaagctcgggaagaattacttttacatcagagtgaatgggagggaagaatatctcccgagcaggttgacacctcttccttacccctagtaccacagcattcattcgcctcattacctcttaatgaatctgaaagaaaccaagaaccatgttcaattaacagtgataatatagtatcctcaggtcactcagagataccaacattgcctgatgggctgttgggtttatcacatcttgttttacctcaacaagataatttgattgcacttgaagaacacttgcatgcacagacagatttccttccttctattgagaaaacccagaaagaattggttttgtcaaaaccatgtaaatttgaggaaaaggtatcttctgagcattttatccagtctcaccatggtgatttgcaggcacttcaacagcagttagatacacagaagaaagccattcgatctatacaggaagtccaagaagaattgcttttgcaaagattaagtgaattggagaaaagggtatcatctgaacaagtttgctcctcttcatttgtatcccaggtgcctgttgctgactctgaaagaacccagaagtctttcccaaccaaaagtaatgatactcttccctcaagtcatcgtgagattccaagattacaggatagacttttgagtttatcaaagcctattctgcctcagcaagataatatgacagcacaattggatgcacaaagggaagtgatgtattcttatgagaaaccccaggaagaactgtctttaaacaaacaaagaaagttgaacaaaagtgaatctgctgagcatactatcccctctttgtttctacccaaggaaacagagcattcgtttattccactaccttttgcagaagctaaacctaaaagcacttgtgaattgtattcatcccagaatgaacatgcagcccccccaagtaatcctgtgatcccagggtttcaagatagacttttgagtttttcacagtctgtcttaactcagcaagataacttgggacttcagaaacagttggatctacaaagagaagttctgcattatagccagaaagcccaggaaaaattgcttgtacagagacaaacagcattgcagcagcagatacagaaacatgaagagactttgaaggatttctttaaagacagtcagataagtaagcccacagttgaaaatgatttaaaaacccagaagatggggcagctcagagactggtttcctaatacacaagacctagcaggaaatgatcaagaaaatattaggcatgcagataggaacaactctgatgataatcatttggcttcagaagatactagtgccaagcaaagtggtgagcatctggagaaagatctggggagaagatcctcaaagccacctgtagcaaaagtcaaatgtggtttggacttaaaccagcatgaacttagtgctatacaagaagtagagtcaccagcaattggcagaacttctatactaggtaaaccaggtatttatgaagacagagaccccctgcgagtctcaataagccgagaacaaagtttctttgggagcccactggcccatgatccgtttagttgtcttcaactggttggccaagagaatgtctgtggtgatgactatgatgaagcaggtgagaaataaatggaaagtggaattgtatgcacaaggatatgtggacaaaagatatttattattttgttatttgtaatggtgaaaaatggtaaataaacttagttactgctgttaatggaatcgttatgatgcagttaactatattgttctatgcagttgttaaatgagtaattttgcttttaaattgttttattaaatgccagtaagaagtttatcaaggtaggagttttatacaattggcagcatccataaattttatgtttaagcctatttgtaacaatccatatctaattaaatactgttaaatattttaaaaattctatctgtgggcattctaaataagctgttttatgtttatttttaaatatttggaaaaataaagataattagaaggaaaaatatttaaatcacttaatcctaacacccaaagacagccaatgttaatcttctcgcttctgaatttatatatgtatatatatatagcacaggatattttatatataatttgtgtactgatcctacaaagtatagttgtagtactattttattagttgtaaggcatcttttaagaagttacattttggccgggtgcagtggctcacgtctgtgatcctagcactttgggaggccaagactggcagatcatgaggtcagaagattgagaccacggctaacaccgtgaaaccctgtctatactaaaagtacaaaaaattggccgggtgtagtggtggtcacctgtagtcctgtagggaggcaggagaatggcgtgaacctgggaggtggagcttgcagtgagccgagatcaagccactgcactccagcctgggcgacagagcgagactccgagactccatctg

SEQ ID NO: 61715 - DNA, 3601 bp, Homo Sapiens; identical to SEQ ID NO: 24380

SEQ ID NO: 61716 - DNA, 1516 bp, Homo Sapiens
taacatttgaggaaaaatctaaaggaagagtaggagcaagccatgcagctatctagggaaagagcgtaccagaaaagaacgtctaagggtgaagagccagagggaggcatacacttaacatctgaagaacagagcagaaaggccagcatggatgaagtgagtgagcaggggaagagtaagagatgaagtctgaggtttgatctaaggagctgagatctggaaagtcattgtaatgacactgagttttactttgcatgaggtaggaagctattagaaggtttggagcagaagagtgctgcataatgtgaatcagtctggccgcgatgttgaaactaacatcacagttgttagttggggaggggaggttgtaggcaaaggcagaagcaggaagctctgttagaaaactgtggcaataatcttctaggtaaaaggtagtggtgattcaaagcaagatggtagcattggagaggatgagatatggtcagatgaggatatattttaaaagttgagctaacaggatttgctgaggaatcagaagtgaaccaaagactacaaagtttttgatctgaacaattcaaagcatgaagtttttatttactgtaatgaaagtgaaccagaccataggagaggctattgaagtgtgtggagggcggagagggggttcagatagagaggggataacaagaaatgtttgagatgcctgttaggcaccagaatagacataaaaagggagccggcaatacaacctggagttgagatgagagttttggagtcatcagcatataggtgggatttaaaggcatgagaaaggctgagaggtgagatctcaataggagcacaagtagatgaaaaagagaagctgtccaagaattggaccttgggtaccccactgttgagacgctggagtgctagcgaagaaccagcagaggaagttgaggaggcagccaacagaataggaaggtagctaagaaagggtgttgtcccagaagtcaagggaagtgttttaagagaagtgtgtcttcatctgtgtcaaatgctgttgataggttaaattagctcaagacagagaactggctactggtgggcttgacgagaggcctgaaatgctttggtttgcattcctttatctttcatacacaacttacctaaagtaggaatacgcttcaaatgtatatatttgggaataagttcctcactcctcaagtctacggtagggtttgatgtcatcagggcaaaacaaaaatgcaattagagtatttttagtgtgctatatgaaaggccaaattggcagcctctcttttctcaaggtcagtatcaacatgcataaatcatgttgacagtatgtctatgtgcccttgacatgatgtgatgaaaatggcacgttaccaaaacctattacctcaatctaatcatgagaaagacatcagaaagattccaatagagatacattctgtgaaatacctgatcagtactcatccaaactgtcaaagccatcaaaaaaaaaaaaaaaaaaaaa

SEQ ID NO: 61717 - DNA, 1556 bp, Homo Sapiens
gtagttgcgagcgagagtgagtggggccgggacccgcagagccgagccgacccttctctcccgggctgcggcagggcagggcggggagctccgcgcaccaacagagccggttctcagggcgctttgctccttgttttttccccggttctgttttctccccttctccggaaggcttgtcaaggggtaggagaaagagacgcaaacacaaaagtggaaaacagttaatgaccagccacggcgtccctgctgtgagctctggccgctgccttccagggctcccgagccacacgctgggggtgctggctgagggaacatggcttgttggccccagctgaggttgctgctgtggaagaacctcactttcagaagaagacaaacatgtcagctgctgctggaagtggcctggcctctatttatcttcctgatcctgatctctgttcggctgagctacccaccctatgaacaacatgaatgccattttccaaataaagccatgccctctgcaggaacacttccttgggttcaggggattatctgtaatgccaacaacccctgtttccgttacccgactcctggggaggctcccggagttgttggaaactttaacaaatccattgtggctcgcctgttctcagatgctcggaggcttcttttatacagccagaaagacaccagcatgaaggacatgcgcaaagttctgagaacattacagcagatcaagaaatccagctcaaacttgaagcttcaagatttcctggtggacaatgaaaccttctctgggttcctatatcacaacctctctctcccaaagtctactgtggacaagatgctgagggctgatgtcattctccacaaggtatttttgcaaggctaccagttacatttgacaagtctgtgcaatggatcaaaatcagaagagatgattcaacttggtgaccaagaagtttctgagctttgtggcctaccaaaggagaaactggctgcagcagagcgagtacttcgttccaacatggacatcctgaagccaatcctgatggatgtggcatgtgatgacattgcacatgggcagttaactgtgccaagaagtgcagcagtagcagcaaccggagatgcaaagcccaacatgatggggagagaaactcttctttcaatatgtgcttctgtaccaaaagtggaatttcacgagagacatattttggaacatttttccttttgtgtgtgcgtgagtgtttccctgtttccagccaagggtattgtgagtttctcctgggcctccttcagaatctgggtgctctggaaagcagtgttttggcaacatggggaaagtatggcagtgtgggagggtcagctgggtctgggtttgaatattgcatttgaatattttaccagcattgatgtcggataaattatttagtccctgtaagcctcagttttctcttcttctacatacacataatatatttgactctttgttgtgattattggttacacatatgaagagcctggtgtggggcctggcacacaataggtgctcaataaataaaagttgataattt

SEQ ID NO: 61718 - DNA, 1181 bp, Homo Sapiens
gagaaagaaatgttcaaaagcatttagcaaagaaagtacatgaagtgcagtcagattgctctgggaattcagggatgagagtaactaatttacattttaaaatggtagttcttagaggcccagcaaggaaaggaccatgaaggcagaatgtttcagtgtgtcttgaacagtgagtaggacttataactgatggaaataggggcatttcaggcagaaagaataacttgaagaaaatgaatagggcatgtgcagggaccatgaataggggaatgtcgctgtgtagcacataatacgtgaacaagactgttgtgtactgcagtccaacaggaataaagaaataagactaaaaacttatacagttgactcttgaacaacatgggactgtaggggtccacttagagttttttctaatacattggaaaattttttggagatttgcagcaattggaaaaaactcacagatgaactgtatagcctagaaatatatttttttaattaagaagagttaggcatgtcttgaatgtgtaaaacatgtgtagatacttgtgtattttatcatttactaccacagaatatgcacaaatctattataaaaaattaaaattttatcaaaacttgcctatacaatatgcagatcatacatgaagccattcatagtcaagagaaatgtaaacaaatgtaaagatgcagtattaagtgagagtggcaaaaagttactgtggtatatactatacttctctaataatttcatagccacctcctattgctattgcagtgagttcaggtgctgcaagtatccacttaaaatgccacacattttaatcggcactgatcacctctgtttcagcagtttgtctctgtagtaaattgcctaccacagtaaaaggtaatctcttgtggttctcatgtatttttcatcgtgtttaatgcaatactgtaaactttgaataataccataagactcgtataaagtgatgccactagcactagtgatactggaagtgctcccaagaagaagagaaaagtctgacattacaagaaaaagttgaattgcttggtatgtaccatagattaatgtctgcagctgctattctgccatttcaagaaaaatgaatgatgtctgccatttcaggataaatgaattcagtgtaaggactattgttaaaaaaaaaaaaaaaaaa

SEQ ID NO: 61719 - DNA, 1244 bp, Homo Sapiens
gccgctcctgccgtgcatgttggggagccagtacatgcaggtgggctccacacggagaggggcgccgaccccgtgatagggctttacctggtacatcggggtggcgcgtgccagacaccaacggtcggaaaccgccagacaccaacgctcggaatccacgccaggccacgacggagggcgactacctcccttctgaccctgctgctggcgttcggaaaaaacgcagtccggtgtgctctgattggtccaggctctttgacgtcacggactcgacctttgacagagccactaggcgaaaaggagagacgggaagtattttttccgccccgcccggaaagggtggagcacaacgtcgaaagcagccgttgggagcccaggaggcggggcgcctgtgggagccgtggagggaactttcccagtccccgaggcggatccggtgttgcatccttggagcgagctgagagctcgagtacagaacctgctaaggccatcaaacctattgatcggaagtcagtccatcagatttgctctgggccggtggtaccgagtctaagcactgcggtgaaggagttagtagaaaacagtctggatgctggtgccactaatattgatctaaagcttaaggactatggagtggatctcattgaagtttcaggcaatggatgtggggtagaagaagaaaacttcgaaggcttaactctgaaacatcacacatctaagattcaagagtttgccgacctacctcaggttgaaacttttggctttcggggggaagctctgagctcactttgtgcactgagtgatgtcaccatttctacctgccatgtatcggcgaaggttgggactcgactggtgtttgatcactatgggaaaatcatccagaaaaccccctacccccaccccagagggatgacagtcagtgtgaagcagttattttctacgctacctgtgcaccataaagaatttcaaaggaatattaagaagaaacgtgcctgcttccccttcgccttctgccgtgattgtcagtttcctgaggcctccccagccatgcttcctgtacagcctgcagaactgactcctagaagtaccccaccccacccctgctccttggaggacaacgtgatcactgtattcagctctgtcaagaatggtccaggttcttctagatgatctgcacaaatggctcctctcctccttcctgatgtctgccattagcactggaataaagttcctgctgaaaatcc

SEQ ID NO: 61720 - DNA, 1831 bp, Homo Sapiens
gccaacccactcccacgaaggacaaggacgtggcgggcagcccctctgcttttgtcaggcagtggtaggactttggtgtgggtggtgagaaattgtaaacaaaaactgacattcatacccaaagaaccagcctctcaccccagggtccatgtcccaggccccactccagtgctgcccacactcccagctgctggaggagaggggagatgccaaggtgccctgcaggacctccctccgggccacaccctcagctgcctcttcaggaaccggagctcattactgccttccctcccagggaggccccttcagagaggagaggccacaggagctgcattgtggggggacaggctcaagcaattctgtccccatcaaggggtcatctggagagacccaagaccctatctgttaccagggacccaaaatccaaggggatgcttccctctgccctctttcctgcccctccccatcatacctgcacccaccccagccagggctccctgtccagaattcggttctcctcaggacgccaactcccagagctaaggaccaaggagaagaacagcctctccacccccaagccaggcggttgaggaacatattgagaaaggttcagattgcagaaacccagccctgcccctgcctcctgcatccagcccccaacatggtgccaaagcttccagaagccaaaaagcttctgatttttaaggtagtgggcatctctctcctaatgacgaagctgctcagcaactccacctgcccgccgcaggaaggagcagtcccctgctatccctgcagccactcccagcacacccgcacacagccagcaccaccgcccccaccgtgcacttctcctctctgggccttggcttgggaccaggtacgaaggatccccaagcccttcaggcctgagatcagagccagatcagccttaagtcacctcccatccaagaacttggcctaaaaatactcccctatttctaaccctcaggacggatctgatattaaatgccttccctgggaggaagggtgctttccccctccctagaggtgcccattccataccctgggagactgaggagagcattggctgaagcccagttcctttcccatccatccccaactccaataatcccccactcctcgcaggtctcagtgtcatgctgtcttggggcagggtgaaagggtagtggcagcagggcgcccactctggagatcctcaaaaaaggccctcctctgtggctggcagcctctgacctttccctgggcttcaaaggaaggctatggagtttgctgtgggccctgcaaccttcccagccactcctgctgcactaaggacttaggatccttttataacaaagtccaccccgaattctgtctgcttaaactggaatacacaggagcccttcctggcctggatggtgtctcccagcttccccgcccagcttgcccaccccatagttggtgagatgccaagtttggtctgagttgtgaccccttcagagtagatgcccggcaggctggggttggcccctggagggtcaggggaccatcttcttattccctcttttctcattcctccaacttcctcccctccttcaattatttttttgtaaagttgatgccttactttttggataaatatttttgaagctggtatttctatttcttttggattttttttaatgtaaggttgttttgggggatggagttagaaccttaatgataatttctttcgtttggtgtaggttttagagatttgttttgtggagaggtttttttcttttgatgtaataaaatttaaaatggaaatgaaaaaaaaaaaaaaaaaaaa

SEQ ID NO: 61721 - DNA, 1273 bp, Homo Sapiens
cctgtagccaagtggcctggattcaacctgcagctcaggtcttactgacacttctccccctggtgcctcagtttcttaatctgtgaaatggtgaggacattacagcatttacctctggggcgggtttctcaacagcagcactattaacaatttgggacagagaatctcgtggagtggtctgtcctgtgcattgtgggaggtttgccagttacaccccactcaccccctcccaccaatccccatgtgacaaccgaaaatgtcccaggatttttaggtctcccttgggtctagaagctgcacttaggcattttcccacctgacacttgagttcatctctgctttggtccacgtaaggccactttaaaaaaatgttgtttctttaaagattctaaccatcttttaaacaaatccattttcttcctctatttctgcattcagttaatccttccaaaccctttgtttagtatatcttgaaatgtatcaattcctgttctagtaattaacatatgtgacttgcatgatatctgctatgacccctagtagagctctgattcctttagcacagggaatgtgttctcgattctgctctggatgatgtaaatcaatttattttactttacttgtctgtgatgttgctcctcatctgtaagatgtaaatgtggatatggcttggattactaagtggttttatttcttaattcacctgacatttgttgtgtacctgctgcaagtcaaatacatggcatggtattgtttccttgttcacaccacagcaaatgagaaaatgagacattatagccaggtgtggcggcacaggcttgtggtcctagctactcggaaggctgaggcaggagaattgctccagcccaggagtttgaggttacagtaaggtatgatatcaccattgcatttcaacctgggcaacagaccctgtctctgaaaaaaagggaaaaagaccttgtgagctgtctacgtgtactctatgtctcaggagactcatatcctgtaatttttctaaatggcgtctccatgtggtctttcatgaatgtttgtctggattctctatccttttactttcaacttttctttaccttctactgaaattatgtcttttgtaaacagcccatgattatttatttagttatttatttttacccccctgcactatttgtcttgtaattggagtgtctgagtccattatgtttaatgtaattattgacctcattgggtttaagtctgtccattgtcatttgctgccttctaatattatctc

SEQ ID NO: 61722 - DNA, 2084 bp, Homo Sapiens
ccagctttagctatgatgcagcaagcacagcagccccttaccttcattccttcttccttcccactttcaatcaattcatctattcttttcctttcttcagactgggcagagagaaagaaaaacagcatcagtatcttctcctaggcccatcgtgcgtagcttgatggtcttgagccctgattgcccaggccatgcccaccgggccacaatcggcctcatttggcatcactggggatgatgggtccccagtgatggcaaagcccccaagtatccctccttttctcatcacccatctgttgtggaagatctgtcacctggggttcaactggatcaggagggaaacagtggggacccaagaacagaatggggctcgtagatatgttctgttgcccatgcagcacgttaaaaaatgtccaacttgcccacacctgaaaatcaggcctctgacttcacagaaaatcaggtacagtgggccaggcgcggtggctcacgcctgtaatcgcaacacttcgggaggccgaggcgggcggatcataaggtcacgagttcgagaccagcctggcaaataggtaaaaccctgtctctattaaagatacaaaaattagccaggtgtggtaggagcctgtagtcccagctactcgggaggctgaggcaggagaatcgcttgaacctgggaggtggaggttgcagtgagccaagattgtgctactgcactccagcctgggcgacacagcaagactccaccttaaaaagaaaaaagaaaatcgggtacagcagatcagaggctgtgccctttggatgggacacacgcagtccacatggctctggtctgatggctcatacttctgtttgggatcgctgagattcacctgtatggaggccaccacgatggatgagaagagggcctccaatcccgagggtcaatacagacctgaacagagaactgggagggggcacccctggatccacctctcctctaaggccacccctcctgcacctacctccatccctaaccctgggttctactgctctgccactgcacagatactacagagcaaaagggaaccaaatgaagacagatcggaagctccaaaccagtgtggctcaccccaaaccagcatgtcttgacggcatagactttcaccaaaccagatggcacgtgtcaggagcctgacaccaactgctgagctcagcccattccccctacacagaggcccaaaccagcttgcagcttttccaggcactcaatccacacctgcaatgtgccaggcgctgcagtctgtgctgggaacaatggtgaatgagtaacctcaaggacagtcccaaatcctgccacctcctctccatctccattcccactgcggccctgcagcccagccacggccccggccccgctccggcccccttgctagtcaccaggctttcactctgaccccagggaacactcagttctccacaaggtagccagaggggtcttttaaaatgtaaatgaggccaggggcagtggctctctcctgtaatcccaacacttcaggaaagccgggaggaaggatcgcttaaggacaggagttagagaccagcctaagcaacagatccagaccctgtccctacaaaaaataaataagctaggtgtggtggcgtacacctttggtcccagctactctagaggctgaggaaggaggaggattgctggagcccaggaggttgaggctgcagtgagccatgactgtgacactgcactcctgcctgggcaacagagtgagaccctgtcttaaaaaaaaacagaaaacatgaccaggcatggtggctcacgtctgtcatcccagcactttgggaagctgaggtgggtggatcacttgaggttacgagtttgagaccagcctggccaacatggcgaaaccccgtctctactaaaaacacaaaaattagctgggcgtggtggcacacacctgtaatcccggctactcaggaggctgaggcaggagaatcgcttgaacccaggaggtggagtttgcagtaggccaagatcgcaccactgcactccagcctgggagacagagcaagactccatctcaaaaagaaac

SEQ ID NO: 61723 - DNA, 341 bp, Homo Sapiens
ttttttttttttttttttggcaaacttttcagcttttattacaaaacaggacgtgatcccagcccaattttccaacaaaagtcaccacctcaatttgatttggtcaacccctttttggctggggagggggctggccaacaagaacaaggccccgtcccagccatccaaaactttgtccttccctgccccaggatggacacccaacatggggaaaagttgcttttgaagctgctcactgggcctcgttgaagcgggtcaccattgttttgggcagggtctccttgtaggactcggttgaggggaccccgtaggagctgccccgtgcacccaggccggagccc

SEQ ID NO: 61724 - DNA, 581 bp, Homo Sapiens
  misc_feature (524)..(524): n is a, c, g, or t
  misc_feature (527)..(527): n is a, c, g, or t
  misc_feature (535)..(535): n is a, c, g, or t
  misc_feature (580)..(580): n is a, c, g, or t
ggtagagatggggtctcgctatgttagtaaggatcttaagattaaatcatctggtctatccaggtgggctctaaatccaatgacagtgtcctcataatgaaagatgtacaaaggagagacagagaagaaaaggcagtgtgaccacagaagcagaaactggagcggtaggaagagaaaaagaacagactctcccctacagcctcccaaggtggcactacccctactgccatctcaatttcagacttctggcctcctgaactgtgcagaataaatttctcgttttatgtcaccaaatttggggtactttgttacagcagcctaagaaactactacatcactgaaatacaggctttattcacctcctccacggaagcaggtgagagtaaaggcgaattagcctttgaaagttccttgcaaagcaggaaaatgttcaattctgtgacacaggaactaaaagctgttcccgctaggaagtggcagaatgtacagagacaggctacttgcttttgccacaagttccaggnttnacttggancctttgcacttgggtattgactttcatttggatttttttttaagnc

SEQ ID NO: 61725 - DNA, 1608 bp, Homo Sapiens
tccgttgctctgcttgagccagtcctatgtagaaagtggcaaattacacattttttctccccttttagtctctggtggacatcttgtctgtgtcacagtttgatactaccaaattgaaaggattcttcactgcttcagatggggagggtgacagaagctgagctgtttcctgggtcagataatggcctctgtcaaagcaaagaatagttgtagagacacaaactgggcccttgaagctgtgactaacattttggcaacatgcatccctttgccaaataacttcttttcttcttgagtgtgattgttgatctccttctcaaagtaggctcttgttgctactattcttcacacaactcccaagcaaaagttggcagagttccggttgactgactgtgtcttgagggatatgccccggattagagtggatggggcgttccatgtcaaaatgaggttcattggcagatcctgagagctgctttgcaaagaaatagaggcagtactctttactgaatgttcttgcggtcctttatctttcttctaaattcaagtctgttcttattcatctagtgattaaatgcagaatcattgcctttgcctagcttcgtgggcattgtggaagagaagacagtatttccaactttttttttttttttcttttctcacaagccattgagcctgaggaactacaggctaaatttatgagcatttcttgatatctacagagggctactaaaaaaaaaatgctgaatagacctttatggggaacaacaatgttaataggaaaaaaaggtgatatgtttgctaatgtctatgtcagtcttaactctctttaagattttggctcattttggcttaagagcctgcagaagtatgtaagttatcaaataggggagccaggaattggtttcttccttgccatttaagcttggcaaagttagagcaatttggaatggctatccaacaatgtgttctacttagtaaatactctcttgtttttcaggggatagttagctaaaggtagggttatctccaatatgttttgggatggatcgtgaagatcattccctttttattttgagacaggatctctctctcttgcccaggctggagtgtggcggcgtgatctgtagcctcgacctccccaggctcaggctcaggtgttcttcccacttcagcctcctgtgtagctgggactgcaggcgcacgccactatgcctcactaatttttattttttgtagagatggggtttcgccatgttgcccagcctggtcttgaacttttgccggcctcccaaagtgctgggattataggtgtgagccaccaggctcagccattataattgattttcaaaaaaaatttagtttcttaagcttcatggattcaaattgagtgccatttggattttgaggcccctcagtggaaataatttgtttttagcaagtaattatgatatttctaaagtgcaaattcactgacctactttctgtgcttctggaaatgctgaatcgaataatctttttttttcctcccaataatccctctgactgtgaaaacattctccatatgtattcagattgggatagttggtaaaaaaaaaaaaaaaaaaa

SEQ ID NO: 61726 - DNA, 5219 bp, Homo Sapiens
gaatgggctcctgcctgcctggtgccacatcctgccccagctttgagggctgaatcctctcagctcagagaagagcttccctagttttgcaggcgcacggaggcctcccacccgtacacctgcctctgctctccccctggccattgcaatgcatgcccgggatctgggtttaccctgcagcccgactcctccagggcaggctccttccgtccttgggtccagcagcctcccccctccgctgggtactgagcatctgaaaagtctcagatagggccctacacctcttctcccttctcaagtgctcagcccaggggtggggcttgctgcttgcaaagagcagcccaccctcctgtactgccatcctattgcctttgaagaaggaggtcagcctggacaggtgaactgagttgccttcagaaaggcctgtctcaggcagccgcagcaggcttcacgatgtccatgtatcctgtttgcctgctgccgtctctcctctcccaagaggggaggtctgcgtgttgagccagggaggaaggagcctgcagcctgctcagggtggtggctggtgactgcggggccagggcttgctgctgtctctcggaatgtcctgcatgtgggtctggctgttcctgctggcactgccctcttctctctcccctcctttcccactctgccctgcttgcccgtcagggtctccggatgcccctgctggaggcagagaagcgttctgtttttatcatcgtccctgtcttggtcctgtccgtgctccccatgtgctcccaatcagttgtcttcgttcctcaacatcagggaaagaaaaaacagcaacacttctccctgtcatcagctctgctgtctccttgtcaggccttgggacgttctctgggctcagtctagggtcgtgcctcatgcctcatgcctctctgggaaggttcccaggggcgccgcctccatggttggctggtgggttttaaaggggaaggttgggaggaggcctgtggaaggaggagggccgtccacacccgtggggcaaagcgtgttccatgaaaccagtgctgtgcgtgctgggatgaaagcctcccagcctctcgtgctgaagggaaaggtggaccgaactggcttagctgctgtggcaatggggtggggggtgagtcctaatcagaaggtgggagaagagaataacaaaatggaactccgccccctgccgccacatttccttaagttttaggagttggggcctatgagtagaatttgaaagaactaccaaaaaagcttatttttggaaattaagtcagctttgcctgtggtttggctaggaataaatatttacctgtgtgcccctacagagatgacacagacccaaagtgggacattgagcaaggcacaggctggttcccctcctgtcctctgtcatcattctgtgagtgccaccatcaccaggtactgtggcctgcagaaataaacgaggcaccaaccctgccctcagggaccccgtgtcttcttagggacagaggactcagaaacatctgtgtccccgcatgttaagtgcatgcacacagtgctgagtctttgcagagaagggccatggctccctgaggagaccaagaaaggcacatagaagtgacttctcagctggcccttgcaggatccctgggtgcctgtacctctccagtccagctgagcaaggaggctcaggaattaatgaagatggggcttgtgtagcacgatggttctaggccatcccttttccatggctcaagtccattgaaggcagcctccaaaatcagggggttgcctgatcctcctagtgccacaatcccagtcctagctagaacttgccatggttcttctccctaaaagttcccaggggacaggagacaggtgttgcttttctaatggagcgggacctcgcatggacggggccctccaagcctgctaacaccctgttcgcactgactcagccctggaagagaggccagcagtgatgacctcgcccctgtacctggagatcatcatctattgcacaggggccttcctcatctcctgcatggtggggtcggtcatcgtctacaagatgaagagtggtaccaagaagagtgacttccacagccagatggctgtgcacaagctggccaagagcatccctctgcgcagacaggtaacagaaagtagatgggggatttgcacactcagcaccacctctctctctgggcctctaatgccctgccctctccattgtccctaatttatagctttgggccttattttctggcttctgggcaaggcacagaggaatatcatgaactaagtgctctagagtctgtttcaagctagtgtagcccgtgaatttcctgcaccctccatatcacactgcaagtcctccggactcctgggacatggattgggaggaagtcctatttggacagaatgtgcagccaatagcatgaatttgaactgtccccaagggctgcttagaagtgcagagatgcagggtagagaagagaactgtttgtattagtccattttcacactgctgagaaagacatacccaagaccgggcaatttacaaaagaaagaggtttaatggactcacagttccacgtggctggggaggcctcacaattgcagaaggcaaaaggcacgtctcacatggcggcagacgagaagagagcttgtacagggaaactcccctttataaaatcatcagatctcgtgagatttattcactatcacaagaacagcacagggaagacctgcccccatgagtcaatgacctcctaccaggtccctcccataacacgtgggaattcaagatgagatttgggtggggacacagccaaaccatctcagccataccatacccttgtcccctgtgtgcccacccttccccacgggaggaaatggtacagatggcacaggtgtgtgcaagaatgaccgttccctcagaagcctgtgctcattctggaaggtgctttgggagttaggaatccataagctaaggcaaagtatttgcaaagagtcaggagaacagagttgttactgcaatgatcagttataaaatgtcaagctggaagaggtgcatttggtctgcttattttaaaggtgagtgaagtccagaaaggccagcttgtggcagaaataggtcagtcctagaagttgggcctcctggcctaccatggtctttggaccactctgtgttgaggaaagaacatcagatacacagacatgtgcctctgccattgttgggaagccctgactaagaatgggaaggagtcaccccgtcccccttccttgctctagggtgaccccacacttccttgcaggtgtctgctgactccagtgcatccatgaactctggggttcttctggttcggccatcacggctctcctccagtgggactcccatgctagcaggggtctctgagtatgagcttcccgaagaccctcgctgggagctgcctcgggacaggtaataatactttgactcccaactttttgaaggcattccttgcttgctattctagtggtggaaggtgtgtatactaacaccttctgggcggtgaaggttcatgaaatgcctgcagaaacattcattccactttctgctcgcagttgggtgaaatacagagaggtggagatggggtgcctctcaaggtttgaacttcaccagccccaacttatgccactctctgtttcccccgaaagactggtcttaggcaaacccctgggagagggctgctttgggcaggtggtgttggcagaggctatcgggctggacaaggacaaacccaaccgtgtgaccaaagtggctgtgaagatgttgaagtgtaagtgatgcttctgtccttgcaaagaaaatcttgtcccattcaaagcaaacagcaggcctcgggcccagcagaacagcttctctggtgcctttgctgcccacacctgctccgctgcctgcttggggttacctgggagtggagggggtgttctgcaccttgagattgttctatgacgtcactctgttccttggcgtcaacctgggttgtggtcaggtgtttatcctggatccatcgcttgcaggctttcctcaccacatccctgcccactcactaccacctattgcaacaacggctcccatgagagggaagagaaaacaagtttggatgaagtggggaggagagaatcaagtcccagggaaaagcagcccctcgacacataccccactcccttagcctttatcctgccctcctcccttcccaagtaaatgagtctcaacgtgttctttaaagcggacgcaacagagaaagacttgtcagacctgatctcagaaatggagatgatgaagatgatcgggaagcataagaatatcatcaacctgctgggggcctgcacgcaggatggtgggtgccggccagactggctttccctgcccagcggggagaagatctgagctggggtatcagtcccaaggcctctctcagccacagctagggaagggggttaagagaggctgctttggcagaggtttaaaatgtgttatctcgggatctgggctccgctcattggtgttcattcaggaatacagatacctagattcacacacgtggtgtgttaacagaggcagctgagtaattatggtctaagagcgctcaggctgggtgcagtggctcatgcctgtaatcccagcaatttgggaggccgaggcaggaagatcacttgagatcaggagttcgagaccagtctggtcaaaatggtgaaaccccatctctactaaaaaatacaaaagttagccaggcatggtcacgcatgcctataatcccagctactcaggaggctgacgcataagacttgcttgaacccgggaggtggaggttgcagtgagccaagatcacgccattgtactccagcttgggagatactcccgctgtctcaaaaataaaataaataaataggccaggcacagtggctcacgcctgtaatcccagcaccttgggagggtgaggcgggtggatcacttgaggtcaggagttggagaccagcctggccaacaggtgaaaccccatctctactaaaaatacaaaaagtagccgggcgtggtggcgcatgcctgtaattccagctactcgggaggctgtggcaggagaatcgtttgaacacgggaggcggaggttgcggttagccgagatcgcgccattgcactccagcttgggcaacgagcaaaactccatctc

SEQ ID NO: 61727 - DNA, 483 bp, Homo Sapiens
ttttttttttttttttaccttttcataatgcatcccccaagttgggggattaaatcgctgaaatgtttatttagccctaaaaaagtaaattcaaagttgcctgtgggtagacctacaataaaattggttgacaaagtttggtttataaaatatacttacatattgtttcttaggcaaaaatcggcagcaatctggaataattcaaattttttatgaaattaattgcccatctttttatctgtgacaataaatgccaaaaatgactcagagccaataaccttcatctgtcatatggaagaaacaatcctagggcaatagttttttcaaaagcggaactgacaaagataagcgtttaaaagggtcttgatcaattagttacaggaacatgaaagaaagtgttccacagagaactgtgtctcctaaaatctctttcttctatcatctaccttacccaaaatttctcaatccaaccacatctacctg

SEQ ID NO: 61728 - DNA, 514 bp, Homo Sapiens
  misc_feature (494)..(494): n is a, c, g, or t
ttttttttttttccaggctggggaaagaggtttaatatcccggtacaccgtggtgagaagcctgggcaaagcatctgcacagacaggtgtgtgtggttgagcccaccaggtcccactttctctcatcccagtccctccctaaggtgctgcctagaattctgcacacacattcttactcccccaaagcacagggctttcttccagattgcttttttgaaggaggcgtttaaaccagaagggcaaagatgctgacacagagtttggtttttattgttatgtgtttggctgggtgcagaactgccctcaccacccctggccaccctggcctcttgggaggaacaggcagagaggtggcttcagatggctcttggctgccactctaggcctcggggcttatacaatgagcagtgggctctaccttccaataggaagtgcaaactaattcgaagtcacacttcaccaggagggagagatggtcttggctgaaggcactntaatcagggagcaaacccag

SEQ ID NO: 61729 - DNA, 894 bp, Homo Sapiens
gggggccgtgggggacagtagaagcctggaggaggagcttgagtccagccactgtctgggtactgccagccatcgggcccaggtctctggggttgtcttaccgcagtgagtaccacgcggtactacagagaccggctgcccgtgtgcccggcaggtggagccgcccgcatcagcggctcggggaatggaagcggagaacgcgggcagctattcccttcagcaagctcaagctttttatacgtttccatttcaacaactgatggctgaagctcctaatatggcagttgtgaatgaacagcaaatgccagaagaagttccagccccagctcctgctcaggaaccagtgcaagaggctccaaaaggaagacaaagaaaacccagaacaacagaaccaaaacaaccagtggaacccaaaaaacctgtggagtcaaaaaaatctggcaggtctacaaaaaaaaaaaaaagaacaaaaaaacttggtgggcgcgccgggccccggaagaatttaagcccactcggttggggcggggggccccgtggtagggacacagggcccacaaggcgtgccaagagaaacaccggagccttgcagtggtgtgtggcttgcccccaataaaaaccgccggggggcaccgggggtttggacacacccagggggcggttgaggccctccggggccttcaccgggggcaggggccgataatcgcgccgcgggggggaatagcggcagagcaacgaagcaaaaaaaaagacagacgaaagaaggcactgaacacgaatggtggagcacgacagcagacaacaacaacgaagacaagagacgagggacggagctagcgaaccgcggagacagagaagagagcagagaagacgcgagtaggaggcaaacctctc

SEQ ID NO: 61730 - DNA, 569 bp, Homo Sapiens
  misc_feature (19)..(19): n is a, c, g, or t
  misc_feature (45)..(45): n is a, c, g, or t
  misc_feature (430)..(430): n is a, c, g, or t
  misc_feature (460)..(460): n is a, c, g, or t
  misc_feature (470)..(470): n is a, c, g, or t
  misc_feature (478)..(478): n is a, c, g, or t
  misc_feature (482)..(482): n is a, c, g, or t
  misc_feature (488)..(488): n is a, c, g, or t
  misc_feature (547)..(547): n is a, c, g, or t
  misc_feature (569)..(569): n is a, c, g, or t
gagtgcaaaaatttattgngatttttaaacagttaagtagttcanggatgcatattctttagaagagcactatacatgcagggacctgggctttatcatcaccctggcaagctaaactgcctcatcaacactgtccctgcaaaagtttctgtagaagttgattcatcaattaaaagccagatccgtatatacacagctgaagaaactgccagcagttcattgctaattaccagggcaaacatttgtatttcaaagttgaccaacaggatgacaattctcaaagctctaaaaagattttgtcctaccaaacactagcctaatgtatgaccgttacccatccgtggttagtaacaatcaaaggcaacactccttacagcaacaaatgccatgagcagtgatctcaataaattcctctttggctgtcactatnaaagccagtctggtccaactcagtatcaangacattattncagacagnacantactgntttcaatttaaggtttccttagcaaataagtgcttcaaaattcctggcaagggctcctnaattggaggttctggcttaacn

SEQ ID NO: 61731 - DNA, 655 bp, Homo Sapiens
gtgctctaagctgcagcaagagaaactgtgtgtgaggggaagaggcctgtttcgctgtcgggtctctagttcttgcacgctctttaagagtctgcactggaggaactcctgccattaccagctcccttcttgcagaagggagggggaaacatacatttattcatgccagtctgttgcatgcaggcttttggcttcctaccttgcaacaaaataattgcaccaactccttagtgccgattccgcccacagagagtcctggagccacagtcttttttgctttgcattgtaggagagggactaagtgctagagactatgtcgctttcctgagctaccgagagcgctcgtgaactggaatcaactgctacaaaaaaaaaaaaaaaaaaaaaatttgtggggggccggcccgaaaaaattttaaaacacactcggttggggggggcgggcccccaatggaggtaacgtgcaacactgggcgcagaagggctggtgccaaaaggaggaacacgggggacagacaaagaggggcggggattcccccccaataaaaaaaaccgccgggggggagccgaggtgtctgagacaactccagaagggttctaggagcacaacgggtcacacaacgggagccaagcgaaggcagattaaattagccga

SEQ ID NO: 61732 - DNA, 599 bp, Homo Sapiens
  misc_feature (375)..(375): n is a, c, g, or t
  misc_feature (512)..(512): n is a, c, g, or t
  misc_feature (568)..(568): n is a, c, g, or t
  misc_feature (589)..(589): n is a, c, g, or t
gattgacatagtgctttatttaagctgtctgtacgaaggaaaatcatgttcatccctatcatatacgtgtaaaaatactaaggatgtacagtgtacaaaaacagtttctcctagttattccacatccttgtgggtcatatacttcaggaaatagacaggtttagtatgaccaacagtaatagtaatacagtttcttgggtttatagttgcatctgcttaaaatccttaaccagatgactagatcttgcgcagatctaatgaaagaactagcaaggtcaagaaatgtcacaaactataaagctacagggaggtaattcaattaccaatttagaggttttctttttatttaaataaatactttacatttcatgcttngcctgtaatgcactaccaggagcaagataaggaaattctactggtagacagtacaaacagtagcagcaaagtgtgtatgttgaggtgtaatagagagaccctgcagttagtaaggaaggcccttacttttgtactcnaggagaagccagtgggcccctgcaagaacagtcagcttttaagaagccgggaatcnggggtggggaaatgggaaacnatccttgaat

SEQ ID NO: 61733 - DNA, 556 bp, Homo Sapiens
tttttttttttttttttatgctctttttttggttctaaaactgatgtggtttcatttggagttctcttcttttcattaaccacatcaccgtctgcttctcttgcttctagtagtgataaactattttgctctttatggataaattcattcatctcttttgtaaccctttctgtttgctgcttttcttcttccatctgtttatcatgtaatagctgctgttctttttcttttctccaaaaagcttccctgtttttgccggattcgatgccgtaattcttcatcatcagtgtcagatgactcagatcctctgtcactcctctcatcttcactgtctcctgatccataaccacccagtccacctttcgttgctttgcggtgtgcatctttggctacgtaataaatttcttcatctgtgacatccagcagaatttctgttagaagcatttttgtcagcaacatcatttgatactctttctcctcttcagtcatctcagggtcactgtgctcttcttgaggaactggggatggacttctggtgactttcccactacttgca

SEQ ID NO: 61734 - DNA, 601 bp, Homo Sapiens
aaatgtgttgtgtcaacatttatttgcaaacatgtctatttgatttcaaatgaaaacgcttttgagtggatttaaaaacaaaacacatgcgggggagaaaagagaggctgacagacatgttagtaaacagcgaaatatttttgaaagctggatgcagatagctcagatgctagagggttgaaatggacagactttggctaggaagagatatgtgaatgttagcagagggacctttcttggggattaaggaatcaggaacacaaatttctcttctttccttcccaccagggctccatgccccccttactggaggaccaagaccttgttgccttcaatttacgggatcccagtgggatcctgatattttccatagtttcttaacaacatttcaagttaaatattaaaattattcatagggtgtggagtgagccaagtgcaacacattgctgtcaggggtgttggctactccgccagctgttgaaaaaaggagaaagaaagagagcaaactgagatccacacaccccacacagtatgaccaaggcgccttctgacttcaggaaagccaggcagacggggatccctggatgctcacagcttggca

SEQ ID NO: 61735 - DNA, 388 bp, Homo Sapiens
tttttttttttttttttttttgatagttgagacagtatttattttttaagtggcactgaggtcatatactttaatccctcccaacacatgtaacagtcctctgcccatcattagcgattctgaggatgaaacgttatgcaaagtcccttacagagtcaaatttggcctgagagataaaaagtcgagcttagcagatggcagggaataaaagggagcaggggcaggagaaggctcgtctttttaatctaagccaaagcccaaaccaggtgccagaaagataaaataaaaactgtgcctatagttttgcaatgctttagggatgctgaaggacagtctttagagaatcatttaaattaatgtatctattcttcatttcaaaagataaatg

SEQ ID NO: 61736 - DNA, 551 bp, Homo Sapiens
ttttttggagacagggtcccactctgtcacccatgctggagttcagtggcacaatctcgtctcactgcaacctccgcctcccaggttcaagcgattgtcccgcctcagcctcctaaatagctgggaccacaggcatgcgccccaacgcccggccaatttttatattttcagtagagacgggtttcaccatgttggcctggctggtctcaaactcctggtctcaagtggtctgcccgcctcagcctcccaaggtgctgggactacaggcatgttcccggctaaaactaacaatatttaaatggacgaaggataagctaagatatccataaaagcactttcaggtaatacagcatactttttcatctttgttctttgccatctttgttactgtcttatttacatttgcaatttttttaattttttatttccacaggcttctggggaatacgtggtatttggttacacgagtaaattctttagtggtatttctgagattttgtgcacccatctccaagcagtacacatgacccaatttgtagtctttatcctca

SEQ ID NO: 61737 - DNA, 466 bp, Homo Sapiens
tttttttttttttttttggaatctcaactaagggttctttagccacattctacacaaagataaaatcttaagccattcattaaaatcttcaaaattatatgtatttgataataaacatcacatagagcaaatggttaagtcactaacacattctctttaacagcaatttcagttttataaaactactttcaaatattgggtccatttggaatcatgatttttaagttttctcactgcagctggaattaatttcgttacaatgagaggaggaagggtttaaaaattaaaacggggtcttctaattttaaaatgttaatttaacaaaatattccatcctatttcaacattattaaacataggccaggcgtggtggctcacgcctgtaatcccagcactttgagaggccaaggtgggtgatcacgaggtcgagatcgagaccatcctggccaacacagtgaaactccgt

SEQ ID NO: 61738 - DNA, 477 bp, Homo Sapiens
ttttttttttttttattttattataaagagttttttttttccatctttttaattcctctgccttggagcaggtttatctctttagagcattaattctttccccttctagggcaccggggtacgtggtatgtcagacgtagcaatgctctcaagcttattgaacatttctgactctgtgccccccttccatgcccgttcagcaaccacctcccacttcttccactgtgacctaagggaccagaaacagagggcagactttgtctttcagcatctcaaagctaaaaaacaaagcatccaagctcttctggggcaagccagacccctccctccatccttaacacaaagaaggttcttacttccttgcagtttctctctggaccttgagcagatactgcagggaaatccagcaccctcagtcctggtcactgggaggttcaactccctcaacagaaactcgttcctcttcgggaggcggaa

SEQ ID NO: 61739 - DNA, 473 bp, Homo Sapiens
ccgcctactactactaaattcgcggccgcgtcgactttttttttttttttttcttgagacggagccttaccctgttgcccaggctggagtgcaatggcgcgatctcggctcactgcaacctccgcctcccgggttcaagcaattctcctgcctcgaactcccaaatagttgcgattacaggtgggcgccaccatgcccagctgatttttttgtatctttagtagagacggggtttcaccacgttggccaggctggtctcaaactcctgaccttgtgatccgcatgccccggcctcccaaagtgctgagattacaggcatgagccaccgtgctcggccaaaaatgaagcgtttcttatttagtagaagaaagaagaccagctaaacaggaagcataatgaactcctagctaagctcagaggaatttgtctgcaaaacccttacagaacaccacacaatcaaattatttgctcgt

SEQ ID NO: 61740 - DNA, 101500 bp, Homo Sapiens
gaccctgtctctacaaaaattaaaaaaattactcaggtgtggccgggcggtgtctcacgcctgtaatcccagcactttcggaggctgaggcaggcggatcatgaggtcaggagatcgagaccatcctggctaacaaggtgaaaccccatctctactaaaaatacaaaaattagccaggtgtggtggcgggcgcctgtagtcccagctactcgggaggctgaggcaggagaatggtgtgaacccgggaggcagagcttgtagtgagccgagattgtgccactgcactccagcctgggcgacagagcaagactccgtatcaaaaaaaaaaaaaaaaattcccaggtgtggtggcacatgcctatagtcccaagtagccaaatcagctacttggctgaggctgaggcaagaggatcacttgagctccggaggttgaggctgcaataagctgtgatggcaccactgcactccagcctggatgacagaataaaatcttgtctgaaaataaataaataaaaaaaaattaaatttaaaagttaaataatgggccgggcgtagtggctcacgtctgtaatcctagcactctgggagatggaggcgggtggatcacatgaggtcaggagttcgagaagaccctggccaatatggtaaaaccctgtctctactaaaaatacaaaaattagctgggcatggtggggcatgcctataatctcagctacccaggagactgaggcaggagaattgctgaaacccaagaggtggaggttgcagtgagccaagattgtgccagtgcactccagcctaggtgacagagcgagactccatctccaaaaaaaaaaaaaaagttaaataatgtatattgagtacttacgtatcaagtctatactaggtgctatgcctcatttaaacatcacaacaaaactatatgctaggtatcattaccctcattttatagatgaaagattcagataggtcaaatccctttatcaaagtcactttattggtacaagacagaaataaaactcaaattcaaaaggagataattacttgggaagctaaaatcgttccatcggctgtgtacagtgggtcacacctgtaatcctagcactttgggagtcaaggcaggaagatcgcttgagcccaggaatttgagagaagcctgggcaatatagtgagaccctttctttatttttttaaaattaaataattatctttaaaaatgaaaaataaaagaaagaaaaataactcattggcaattcagggacttcttacagtttatctgagatggaccatctatgttacctgttacttcttacctgtcagcttagtataggcttccatgtcgtcaattgctgtagaaatgcgatacttttttcctccagcacctgtaatctctatgtagtcatctgctttgaggaaagcatctgtaatcctaaaaatcattttgcaaaaatttatgtttatgagaaattttgaatatttgccttatgtcttacttaaggaaatctttctactttagggaaacaaaataatgaggcacagtgttctaaagacaactgcttctccaccgtactaaatttgtgcttggtaagctgtgagctgccatgcttactgtgttccaggcactgtcgcagggctttgcattcaccatcttatttattcctcccaacaataaggtaggtgtattcagccctcattttatagatgcagaaatgaagtaaattttgatttaaccaagttaggaagaaacagtgccaggctttgaaactagatatctctgaattacaaaacaacaacaataacaacaacaaaaactcttaccgaagaattaacatacaaataggagaaggtattccaagtaatctgctcatgacaaaggataggtaaaaaataggaatgaagatatacttcctcaacacaaatgtgaaaacgaacatgaaaagttaatcaatttaaggctattttagagacatggaagaagtaacttgactcacacccagtgtttgataactccttatggatctttgagtcacggagagacctggctgtacagttttctgctatggttctgactgggtcaggaagaggtaaaattcctgttggttttaccatttggtactaattttgataaatatttgaaaggatacaaatagacattaatcttaatccttaaagttaacttttgtcattaatctcagaatttaaatattcatgtcctacctcccattctcctgatgagaatggtgtgtaagtgactacctgtgccgaggtcctgagtgatctcagcactgccgcttcacgtctggcctaagccagctcttcttcccttcatctgcccctttatccacttccctccatctgcccctttatccacttccctccttttcctccaactaaattaactttatgctagattttttttctttaaggaaaccattttcaatttaatcacttaatattcacttgaactcatctagaaatgtctagttgagcctagtatgatactctagccaagtatcaaggaaaattttatagggaaatgacaatcaagtttcttacattgtatcaataatgttgccaactttgtgttgataagctctacggtgtaaagagttgcgagtgtggaacatgtcatacagatttccaacttcctgcaggaaaacatgaagtaaatattaataggatcagattatgttaacgttattagagacaagtatataggacaaggaaggaaaagggatagtggcagacaagagggctatgcaccggggcttcttcattaacacctttgaccccactaaaaaatgaggaggcagattagtaaagccatttattggcttgcaactttcattttttttttttttttttttttttttaaaagatgaggtcttgctatgttgctcaggctggtcttaagtgatcttcctacctcagccttgctgggataacatgcatcagccactgtacccagctaactttcattctttgttttttttttttttttttttttttttgagatggagtctcgatctgttgcccaggctggagtacaagtccttcattgcaagaactttcattctttttcttttctttcttcctttttttttttttttgagatggagtctcgctctgttgcccaggctggagtgcagtggcgccatctcggctcactgcaagctttgcctcctgggttcatgccattctcccgcctcagtctcccgagtggctgggactacaggcgcctgccaccaagcccggctaatttttttgtatttttagtagagatggagtttcactgtgttagccaggatggtctcaatctcctgacctcatgatctgcccgcctcggcctcccatagtgctgggattacaggcgtgagccactgtgcccggccaagaactttcattcttaataaactaggccaggtgcgatggctcatgcctgtaaccccagcactttgggaggccgaggtgggcagatcacctgaggtcaggagttcaagaccagcctggccaacatggtgaaaccctgtctctacaaaaatacaaaaattagccgggcatgatggcgggtgcctgtaatcccagctactagggaggctgaggtgggagaatcacttgaacccaggaggcggaggttgcagtgagcggagatcacgccattgcactccagtctgggtgacagagcaagactccaactcaaagaaaaaaaaaaaaaaccctaaaatctatcacatgctcaaactctgtgacagtttccgttttaggcatcttaaattaaatatatatatattttaatcctcccaataactctaggaaataggtattactattcttatgttcttcattcttgacttttttttttttttttagacagtctcgctctgtcacccaggttggaatgcagtggcacacaatcttggctcactgcaacctccacctcccaggttcaaccgattctcgtacctcatcctcctgagtagctgggattacaggtgtatgctaccacgcctggctaatttttgtattttcagtagagacagggtttcactatgttggccaggatggtctcaaactcggtagcccaagagatttgcccacctcagccttgcgaagtagtgggattacagatatgtaccaccacgcctagcccttcttgactttctatagtatagtactatactactttttgattacatgactgccatctaacagggacctagtgatttcagctgtttaactacagttgacctttaacaacacatgtttgaactgtgagagttcacttatacagatttccttgccccgctgccacccctgagacagtaagaccaatccctcctgttcctgagcctacttaatgtgaagacgatgaggatgaagacctttatgatgatctacttccacttaatgaatagtaaatatactttctctgccttatgaatttctttctttctttttttttttgaggtggagccttgctctgccgcccaggctggagtgcagtggcgcaatctcggcttaccacagcctccgcctcccgggttcaagttatttttctgcctcagcctcccaagtagctgggattacaggcactcgccactgcgcccagctaatttttgtattttgagtagagacggagtttcaccatgttgcccaggttggccaggctggtctcgaacttctaacctcaggtgatctgcccaccttggcctcccaaagtgctgggaatacaggtgtgagccaccacgcctggccttgccttatgattttcttaataacattttcttttctctagcttactttattgtaagaatacagtagatggggcgtggcggctcacacatgtaataccagcactttgggaggccaaggaggacaagttgcttgaggtcagaagttcgagaccagcctggggaacatagcgaaaccctgtctctacaaaaaaaaaaatagaaaaattagcccggtatagtggcatgcgcctgtggtcccagctattcgggaagctgaagtgggagatttgcttgagctgggaaggtggaggttgcagtgatctgagatcgcaccactacactccaatctgggtgacagagtaagatcctgtatccaaaaagaaaaaaaagaatatggtatatgatacacgtaacattcaaaataggctggatgcagtggctcacacctataatcatagcactttaggagactgaggtggatgggttgcttgagcccaggagtttgagaccagcctgggcaacacagtgaaactccacctctgtaaaataaatttcagaattagccaagcataggcctgtagtcccagctactcgggaggcagaggaggaaggatcagttgagcccaggaagtcaaggctacaatgcactatgatagtgccactgtactccagcctgagtaacacagcaagaccctgtctggaaagaaaacaaaaaacatacaaaatgtgtgtaactgaccattaaggttatcaataaggcttctggtcaacagaaggctatttagttaagtttttgggaagtcaaaagttatatgcaggccaggtacagtggcttacacctataatgccagcactttgggaggctgaagcgggtggatcacttgaggtgaggagttcgagaccagcctggccaacatggtgaaaccctgtttccactaaaaagacaaaaattagctgggcgtggtagcatgcatctgtaaacctagctagtcacaaggctgaggcagaaaaatcacttgaagccaggaggcagagcttgcagtgagccgagatcatgccactgtaccccagcctaggcaacagtgggagactccatctccaaaaaaaaaaaaaggtaaagaaaagttttatacagattttcaactaggagaggggacagcacccctaaacaccattttgttcaggtgtcaactgtataaaatttttcaacactaatacagtgattaaaaatgagactctgggccaggcaccttggctcatgcctgtaatcccagcactttgggaggccgaggcgggcagatcacgaggtcaagagattgagaccatcctggctaacacggtgaaaccctgtctctactaaaaatacaaaaaaaattagccgggcatagtggcgagtgcctgtagtcccagctactagggaggctgaggcaggagaatggcgtgaacccgggaggcggagcttgcagtgagccgagatcgtgccactgcactccagcctgggtgactgagcgagactccgtctcaaaaaaaaaaagagagagactctggaaccaaactttttgggttgaaattccaactctaccacttgttaattatatgccttctctgtgccttaatttgcttgcctgttgaatggaataatagtatctatctcacagggttatacggaatgagttgatccgtccaaagcacttaaaatgatgcctcatacaagccaggcatgatagtgtgcacctgtagtcccagctacttgggaggctgaggagggaggatcacttgagctcaggagttcaagactagcctgggcaacacagtgagatcctatttcaaaaaaaaaaaatgcaaccaaccaaacaaaaaaaccccaaaaccagtgtctaactcaaaacttaataaatgtccatgttaattttattattatttaataatgcagtagaagggaagagactaaagatatttacaaatcctaggaattaagtaaagagactgacgatttaccaattattccaaattgttaaatggttatttccaaatttcagaccaggaacaacattcttcttattgcctcctctggcacagcttaccttatctctagcacaaatacgcaactcattgtctacttcacagacacgggcaaacttaataaagcgcttgtaatcaaaattattttggattccaagatgatggcagtccctagaaggattccaaaacagagagatgaaatttttcaacaaggaagctgtaccttaaatagtaatactaaatttatataaatattttagccaacttttcagaagtgttcagtgcatacctggcaaaataatcccatttgtccacatcaatgccatttcttttattagatactatctcataaaggaagcttttgttttcaggacgccctttatatggccactggaaggcaagaaaacccactggaagttttaggataggcaccaaatctatttataaacaaagcaaagcaattttattaatctgtaaaatataaacagatacctgactgggaatatgagataaactagaaggttctattctttctttcttccacttcatttcaaaactagtagaaagggaaaagaaatgctaaggtatatgataccctattgttaccacattttcttgtgccactgaaaagatctgaactctattacatttcccaaaaccaacaacttttgtgttttcttggtttataagtttttgaaaaatataaaatctaggccaggcatggtggctcacgcctgtaatctcatcactttgggaggccgaggagggcggatcacgaggtctggagtttgaaaccagcttggccaagatggtgaaaccctgtctctactaaaaacacaaaattagttgggcatggtagcaagtgcctgtactcccagctactcaggaggctgaggcaggagaatcgcctgaactcaggaggcggaggttgcagtgacctgaggttgtgccactgccctctagcctgggcaacagagcaagacaccgtctcaaaaataaataaataaataatataaaatctaataataaactaacaatgcttgaattcatgcattaaaacagtactatctttcaaagtagctacatacctagtctaaataatatgcattgttgaatgtattctttgagctccacttttttggaaataggatatttgctacaaaactcatctgtttatcttatactgtaagtacacttgtatatatttgaggaaacagccctaaaaatctcagggggaaattatttcccaactttatttttaattaaaaaaatacaaaagatcaaaaaggaaacaaaacagattttccattgaactggttcaacttttttgtagatcttcctataaatatttcaaatatgatttttttttaaatttgtagacaggatctagctctgttgcccaggctggagtgcagttgcacaatcacagatcactgcagcctgcctcagcctcccaagcatctgagactacaggcatgagacagggtttcagtattacccaggctgatctcaaactcctgggctcaagtgatcctcccatcatggcctcccaaagtgctgggattacaggcatgagtcactgagcctggccaaatatgttcattttaatggttaaataaaacatacacatttacattccaaacaaagttactttaggcttctatataaaatactgcaggccaggtatggtggctcacgcctgcaatcccagtattttgggaggccaaagtgggagaatcacttgagcccaggagttcgaaaccagcttaggcaacatagtgagaccacatctccaaaaaaaaaaattttttttaatgaataaaatactgcatatatattcactaaaaaagaatttatggccgggcgcggtggcggctcacgcttgtaatcccaccactttgggaggctgaggcgggtggatcacctgaggtcaggagtttgagaccagcctgggcaacatggtgaaaccccgtctctactaaaaatacaaagatttgccgggcgtggtggcacacacctgtaatcccagctactcaggaggctgaagcagaagaattgcttgagcctgggagacagaggttgcactgcgctgagatcatgccactgtactccagcctggccaacacagtaagactctatctcaaaaaaaaaaaaaaaaaaaaaaagaaagaaagaaagaaaagaaaagaatttatgccaagcacagtggctcacacctgtaatcccagcactttcagaggcagagctgggcagatcacttgagctcaggatttcaagactaacctgggcaacgtgacaaaaccccatctctacaaaaaatacaaaaattagctgggcatggtagtgcacgtttgtggtcccagctactcaggaggctgaggtaggaggatcgcttgagcctgggaggtggaagttgcagtgagctgagattgtgccactgcactccagcctgtgtgacagagtaagaccctgtctctaaaaagaatttctgtatatatatttttgggaagtaacttctaactaattcagttgagaggtagaaaaaaatataagccttttattttttgcattaaacagtagaaacatagaactcatattttatcatttagcctctaaaatagccaaatgtataactcagaaggaatcatgaaaaggctagatgaaaagcaccagtcagttaaaattaagctgtacataaacttaccaatgaatcttcgacaggtgattcaagtggtcctacaatttgttcctttataaagcaaatatcttcttcagggatgagaccatattgttccatgacaggcttaattccattagaattaataaggtgctcaaacatcataactgagccttgttcatgctaggaaaagtaagcacaatatgatgtgttaaagattctagcccattgggagccctgactaacaaaattatcctcaattccaagtaattctgagataaaggtctattgcatattaattctctagtttctaaccacaatcttaggaacatttttaaaaacctgtcagatttttcattttactagtagtctacaaaccttttacaaaacttatttcataaacatatttaatgcatttaatgatataatcatttacagttcctaaatgaatattataagatcatgtagacagaattacattttaataaatatcatcataaaattgaattttattttttcatcagcctttgaacacgtgcagttataagctctgttaggcactaccatctagtggtgaaaaggggtaactgcaaacttgccagtaaaaacaaagatctcccttgaaatctccaattggcctgtttgctcatctctctctgctcactcattcacaatcaatgtaaaggatcaaatgaactcctgaagacatctgccctttcctagatcctaccaaaaactaactcaagatgaaaaacaaaacctgaattatcctataactatatttttttaaaaaaagagacagggaattgctctgttgccctggctagagtccagtgatgtgatcatggggtcactgtagtcttgaactcctgggctcaagtgatcctcccacttcagcctcccgagtagctgaaaccacaggtgcacaccaccctacccagctaatttttagatttttttgtagaggcagggtcttgatttgttgaccaggttggtcttgaactcctaggctcaaataatcctcctgtctcagcctcccaaagtggcaggattacaagcaacttgccctataactattctttccccgcccccgcagaaacaattcttgctccagaaactattcttaaaaacagaatcagggctgtcaggcctgggtgcggtggctcacacctgtaatcccagcgttttgggaggccgaggtgggcggatcacttgaggtcaacagtacaagtttggccaacatggcaaaacctcctgtctactaaaaaatacaaaaattagccaggcatggtagggtgcacctataatcccagctacttgggggactgaggcaggacaatcacttgaacccaggaggtggaggttgcagtgagccgagatcgccctgcactccagcctgggtgggcaacaaagtgacactctgtttcaaaagaaaaaaaaaaaaacccacaaaaacagaatcaggctgggtgcagtggctcacatttgtaatcctagcatttttttgagaggcaaaggtgggaggattgcttgagcccaggagttcgagagcagcctgggcaacaaagcaagaccctgtctctacaaaaagataaaaagattggctgggtatagtgacatgcgcctgtggtcccagctacttgggagaccaaggtgggaggattgcttgagcccaggtggttgaggctgcagttagctatgttcatgcctgtactccagcctgggcaacagagcaagaccttgtctccaaaaaacaacaacaacaacaaacaaattggccgggcacagtagctcacgcctgtaatcccagcactttaggaggcggaggcaggcagatcacgaggtcaggagatcaagatcatactggccaacatggtgacaccccatctctactaaaaatataaaaattagctgggtgtggtggcatgcacctgtagtcccagctactcaggaggctgaagcaggagaaacgcttgaactcgggaggcggaggttgcagtgagccgagatcacgccactgcactacaggctgggcgacacagcgagactctgtctcaaaaaaaaaaaaaaaaaaaacgaattgaatcaagatatacgtaattacaaagaggaaaaatagtaactttataatggagagatttgacagacaatgccttaatcaagtaagcagaattaatatcattggtattggctcaactaggatttatgtgcctcctgagatgatacactatgaaggatgcatcactgatttttttggagacagagtctagctctgtcacctcctgggctcccgggctcaagcaattctccttcctcagcctcccaagtaggcacgtgccaccacacccagctaattttttgtggttgttttttttttttttccctcttgttgcccaggctggagtgaaatggcgtgatcttggctcactgcaacctccgcctcccaggttcaggtgattctcctgcctcagcctcccgagtagctgggattacaggtgcccaccaccatgcccagataatttttatatttttagtagagacagggtttcgccatattggccaggctggtctccaacttctgacctcaggtaatccacccaccttggcctcccaaagtgctgggattacagatgtgagccactgcgtccgatctggacacatcacttttgtggcattctaccaaaaatgcatagcttgaatccatgaggaaacatcacactgaaactcaaattgaggaacattccacaaaatagctcagttgctctttaaaaaaatgacaaagtcactaacgataaagactgaagaattgctccagatcaaaagaaactagaaaaatggcaactaaatgcaatgtgtaattctggaccagggaaaaaaagtttttttcccctttttctatatggacaattggtaaaatttgaaagtctgaattagataagagtactgcatcaacattaatttactgattttgataattatactatggttatataagaaaatgttgtttttaggaaatacccactgaagtatttagaaataaagtatttcaacaatttacattctttgagagacagggctcttgctctatcacccaggctggagctcagtggcatattcatagctcagtgtatccctgaactcctggattcaagtaatcctcccgttctcagtagctaggaccacaggtgtgcaccacaatgaccagctgatgttttcataattttgtagagacagtttcactatgttgcccaggctggtgttgaactcctgggctcaaagctatcctcctgccttagcctcccaaactgttgggattacaggtgtaagccactgtgtccagtctaaaaactaactttctttttttgagacaagttctcactctgttacctacgttggagtgcagtagcacgatcacagctcattgcagcctcgacctcccaggctcaagcaatcctgccaccccaccatgcctggctaatttttaaatttttttgtagagacggggtttcaccatgttgtccaggctggtcttgaactcctgggctcaagcgatctgcccaccttggcctcccaaaatgttgatattacaaccatgagccactgtgcctggtcaaaacttactttctaatgattcagaaaaaaaatatctatatataaagagagagtattttatttattttttgacacagtgtctcactctgtcacccaggctggagtgcagtggcgtgatttcagctcactgcaagctccgcctcctgggttcacgccattctcctgcctcagcctcctgagtagctgggactacaggtgcctgccaccacacccagccaatttttttgtatttttagtagagacgggatttcaccgttagccaggatggtctcaatcttctgaccttgtgatccgcccaccttggcctcccaaagtgctcagattacaggcgcgagccaccacgcctggccaagagagagtattttaaaaaataaaaatgaggtggatcacttgaccctgggaggcagaggttgcagtgagcttagatgacatcactgagctcctgcccgggtgacagggcaagaccctctctcaaaaacaataaaataaaaataaataaataaataaataaagtaagggattttcaaaatagtagttttaaatatatcaatgccaactgtgaatatactagcaaacagaaaaaattaagtttcataaagctagcacagaccataataacaactaaaattataaggaacttaggagtaagtataacaaagatgtatgactttcatggcaagcctaggcaacatagtaagactccatctctacaaataaatacccaggtgtgacggtgcaggcctgtggccccagctacttgggaggctgagatggaaggatcgcttgagtctggaggtcaagaccagcctgggcaacatagtaagactctgttctccacagaaaggaaaaaataaaaacataaatcttattataaagtatgtcaacctaaaaggaaggagctgagaaatatttaatatagagagtttatttgggccaaggttgaggacacatttacaaattgccttggggaatgcttggggagaacaaaagaggctcaagtttttaaacaaaaaaggactggccaggtgtggtggcttaggcctgtaatctcagcactttaggaggccaagcggggcagatagcttgagctcgggagttgagaccagtctgggtaacaaagtgaggcccactccctctacaaaaaatataaaaaattagctgggcatggtagtgtgtgcctgtagtcccagctactctggaggatgaagtgggagaattgcttgagccttggaagtcgaggttgcagtaagccatgtttgcaccactgcactccaccctgggtgacaaagcaagatcctgttgaggggaggggaggggaaaggagggaagggggaaggggaaagaaaaggaagggaaagaagggaaggaagggaaagaaaggaaggaaaggaaggaaggaagggaaaaagagaaagaatgagaaagaaagaaagtgagaaagagaaaaagagagacagagacagaagggagagaaaagaaaaaaaaagaaaagagcataaatcaggaggaggaggtgatcacaaagaggaggtgataacaaaagttgttagtcaggaatgttcactggcttacagaaataacattagttagtgattggctacatattatgaagtacaggatatatggcattttatggttacctggcatcccacataacagctggcttcaagagataataattatttagctcaagggggcgtgacatgattgctgttctatttcaatgcctctctgggcctgataatgtaaaggggctcatatttctcagataaaaatttcttttcttctttttttttcttccccaagtaacaagtgtggaaacagaacagaatgcagaatgattcatcatatatgggaagttaataaatgttggggttggtattacagtcagtggggataggatgaactattaaaaaattagatttctcggccgggcacggtggctcacgtctgtaatcccagcgctttgggaggccgatgtgggtggatcatgagatcaggagttcgagaccagcctaaccaacatggtgaaagccatctctactaaaaatacaaaagtcagccaggtgtggtagcacatgcctgtaatcccagctattcaggaggctgaggcaggagactcgcttgaacccaggaggtggaggttgcagtgagccaagatcgcaccactgcactccagcctgggcaacagagtgagactccatctcaaaaaaaaaaaaaaagaaaaaaaaagatttctcccatatacttacacaaaaataaattgtacacgagctaaggatttaaatgtgaaaggcaaaatgcttaaaggaatagatttggtaatgattgagaagatcctattagatcaactgcagaagaaaacaactataagctctggacaactccctgaaggtcctggagagagaccaaaaccaagtggatgttagacctcaatacttagaagggagaggtgctgggtgacattccggttttatggttttttgcctaagggcaggccccaggacagaaaaactggtgagaaactacccattttactggcttgcagaaccagagtacttcatcaaaattgaaaacgtctgtttttcaaaaggcaccatgaaaaaatgaattggccaagccagacactggggaaaaatattcacaatacatatacctaaccatatatatacataaagaattcctacaactcagtaatcaaagagcaagcaatcaaactttttaaacgagtaaaatgttgagagttctttgcagaagaagatatatcaataacaaagtacaaagtacaggaaatagtattcaacatacattagaaaatcaaaccatgaaataccatttgacactcattagaagggctaatttgaaaggtcaaatgttgatgaggctgtaaaacaactggaactccagtatgttgctgatgggagtgtaaaatggtacaaccgcattggaaaactctggtagtttcttatagaattaaatacatatctaccatatgacccagcaattctagctcctcggtatttacctaagtgaaatgaaaatgtatttctttattttatctatttttatttttataaaataatgtatttctgctgaatgtatttcttgttttaaaaatgtaattaactttccacactacaacaacatagaaaatgtatttctaccaaaatcttgtacgataatatgcacgacaaccttatttataacaaccaaaacctgaaaacaatccaaattccaacaaaacaagaaagggtaaacaaattgtgacttatttgcataatgccacactacgtaggcgataaaaaaaaggatcaactactgaggcacataacatgaacaaatctcaaaaccattatgttgagtaaataaagcaaggcataaaataggacctcctatatgattctgcttaatcaagtctaagaacaacaaaattcatttatgtttgtaaaaatcagaaggtgatggtggggtgagggggagtgagaattgactaggaaaaagcacatgggaatttttcaggaagatgaaaatgttctatatcctgactgggtaatagtcatatggatgtatacgcctgtcaaaactcactgaacttaagatctggacaacttattgtatgtgaactatacctcaaaaaaagagagagagaaaaaaaaagtggttgacatgtaagaagttttcaatatatattaatatcctttttctattcccgttccagaaatacagtgtagtaaaaaccaacctaattttacttctcaaaaattgattccaaaatatgggacagccacctgcaaatgcctaattttaaaatgattcatttaatatatatgacttggctggtaagttagttcgtggtcataccaaatgtgtcaaaactggagttggccttttattatacagtagtacaatggagcagaaggagtattaaactggcaactggttttgtattgctgattccagtatttaacggctttgtgatttttgatgcatcaatacacatccaagagtttcaagttcctttatttgtaaaaagggagataacgataacttccttacagactactgtgagaaccaaacaaaagcatatatatatatatgtgaatgaaagcaccctggacactgtaatggggaagtattttataacacagtagtggaaccaaacagataaattaactaaataacctgcttaaatagtctttctttttattgactattgactgtatgaatacataccgtccatttcacctccgggcgagcaagtggaataaatcgtccatcaaacatgtgagaaaatggcccatgaccttaaaaacaaaagcagccttagaacaagaaaaacatctgtaaaccaacaaaaactttttccttttttttttttttttttttgagacggagtttcgctcttgttgcccaggctggagtgtagtggtacaatcttggctcaacacaatctccgccccctgggttcaagcgattctcctgcctcaggctaccgagtagctgggattacaggcgtgtgcaaccacatccagctaattttgtatttttagtagagatggagtttctctacgttggtcaggctggtctcgaactcccgacctcaggtgatccgcccgtctcagcctcccaaagtgctgggattacaggcgtgagccaccacactcagccaaactgaattctttaatctttttagtttaacttgaatagcaaaagaaattaataatctaaaaatacaatcacaaaaagggacaaaccctttcttcctatttctaaaacaggagaacaggaagcagaaacatggaaaagtaagctctccatcgagcagtctccagtcaccaggttttacataaatctgataaaagggcagtttttgttgttttttgaagagacagagtcttgctatgttgttcaggctggagtgcagtggctattcacaagcatgatcattatgcactgcagccttggactcctgacctcaagtcatcctcctgcctcagccacctgaatagctgggactacaagcatgcaccaccacacagggcttgataaatggacaattctgtgtaactaaaaagaatgttaatgccaaaaactttttgaaatcttcagattgaaaatatctggattaaaatagcagtttcaagaaaatccactagggccaggtgtggtggctcatgcctgtaatcccagcactttgggaggctgaggtgggtggatcactttgagtcaggagttcgagaccagcccggccaacatggtaaaaaccctgtctctactaaaaatacaaaaaattagccgggcttggtggcgggcacctgtagtcccagctactcgggaggctgagacaggagaatggcgtgaacctgggaagcggagcttgcagtgagccaagatcacaccactacaccccagcctgggtgacagagcaagactccatctcaaaagaaaaaaaaaggggctgggcgcggtggctcatgcctgtaatcccagcactttgggaggccgaggcgggtagatcacgaggtcaggagttcaagacaagcctggctaagatggtgaaaccctgtttctactaaaaatacaaaaattaggcgggtgtggtggcaggcgcctgtaatactacctactcaggaggctgaggcaggagaatcgcttgaacccgggaggcggaggttgcagtgagccgagattgcgccactgcactccagcctgggcaacagagcgagattctgtctcgggaaaaaaaaaaaagaaaatccactggggtgcaggaagaaaaaattagaatttctcttataactctcaagcttaaaaaaatctatctttggccgggtgtggtggctcatgcctgtaatctcagcactttgggaggctgaggcgggtggatcacctgaggtcaggagtttgagaccagcctgaccaatatggtgaaacctcatctctactaaaactataataattagctgggcatggtggcatgtgcctgtagtcccagctacttgggaggctgaggcaggagaatggcttgaacctgggaggtggaggttgtggtgagccaagatcgtaccattgcactccagcctgggcaacagagcgagactccatctgaaaaaaaaaaaaaaagaagtgagccacttaactggagagggaagtctacctagactagccttggccctgctttgcaagtcacaggctacacataaaggctcgctaatgcagtgctcaggctcctggggactggcaaaggtttcccaatgattctccctcaaaataccaagaatccatcaaatttatcatctaggggctggtattggttctttgtaagtctccgggggacataaaaagagtgcctacttgctttaagtatctggctatccaaacagtggcatgcacctcccttcccctgccctgagggtacacacaaactctcagagtccctgaataagtaggaataaactataaggatagaggtaaaaacccccatgatttaaaaggaacagtcccggcccaacgtggtgacttatgcctgtattcccaacactttgggaggccaagggaggtgaatcacttgaggtcaggagttcgagaccagtttcaacaacatgatgaaactgcatctctactaaaaatagaaaaaaattagccaggcgctactcgggaggctgaggcagaagaatcacttgaacccaggaggcggaggttgcagtgagccaagatagtgccaactgcactccaatctgtgtgacagagcaagactccatctcaaaaataaaaaaataaatgggacagtcccctttctctttgtcacaggaaaaggattatattcttttgcttggattaaagtggcctaagacctcacatggatcagaaaagacaaggagttctctaaatgtgttaatccacttgggcagattagagattataaatatgaaaaaaaatggatttcaccaaataaccgaaggaaaaatggtgattttatttgataagaaggacaaggccaggcgcggtggcttacacctgtaatcccagctctcagggaggagaggcgggaggatagcttgagcctaggagttcgagacctgcctgggcaatatagcgagatcctgttctccacaaaaaggaagaaaaaaaaagaccaaaaaaaaaaaaaaaaataagcataagaaggataaaagaaaaataaaattcacatatcatcctaaaagcagtagtaagaaaaactcactagcaaaaagccctttcatataacctgtagtaaacatgatggccgggcacggtggctcatgcctgtaatcccagcactttgggaggctgaggctggtggatcacctgaggtcaggagttcgagaccagcctggccaacatggtgaaaccccgtctctgctaaaaatacaaaaattagctggatatggtggtgcatgcctgtaatcccagctactcgggaggctgaggcacgagaattgcttgaaaccaggaagcggaggttgcagtgaaccgataatgagccactcactccagcgtgggcaacagagcaaaactctgtctcaaaaaaaaaacaacaacaaaaaaaccactttagcaaagatgtttaacatgagaaattcactgaaagttgccaagaaaataaaatagcaatgttttctacttatgaatcattctaggaagaagcaacagtacatttatactaacatcaactgaagaattaaaatacaatttccatattctcttggttgatctgattttttaacgtcaaagagaggtaacatatgttatgattttacataacaactttgtctctttgtacagcttaccgagatcatgacaaagtccagcaatctgaacacagagaacatctcgttcacttatctgcagctctggttgtttttcacccagtgcgtgaactagacatcctgctagataccccaccctgcagagcaaaaacacaaaaagtcacttttctgtttgcaagaggagtgatagttctggtcctcaagaacttcagtatgtttccttaaacattctaacatacctttagggcaactttactgaacagtatatttcagaactaggcaggaacacacacaaacggaatcccaaaagcaggacctctggctcaatatcaccaatcattagaggaatgcacatcaaaaccacagtgagataccacttcacaccccttaggatagctactattaaaaaaagaaaaccagaaaataacaagtgttggacatgatgtgaagaagttggaagcctgtgcactgttagtggggatgtattatggtgtagctgccatggaaaacagtatgggtgctccacaaaaattaaaaacggaattaccacagtgatttagcaatttcacttctgggtatacacccacaataacgaaagtaggtcttgaaaagattggctgggctcaggggctcacgcctgtaatcccagcactttgggaggctgaggcgggcagatcacttgaggtcaggggttcgagaccagcctggccaacatgttgaagccccatctctactaaaaaatacaaaaattagctcagcatggtggcaggtacctgtaatcccagctatttgggaggctgaggcaggagaattgcttgaacccaagaggtacaggttgcagtgagccgagatcttgccattgcactccagcctgggcaacagagcaagattccgtccccaccaccctccccccaaaaaaagaaagagaatatatttgtacagacatgttcatagcagcactactcaaaatagccaagaggtaaaagcaacaggtatccatcaacaaatgaatgtataaacaaaatgtggtagatacatatgataaaatattattcaaccttaaaaaggaaataaaaaataatttaaaaataaaaaataaaaaataaaaaaggaaagaaatactgacacatgctacaacatagatgaactttgaggaaattatgctaagtgaaataagccagtgacaaaaagacaaatattatatgatttcactaagatgaggtacctagagtagccaaattcataaacaaaaaaaagagggccgggtgcggtggcttatgcctgtaatcccagcactttgggaggctgaggtgggcagatcacctgaggtcgggagttcaagaacagcctggccaatgtggtgaaactccatctctactaaaaatacaaaattagctgggcgtggtggcaggtgccagctacttggaaggctgtaatcccagctacttggaaggctgaggcagctacttggaaggctgcttggaaggctgtaatcccagctacttggaaggctgaggcaggagaatcacttgaaccgaggaggcggaggttgtggtgagccgagattgcgccattgcactccagcctgggcaacaagagcgaaactccgtctccaaaaaaaaaaaaaaaaaaaaagtagaatggtagttactagggggttgcggggggttgcggggggagacatgaagagttgtttaatacgtatacagtttcgtgtttttttttttttttttttgagatggagtctcgctgtgttgcccaggctggagtgcactggcctgatctcagctcactgcaacctcaggagtagctgggattacaggtacactccaccatgcccggctggttttgtatttttagtagagacggggtttcgccatgttgcccaggctgatcttgaactcctgacctcaggtgatccactggcctcagcctcccaaagtgctgggattccaggtgtgagccactgcacccggcaagtttggttttgtaagatgataagagttttggcaagtttggttttgtaagatgataagagttttggcaagtttggttttgtaagatgataagagttttggcaatcgattggttgcacaatgtgaatgcatttaaccctactaaactgtacacttaaaaaacacttaagactatgtattttctattctgtgtattttaccacagtttttttttaaagtaggaatatctggctttgtaatgtttacaacataattggagatgaagtacttaaatgcacttccagcacttccatctgagccattcctaaattcttttcccctgaactctgagctacatgaggacagaggcgattgttatctttttgtggtttggtagggcttagtaaggttcgataaatatttgttgatgaatgaacatttgagtatagacacatgttgtgcctaactaaaaatgcttctacacaaacagaaaaccaaagtaatatactgtgagtacttcatgaaaatctcaaagactgtctattcttccctgtccacttcctcctggctctacactgcataatggaaatgcagaccaacgtctcagcttagttgtatgtaacagaggcatcgccttctctaagattatgaatgcttttttaacttacgcatttcctgacaggtaagaaaatgatctggtttgaaagagcaactctgtaccagagtaaatagagaatacagaaaaattaaataatcaaatatacataattagttgtatcagcaaccgacccattagcttttatttatttatttatttattttgagactgattctcactctgtcacccaggctggagtgcaatggtgctatctcagttcactgcaaccttggcctcccgggttcaagctattctcctgcctcagcctcccaagtagctgcagcgtgcgccaccacgccttgctaatttttgtatttttactagagacggggtttcaccatgttgctcaggctggtctcgaactcatgatctcaagtgatccgcctgccccggcctcccaaagtgctgagattggccgggcacggtggctcatgcctgtaatctcagcattttgagaggccgaggcgggcggatcacgaggtcaagaaatcaagaccaccctggccaacgtggtgaaaccctgtctctactaaaaaatacaaaaattagccaggcgtggtggtgggcacctgtaatcccagctacttgggagactgaggcaggagaatcacttgaaccctggaggcagaggttgcagtgagctgagatcgtgccattgcactccagcctgggcgacggagtgagactccatctcaaaaaaaaaaaaagtgctgggattacaggtgtgagccaccacacccagcccctgttagcttttaattaatatttaaaaacaaatccaactgacctgtctatagatactttcattatttttccaggaaagatctgaggtggttaagaatacataaaataaataaattgcaacaaggtaaataaaaagcctcaattttggggctgggcacagtggctcatacctgtaatcccagtactttgggaggccgaggcaggtggctcacaaggtcaggagatcaagaccagcctggccaagatggtgaaaccccgtctctactaaaattactaaaattagccgggtgtggtggtgggcgcctgtaatcccagctgctcaggaggctgaggtacagaactgcttgaacctgggaggtcgaagttgcagtgagccaagattacgccactgcactccagcctagtgaaagagactctgtctcaaaaaaaaaaaaaaaaaaaaaaaaaaagcctcaattttctcatcaataaaataaggacattatcatcattttgtaaaactatttattctctaaaagattaagacaactatttcttttttttcctgttttctttttctttctttttttttttttttttgagatggggttttgctcttgttgcctaggctggagtgcgatggtgcaatctcagctcactgcaaccaccaacctcctgggttcaagtgatcctcctgcctcagcctcctgagtagctaggattacaggtgcgcacaatcatgtctggctaattttgtatttgtagtaaagatggggtttcacaatgttggccaggctggtcttgaactcctgacctcatgtgatccacccacctctgcctcccaaagtgctgggattataggtgtgagccaccatgcctggcctaagataactatttcatgagacagagaaaatacttaaaaactgcaagttccccaccccattcccttcttaccctagactatgctcaaatcgattgtgtgaagctcctggaaaaacatagtaaccacctcccagctgtttgatgtatcgaagacgttgaaattgaggtgtatcaatgattcggacgaggagagggtggagctcaatgtggccatggataggatcattaattacctagaaaattatgtttaattaatacaaataacgacatgtaagtccaactgaaatttgtgtgcagccattcctaattatagtgcaaagtcaaagctatttgatttttcaagtaaaaatactaacggaaatgacaagatgttaacatcattaccttatttaggtatcactaccagacagatcaagtatattggatttgagtatattttacttcttcctaatggatgtgaataacagaaaaataaggattttgattttttattatgtatatgacttagtctttaataagtttgtcttgtattcaagttaaacatgcatattcatttcgatttaaacacattcatccacatcatgtaacccatatcactataggtattatgtctaatttttttttttttttttgagacagagtctcactgtgttacccaggctggagtgcagtggcacgatctcagctcactgcaacctctgcctcccaagttcaagctattctcctgcctcagcctcctgagtagctgggactacaggggtgtgccactatgcccagctaatttttgtattttgagtagagatggggtttcactatgttggccaggctggccgcgaactcctgacctcaagtgatccgcccacctcggcctcccaaagtgttgggattacaggcgtgagccaccgtgcccggcctaaatttttttttttctaaatgtatctatacagcactcatcattaaaacagaaaagaaagaagggaggcagggaaagaaagaaagatggaaattcctctaccatatagataagaaatcatgcaggtccgagtgcaggtgctcacatctgtaatcccagcactttgggaggccaagagtttgagactagtctaggcaacatagtgagaccccatctttaaaaacaaaaatgcagtggcgcacatctgtagtcccgggtactctagaggctgaggtaggaagatcccttgagccccaggggatcaaggctgcagtaacctactattgtgccacaacacttcagcctgggcgacagagagaaactctgtctcaaaaaaagaagaaaaaaagcaagaaaataattttgtacagctgaacaatgtgtttatgtgtgtgtgttctttttgttttgtttttcttagagatagggtctcgctttctcaccaggctgcagtgcgttggctattcacaggcacaatcatagcttactgtagcctcaaactcctaggctccagggatcctcctgcctcagcctcccaaatagctgggactacaggcatgtaccaccattcctagctaatttatttttattctttgtggagacaaagtcttgctatattgcccaggctgacctcgtgtccgcccgcctcagcctcccgaagtgctggaattacaggcatgagccaccgcgcctggctaaaatctacttttaaaccatttaaggacctaaaagccttcactgtaaatttttcaggttgtaataactgtcttttttgtttgtttgttttttgagacagagtctagctctatcacataagctggagtacaatcagggctcattgtaacctctgcctcccaagttcaagcgatcctcccacctcagcctcccaagtagctggaactataccacgcctggctaatttttctttttttggtagagatggggtttctggcagggcatggtggctcatgcttgtaatgccagcactttgggaggccaaggcgggtggatcacctgagatcaggagttcacgaccagcctgaccaacatgatgaaatcccgtctctactaaaaatacaaaaattagctgggcgtggtggtgggcgtctgttatcccagctactcaggaggctgaggcaggagaatcgcttgaacccaggaggcaaaggttgcagtgagctgagattgtgccactgcactccagcttgggcaacagagtgagactctatctcaaaaaaaaaaaaaaaaaagattcattgatacatttgaaaaattagtcctcattatgtcaaacactgcactccctcttcaccattacacaatctcagcttcagaggccaactgaactaaatttagcataaagaacactgtgtcaagaacaaaccatggtgaccttgggttcggcaatggtttcttaaatatgacactaaaagtacaagacacaaatgaacaaaaaaaatataaattggattacataaaaacttaaaacttttgtgatccaaagaacaccatcaaaaaagtaaaaagacaacccacagactgggaaaaaatatttgtgtatcatatctcccataaggatttacatccagaacatataaagagctcttacaactcaaatcaaattgtgtgtgattgaacaacactgtgaactttctaaaaagcactgtcttgcatactaaaaatgagtgaatcatacaacttgtgaattatatctcaataaagcatttatgttttaagtatcaagttaggtaggtatgaaattagggtagaaatccttgaggtctgcaactgagtagcaaactaggtcaattcttgttgaactgcattgctgatgaagttaaattcatttaaggtattgatttcattactaagccgtgattcagtagtttgaaaatctatttccaacaactgtcatttataatttataaatgaggttaaacaatgttggtttgtttttttttttttttgagacagggtctcactctgttgcccaggctggagtgcagcggcgtgatcatggctcactgaagcctccacctccccaggttcaggtgattttcctatatcagcttcccaagtagctgggactacaggtgtgcactaccacacccagctaatttttctattgttttctattgtttgtagatggagtttcaccatgttgcccaggctggtctttgaacttaagggctcaagtgatccacctacctcagtctcccaaagtgctgggattacgggtgtgagccaccatacccagccaacaatgttctttttacagaaaaatagaaagaataaaagtgggcaattgaaaccactgactgccttaaatattacctcaaaaatatattattggctgggcacggtggctcatgcctgtaatcccaaaactttggaaggccgaggcaggcagatcacgaggtcaggagttcgaggccagcctggccaacatggtgaaaccccgtctctactaaaaatacaaaaattagccgggtgtggtggcatgcactggtaatcccagctactcaggaggctgaggcaggagaattgcttgaacccgggaggcggaggttgcagtgagctgagatcacgccactgcactccagcctgggcaaccgagtgaaactccctctcaaaacaacaaaacagggacaggcacggtggcacgtgcctgtaatcccagcactttgagaggctgaggcgggtggattatgaggtcaggagatcgagaccatcctagctaacgcggtgaaaccccatctctactaaaaatacaaaaaattagctgggcatggtggcatgcgcctgtagtcccagctactcaggaagctgatttaggctgaggcaggagaatcacttgaacctgggatttggaagttgcagtgagccgagattgcaccactgcactccagcctgggagacagagcaagactccatctcaaaaacaaaacaaaacaaaacaacaacaaaacattattatatagttgaaccaaaaatgttcattaaattttttcagatgtgattttcaatagaaaataagcctagaacgggctggtggctcacgcctgtaatcccagcactttgggaggccaaggtgggcagatcatgaggtcaggagttcaagaccagcctggccaacctggtgaaaccttgcctctactaaaaataccaaaaaaaaaaaaaaaaaaaaaaaaaaaaattaactgggcgtggtggcaggtgcctgtaatcccagctactcaggaggctgaggcaggagaactgcttgaatctgggaggcagaggttgcagtgagctgataccatgccactgcactccagcctgggcaacagagcgagactccctctcaaaaaaaaaaaaaaaaaaaaaaaaaagaaaagaaaagaaaaagaaaataaccgggtaggccagacgtgttggctcatgcctgtaatcccaacactttgggaggccaaggcagacggatcacatgaggtcaggagttcgagaccagcctgaccaatatggcggaaccctgtctttactaaaaaaaatacaaaaactagctgggcatggtggtgtgcacctgtagtcccagctacctgggaggctgagacaaaagaatcacttgaaactgggaggcagaggttgcagtaagccagattgtgccactgcactccagcctagacaacagagcaagactccatctcaaaaaaagaaagaaagaaaagaagtctataacttgcaaaagcaaaattaaaatatgtattcttatagagagggatctgaaataactcaaatactatacattacatctattttttaaaaaaagtgaaaaatgcaaatgatgatcgggcaaaaaagtacaaaaaaagaagatatcctacatcttctcccaggtctgaaactaagttttcttaacctaggaatgtcaaaagagtaaataaggtctatttcctgtcactaacaaaacaagaaacatttcatcaagtatggttttagaatcactctgaagagcttgtgaaaaatgcacattctggctgggcgcagtggctcatgcctgtagtcccagcactttggcaggacgaggtgggtggatcacttgaggtcaggagtttgacaccagcctggccaacatgatgaaaccccaactctactaaaaatgcaaaaacattagccgggtgtggtggtgtatgcctgtaatcccagctacttgggaggctgaggcaggagaatcacttgatcctgagaggcagaggttgcagtgagacaagatagtgccactgagccccaacctgggtgacagagagagattacatctcaaaaagaggaaaaaaaaaaaaaaaaggccaggctctgtctcaaaaaaataaagtttaaaaatatgtaaaacaatactatacattgtttatggatatacataaatatgcaataagagtaaaaaccattcatgacaatgataaacatcaaattcaggaagatgcttattacttctagggagaaaaggatagaaacataataaatagaaacagggccaggcgtgggggctcacatctgtaatcttagcactttgggaggccaaggcaggtcaatctcttgagcccaggagtttgagaccagcctgagcaacacaggaagaccccgtctttataaaaaatacaaaaattagccaggtgtggtggcatgcacccatagtccaagctactggggtggctgagatggaaggatcacttgagccagggagacggaggttggagtgagctgagattgcaccactgtactccagcctagatgacagagcaagaccacatttcattaaaaaaaaaagaatgtacaaaggaggtcttcaatagtttctaatattttgctctaaaaataacagacttgaagcaaattaggcaaaatattaatatttgacaagttgggtagtggtctacttatgcttttctgtatgcttaaacatattttagttcttcttctgatttaaatactctgtgctcattttagaaagtgcagaaagtttagaaaagatccactactcacaattctatcactgagaagcagatttcctcctattctcttcaaaatgaattttacataattgagttatatcactttatattcaaaaaacataacaaactcagatcctcttaccttcattgtatcaacgtggatttgaaccaatcgctggatataactaagcagcttcttcctctcccccaaggaactaaaattacaataggataagcaagtctatcattatttgcttaataataatccctgcagtatatagtagacataataaactttatattatctacactaacagaagttagattggaaggaacaatcaataattcaaacatacccctcctagaaactctctccttcctttgctgttaagatagggaactctcctgctgaatcaatataggcctcccacagccttctgtccttgaccctcctctctcttggtaaatttaagacttgaaaaactccacatctccatgtctactcaatgctcaaactgtacttccttttaaccaaactgaagtcaacatctaccctcataatcctggattgatttatgagcaccaggtatgactcaagcatgaatgaaatacatatgaaggctttaactttatttatattcattttccattgtcagtactccctcacaatgctccagtttcaagaaaatacataatgggaattaaatttgagcagctcgaagtcctgtgattcattatcctgcttcatttacaattactagttgggcccagcatatcatcctccctcctggctgggtgtcaacagagagtgcaggcaaagggttttactgatctactagataaccagattgaaaaaaaagtatctttctacaagtcatacatagactgggagtcagaggcactacattggcctctatggtacacactgaacccatggtaataagaacacttaagaataatatcttgggatacacagaagcattattacagctgataaattaaagcagcaaatttcgtgttttcctattcccctatcctcctcatcagtttgacataacaagcacagtgtaaagccaggctttcagaagtacttataggtggacttagtttaaggggagtcacatagttgagcaaaaccggagtcatagcataaaatatcaaacctaaactaaccccgtgaccacttaatattttcctaaactgacatttggtattcatcgcttaaaaccccaaaatcggccgggcgcagtggctcacacctgtaatcccagcactttgggaggccgaggtgggtggatcacctgaggttgggagctcgagacaagcctgactaacatggagaaaccccgtctcttctaaaaatacaaaattagccaggcgtggtggtggcgcatgcctgtaatcccagctactcgggaggctgaggcaggagaattgcttgaacccgggaggcggagattgcggtgagccgagatggcgccattgcactccagcctgggcaacaagagcaaaactccaactcaaaaacaaaacaaaacaaaaccaaaatcactgattagagtatataaaaccacccaaaaccagggggttgttttgtttagcaaaggacatggcattaaataaagatttaaagaagtcatgggccaggatatctagattatgaaagaattttattcctgtgttccaacatttctgaaatttaatgcttcttacaattgacatgtatatttaacgtgacaatgtttctatctaacttctttttttttttgaaatggagtcttactctgttgcccaggctggagtgcagtgacgtgatctcggctcactgcaagctccacctcccgggttcacgccattctcccgcctcagcctcccgagtagctgggactacagccgcccgccaccatgcccagctaatttcttttttgtttttgtatttttagtagagacagggtttcaccatgttagccaggatggtctcgatctcctgacctcgtgatccgcccgcctcggcctcccaaagtgctgggattaaaggcctgagccaccacgcctggcctgtttcttacttgttaaaaaaacctttataaatcaatggttgttcataaaattgagggcctactaggagtgcttgtctaagctggattctccctagaaagcagggtccaggataagagcttgcaagtaattaatcttggggtgaactctgggcacagggattggggggtctagggagggtaaaataggaaattaggtaaaaacagtacaaaggtccattaacaagttgattgcattggtactactgtgagcaactggatggagtggtgggtagggctaatcccactggcaacctgtaaggcagcactgtctagtagaactttctgcgatgatggaaatgttctatatctgctctgtccaacacagtagccgttagccatagtgactactaagtacttgaaatatggctagtgtaactgaggaattttttacttaatttacttctaattaatttaaacgtgaagctagttgttattatacagaacaatacagctctaaggagtcctacagaatttgagttatgaggtggggcacagagacgtgcaatatagtgttccttctggaacactgcaatatagtgttcctttgtctgttttgttcactcatgtgccccaaattcatggaagaattcctagtacatagtgagctttccaaaaatattcactgaatgaatcaatagcacttgggtccacaaacatgcacatggctcccttgaaaagaaagactgtattagaacaaattccattcaggtcaaatagtaagcaactattatgtacaagaaacaagtagtaaaggggactttgagaggactgagagggctgaaatgtggttatgaaagagtcatgccggggacagtggctcacgcctgtaatcccagcactttgggaggctgaggcaggcagatcatgaggtcgggagttcaagaccaccctggccaacatagtgaaaccctgtctctactaaaaatacaaaaattagccgggcatggtggcacacacctgtagtcccagctactcaggaggctgaggtggtagaatcacttgaatctgggaggtggaggttgcagtgagccgagatcacgccactgccctccagcctgagtgacagagcaagactccatctcaaaaaaaaaaaaaaaaaaaagaactttgggaggcctgaggcgggcagatcacaaggtcaggagattgagaccatcctggctaacacgatgaaaccccgtctctactaaaaatacaaaaaattaaccgggcatggtggcacatgccagtagtcccagctacttaggaggctgaggcaggagaatcacttgaacaccactgaacttgaactccagcctgggcaacagagtgagacttcgtctcaaaaaaaaaaaaaaaaagaaagggctaagatgaggtccctggagattctgatccaaaggatatttactggaagtcagttaaatgttctacagtgatcttgtttcacaatgtacttctgttatcaattactaagcaacagcacaggaagtaattcagtataatcctttgttttgattctttggttactgttaccacaaacaacatgtaactaaaatttcagaagagaaggccatatttccccactgttgccaattttctaacagaaacaaaatcttcattttaagaagtatttaaggccggtcgcagtggctcgcgcctataatcccagcactttgggaggacgaggtgggtggatcacctgaggtcgggagttcgagaccagcctgactaacatggagaaaccccgtctctactaaaaatacaaaattagctgggcatggtggcgcatgcctgtaatcccagctactcgggaggctgaggcaggagaatcacttgaacctgggaggtgaaggttgaggtaagacgagatcgtgccattgcactccagcctgggcaacaaaagcaaaactccgcttcaaaaaaaagaagtatttaagcaccagatcctctactgagatcattaaaggagccccactctaatctagaccctagaacctacagccatacacagagatggatctatgtaactatgtatgtatgtatgtatatatgtatctatctacctacctacctatctgagacagggtcttattctgctgcccaagctggagtgcaggagcttatcatagatcactgcaaccttgaactcctgggctcaagggatcttcctgcttcagcctcctgagtgtaggtgggactacaggtgcatgcacagtacccggctaattttttaattttctgtatcactatctataaaatttactaagcgttaatcatatgcttcaacactttatgtacatcatctcattattgttatccattttacaggtacagaaactgaagggttaaatgacttctcccaaattatacaactaaaaagtgcctgttttgcatagtgtctttaaatctaataccagggcatattccaatctttaggaaaacctagaaatatgctcaagataggggtgtagccttgattttcttactaacatttttttccctattggttcttatgtatttcccagtgtgtataattcaattattctgaacttgagagtaaaaagttggtcactacaaacttgatgaagatttgtctgcaacattatttaaaataggaataaggccacacacggtggcttatgcctgtaatctcagcactttgggaggccaaggtgggcagaccttggcccaccttaggtcagaactccagaccaccttaggtcaggagttcgagaccagcctggccaacatggtgaaaccctgtctctactaaaaatacaaaacttagctgggcatggtggtgcatgcctgtaatcccagctactcaggaagctgaggcaggagaatggcttgaacccagggggttcagtgagccgggatcgcaccattgcactccagtctgggtgacagagtgagactctgtctcaataaataaataaataaataaaattaaaaataaactaaaataggaataaacagtaatagcaaacataggatttgtacagcgaaaacaaacagcaggtggccagtcgcggtggctcacacctgtaatctcagcactttgggaggccgaggcaagcggatcacttgaggccaagagttcaagaccagtctggccaacatggtgaaaccccatctctactaaaagtacaaaaatcagtggggcagccgggcgcggtaattccagcactctgggaggctgaggcgggcagatcacgaggtcaggagattgacaccatcctggctaacatggtgaaaccctgtgtctaccaaaaaatacaaaaaagtagccaggcgtggtggcaggcgcctgtagtcccagctactcgggaggctgaggcaggagaatggcatgaacccgggaggcggagcttgcagtgagccaagatcacgccactgcactccagcctgggagacagagcgagactctgtctcaaaaaaaaaaaaaaccgaaaaaaaattagtggggcatggtggtgggcacctgtaatcctagctactcaggaggctgaggcaggagaataacttgaagccgggaggcagaggttgcagtgagccgagatactccagcctgggtgaacaagagactatctcaaaaaacaaatgaacaaacaaaaccagcaggcaagggattctgctgttttaaagcacttcatagatttaaaatgaggacagtttatatcagagattttgggctttgtccctgaaagatggataaagtgtgtttggttataacgtgaatttatttcttcattcttaccttactccaagattttcaaaacgagactcatcaagacaaggcagtaatgcgcctgtgatttcattttctatggaagaaaaaagacaaattcaatgtatacaacatatgcttttcattttctttcaatttggatacaccaacatttacccagatccacataagtgagtacccactgcaggcaatggattgtgccaagtaccacttttttgatctgctacttgtaaagacttaattttaattaaataactaaaccaagaagcattttttgataaatcacgtgaaaatttcaaaattatttgtgtaaattagttccaagaaaaaccagttgcaaaaaggaaagtgaaacccgactacctgttggggttttgccaggtcagcagctttgagttggggagggaaggaaacctaagtctattgttcttagaattaacaaggtttgagttggggagggaaggaaacctaagtctattgttcttagaattaacaagttaaaaccgtgaattcaagagtgcttaaagtgttgatttttctcaaacctcctgggaaagcactcaatactctgatttggaagaggtgtgtgtgtgtgtgtgtgtgtgtgtgtgtgtgtgtgtgtcctgggaaagcactcaatactctgatttggaagaggtgtgtgtgatttggaagaggtgtgtgtgtgtgtgtgtgtgtgtgtgtgtgtgtgtcctgggaaagcactcaatactctgatttggaagaggtgtgtgtgtgtgtgagtgtgtgtgtgtgtgtgtgtgtcctgggaaagcactcaatactctgatttggaagaggggtgtgtgtgtgtgtgtgtgtgtgtgtgtgtgtgtgtgtgttgttgggttttttcctttctctttctatacaattaattctaatctttcctgacctcaaattccagaactctggactattttcttttattttctttgagacagggttttgcttgttgcccaggttggagtgcagtggtgcgatcacatctcactgcagccttgacctcctgggctcaagcgatcctcctgcctcagcctcctgagtagctgggaccacaggcatgtgccactgcacctagctaatttttatttttattttttgtaaagttgaggtctcctgatgttgcccaggctggtcttgaattcttgggctcaagtgatcttcccacactggcctcccaaagtgctgggattataggtatgagccactgggccaggcctccagtggtttttgatgagaatacttgttaaggtatagatcacatgagttctagagtccaaagacctaaccttaaaaaatctagctcttttttgtagtggtgtgatctctgaaaagttactttacatctttggacctcgcatacatcatcggtaaaatgtgttgagtgtagtaacttatttcagacttcttgtgaggctgtattccataatgagaaaagggacactgtaccttgtgcttggcttatcaaattaaaaaaaaaatggacttagataaagagagactttttttttcttttccgagatggagtctcactcggtcgcccaggctggagtgcagtggcgggatcttggctcactgcaacctccgcctcccaggttcaagtgattctcctgcctcagcttcccaagtagctgggactacaggcacataccaccatgcccggctaatttttgtatttttagtagagacggtgtttcaccatgttggccaggctgggcttgaattcctgacctcaggtgatctacctgcttcggccttccaaagtgctgggattacaggcgtgagccaccgtgcccggccaagagaaactttattagaaagaaagactattgctggtcgggcgtggtggctcacacctgtaatcccagcactttgggaggccaaggcgtgtgaatcatcaggtcaagagattaagaccatcctggccaacatggtgaaaccccatctctactaaaaatacaaaaattagccaggtgtggtggtgggcacctgtagtcacagctactcaggaggctgaggcaggagaattgcttgaacccgggaggcagaggttacagtgagccgagatcacaccactgcatttcagcctggcgacagagcgagactctgtctcaaaaaaaaaaaaaaaagaaaagaaaaaaagaaaagaaaagaagaaagactatttctacagggagaaagctccaatatcagatatctgcaagaggctcaggaatcaaacacataggccggccgggcgcggtggctcacgcctgtaatcccagcactttgggaggcagaggcggatgcatcacctgaggacaggagttggagaccagcctggccaacatggtgaaaccctgtctttactaaaaacacaaaattagccaggcgtggtggcgtgcacctgtaatcccagcaactagggaggctgaggcaggagaaccacttgaacccgagaggcagaggttgcagtgagctgagattgtgccggtgcacttcagcctgcgtgacagagcgagactccatctcagaaaaaaaataaaataataaaataaattttaaaaaataatcaaacagaggcccaagaaccaaacagaggttgggcatggtggctcacacttgtaatcccagcactttaggaggccgaggtgggtggatggtcactcgaagccaagagtttgagaccagcctggccaacatggcaaaaccctgtctctaattaaaaaaaaaaaaaaaatgaggccgggcgcggtggctcacgcctgtaatcccagcactttgggaggctgaggcaggcggatcacgagttcaggagatggagaccatcctggccaacatggtgaaaccccatctctactaaaaatacaaaaaaattagctgggcgtggtggcacatgcctgtaatcccagctactcgggaggctgaggcaggagaatagcttgaaccaggcagttagaggttgcactgggccgagatggcgccactgcactccagcctggcgacagagcgagactctgtctcaaaaaaaaaaaaaaaaaaaaaaaagaatccaacagaaaaagggtcttcttttatatgataaaggacgggcaagcagaaataagcagaatctttggataggaacctggacgagcaagggaaaatgagcagtgtagcccaacaggacagcatcctactgtggtcagccggttctcaaaagaaactgaccagagggaggcatattccactgctttagtgcctgcctggtcagatctgggggtaagcaagagttgaggggcccataagggaagagagaagtccgaataaagtttggtcaagacaaagcagaagctaagacatgagcaattgggaacagttggtcagtttttaccaaatgaaagcacatagtgtctttgatagcaataggttgtaggtttaaggaacacacatcattctggagggtaacgagttaatctacaaaccactgaaacagagagccaaccacattttgagacagaaaatatggaactacttcactccacttgttgctagtcaaagaaaataaagtaataatccatcccagcagtggagggaaacgaaagggcaaaagggggaagaaaaaaaaaaaaggagaaatgcaatttcccatacccattcaagctatctttgggtcctgaaccactaatgttcctcctaccccagtttccaacctagccaaacagggccccacctaacaaatgcaaaaatttactaaatttgcaaatcccaaccaccaaagaatcaccttcctattggacacctagaggatataaggcaggagtcaaatctcacacccaccacaaaaagttgagtagaattcacaaggatggatgcttggatacgaatcagtaaaatatgattaaaactcaacctaaacacttctccaggggatgtggccaaactgtggcatgctggggattcagtggtcaactgaacaaccccaaggttcagattttggaggggaacctgcttttaaagagcaaaacatgttccttaccatgttctgcaagtgcagtcaacacacgcctatcgggcgctgctgggatgccaaggaaggtgatgggaattcagagattaaccaagccagttccttccccttcaggaaaagcctcaattcagggaggaaaccgaaacctaaaagccccagaacatcctctgatgtggcaagtgttcaaggagctgcggttagcgcggaggggtcccgcgagcctggatgacagcaagccgcccaccaaggtctggggaaaaatctccttctaactaaaaaaaagggacccgagtctcgcttgtcccgcgccggggtggcaagttagtgaagaaacccacgagagtgagatcccaatctacgactgcccctcccaggtcctcaatcccgggagcctgctcccatcctacgaatcgcctatcccaggcgaccccatgtcttcttcctccgcctcggggagtcagtcccgggagccccatgccgcaggccctcctgggaacccccgccgcagggctccctcccccgcctcgggtcttcctttcctcggcgcccccagcgcaggtccgccctcccgggtgcctcccgccgcagggctcgctcctcggcctcggtcctctcgtggggccccctccctcagggcgcctggcccgcgccccaggtcgccgcccttcgcccctcagcccctccggagccgctacctcggatgttcttcagcagcaccggctcttcaaagccaccgcgcctgaggaaggagcacacctgctccggaccccatgtcttgtagtcgggatggagttccaggcccggggaccagtctgcctctgcggaaggggtgtttgagggggttctcgggctgtcatcgcaacggggacgcttggagggctgctcggaatcggctcgctgcatggctacacctggcgtccggcacagcagtcaagaacctcggcgccggacccgcgcgcaggcgcactgacagcagggccctggcggggagtccaaggagtattggcagcctattggcctcctgcgcaggctcactgacagttgagcccttcgggcagggcagcctagcggctcttgccttgggctccctgcgcaggcgcaatggcagtccagtcgtcctcaaatcaatcccgccagggcgctggacgtgaacgcgaaagggcgtggctagaagcagaactgagggcagtgctggtggaaagggggaggaaagagcgcgcccggcaccgcacccccaattaggggctcgtctagtgaattgggggtattctccttcgaatgagtacactacccgccgcaccttggccgggtttcagatgccccaaacttaaaagaagcctaaaaggccgtcaggctgccagcaccttcccagtgaagaggaaaacagtcaaggtgctgaactggaagaacccggaatgatttcaaatgtgacttgagggtgtcttcattccacagtattgctggtcaactagagggccctgggatacctgttgtctggtgtccacacaggaggggacttcagacttctttccaactagagacagagccctccatcccaactgcattcccagaggaaggaaagtggccagtctgattacttaaaatttaacttctgaggacttttactgcctggttgtaacagcatgtgaaaatggcaggcattttcccatcacttaacccctctgcggcagggctcaaacttccctataaatactggtccatgcaattgcctggtaaaaggacatatcactattactgttaataaagccaacacaccttcccagcaaccaaggcatagacctgtttagggggtcaaggacgaatgaggcggaatagcttatcatcaagcagtatgaactagtggtctactggtgagccaaaatattatttgcaaacagagctttactgtgtgccaggcacggttctaagggctttacaaatataaaataattttatatttatacataatactaaatgaattaagtacattcattaaattatttaaatattaaataatttttataacttctaagggttttacaaatattgtaaagttctaagggctctacacatattacttcacttaattatcacaattaccttaggatgtaggaaaaagtaatttgccgcaggtcttcttttttttttttgagacggagtcttgctctgtttcccaagctggagtgcagtggcgtgatctcagctcactgcaacctctgcctcccaggttcaagtgattctcatgcctcagactcccaagtagctgggactacaggcgcctgccaccacacctggctaatttttgtatttttagtagagacaggatttcaccatgttggccaggctggtcttgaactcctgacctcaggtgattcccacacctcagcctcccaaagtgctgggattacacagccgtacccagctgcccaaggtcttacagctaggaaatgatgaagcctgtattcaaacccaagagatgtaacttggttccaaagtccatggtcttgataacttgccaaccactgcttgttaaagggggtttggggctgggtgcagtggctcatgcctgtaatcccagcactttgggaggccagagcactcacttgaggccaggagttcaaggccaacctggccaacatggtgaaaccccatctctactaaaatacaaaaattagccaggcctggtggtgcatgcctgtaatcccagctactcaggaggcgggggcacgagaatcactcaaatgtgggaggtgtaggttgcagtgagccaagatcttcccgttgcactccagcctgggcaacagagcaagactctgtttcaaaaataataataataaaaaataaataaataagtaaagggggttttgatataaaactattttctattatttaacccacaattttcaatggctcccttttcctgcagacccatggaggaaagtataaaggtgttcctgccaggcgcagtggctcacgtctgtaatcccagcactttgggaggccgaggcgggtggatcacctgaggtcaggagttcgagaccagcctggccaacatggcaaaaccctgtctctactaaaattacaaaaattagctgggtggccaggcgcagtagctgtcacctgtaatcccagcactttgggaggccgaggcgggtggatcacaaggtcaggagttcaagactagtctggccaacatgatgaaacccgtctctactaaaaatacaaaacaattagctgggcatcgtagcaggcacctgtaatcccagctacttgagaggctgaggcagagaattgcttgaacctgggaggcggaggttgcagtgagcttggatcgcgccactgcactccagcctgggcaacagagcgagactccgtctcaaaaaaaaaaaaaaaaaaattagccgggcgtggtggcagccgcctgtaatcccagctactcaggaggctgaggcaggagaatcgcttgaacctgggaggtggaggttgaagtgagccatagcctgggagacaaaagtgaaactctatctcaaaaaaaaaaaaaaaaaaagagttgttttccatctgcacacaaggccaggccccccaaaaaaatgccctcaaacactagagaactttgtgaaaagacctgacagttgccaagacttgcgaaaccaaaacgggataagaaaacaaatagcatatgtatgaaagacttaatctcaagtcagaaatggctgatttaaaaacttgtgtttataagacctgtggggaaacctgccctgacatcaaggtttcctggacaatagaaggtgttatagcagggtttttagtttaatcaactgtgtttgttcaaagcagctgcttttaagaatttttagttttttaatttcatttttttattttaattttaattttaattttttttgagacagagtcttgctctgtggcccagggtggagtgcagtggtgcaatctgggctcactgcaaacctctgcctcccgggttcaagcgattctcctgcctcagcctcctgagtagctgggattataggcacccgccacgacgcccaactaatttttttgtatttttagtagagacggggtttcaccatgttggccaggctggctttgaactcctgacctcaagtgatcagtgaactcctgacctcaagtgccttggcctcccaaagtgctcagattacaggcatgagccaccgcacccatccagaacttttattttctgtttttgtttgttaaaaagtataatttattgccatacttattatattttccctaattccctactttcaaggggcctttgatcttgcgctaggtcattagttacttgttcagggtcaacatggctggtaagggacagagagaggattcaaaggcagtgctccctcgctccaaagtataggctctttccagtttgccacttcatttaactcctcttacagtcctaacgatccttttccatcataattccacagcctgggaaccaacacccactggacacaggccctggactctggccatagtgagagaaatgactgctcaagctgccctcttctaaagtcaatctcagtatggttaggactagaaaaaacaataagatcaattaatttaaggcccactgcccaatgaccttgaataagcccagcaagctttccctgaccttatctatttaccttccacccagccaggcaagctgggcaattttatttctggcagcattcacctgtggtttttacatctcttcacagcttccttttcagccagtgttgctggttctcaatgccagctgccaccaccctctgcatctctgttttactgccttttatcatttactgaacttagcctcctcaagactttttttcccatctgcccaaattgcgaagctgagccaaaaaaatttttttttaagtattgattttcttacctgttaaagataatgctcaagtaggacaggcgcagtggctcacgcctgtaatcccagcactttgggaggccgaggtgggcggatcacctgtggtcaggagttcaaaaccagcctggccaacatggtgaaacaccgtctctaccaaaaatacaaaaattagccaggtgcacgtctgtaatcccagctactcaggagactgaggcaggagaatcacttgaacccggaaggcggaggggttgcagtgagccaagatcattccactgtactccagcctgggcaccagagcaagactccatctcaaaaaataaaatgaaataaaataaataatgctcaagaaagaaaacttgaaccgggtgcggtggctcttgcatgtaatcctagccccttgggagggcatggtgggtgggtcccttgagctcaggagtttgagaccagcctggacaatgtgacaaaactccgtctctattaaaaatgtaataataaaaaaaaaattagctgtgtgtggtggcttgtgcctgtaatcccagccactagggaagctgaggtgggaagatcatgtttgcctgggaagttgacgctgcaatgagctgagatcaagccactgcacttctagcctgggcaaaggaagtaagaccctacctcaaagaaaaaaaaaagaaaaagaaataaagaacactaggccaggtgtggtggcacatgcctataatcccagtactttgaaaggctgaggtgagaggattgcatgaggccaggagacagagagcaacctggtcaacatagcaagaccctgtctctataaaaaataaaaattaaaaaattaaaaaggccgggcctggtggctcatacctgtaatgccagcagtttgggaggccaaggtgggcagatcacttcagctcaggagtttgagaccaacctgagcaacatagtgagaacccgtccctacaaaaaatacaaaaattagcttggcatggtgacgtatgcctgtagtcccaactactcaggaggctgaggtgggaggatcacctgagcctggagaggttgaggctacagtgagccatgattatgccactacactccagcctgggcgacagggtgagatcctttctccaaataatagtaataataataaaattataaagagagagaaaaaaggaaacttagagccaggcatggtggctggctcctgtaatcccagctactcaagaggctgaggcaggaggatcacttgagtgcaggaggtcaaggctgcagtgagctatgattgtgccacggcactccagcttgggtgaaagagtaagaccttatctcaaaaaaataaaaaataaattaaaaaagaaagaaaccttagaaaacaaatgcacaaaatatacacacacacacagagccaaaggtcaccttttagtgtgtttgctatcagtctttttgtgttcatagatgtagaaacatatattctagttgagatgggtaggagactggcaatgagtaataataatataaataacaataataaacttagattatatggtagaagttagtgctatggaaaataaaaacagagcaaggtaagagattaggagcagaggagtgggtgggcacagtggctcacacctgtaatcccagcactttgtgaggtcaaggtgggaggatcatttgagtccaggagtttgagactagcctgggcaacttggcgaaaccctgcctctacaaaaaatacaaaaattagccgggcgtagtggtgtctgcttctagtcccagctactctggaggctgaggtgggagaatcatctgagcctgggaggcagaggttgcagtgagcccagattgcaccactgcactccagcctgggcgacagagcgagaccctgtctcaaaaaaagaaagaaagaaagaaagaaagacagaaagaggccgggcacagtggctgacgcctgtaatcctagcacttgagtaggcggaggcagggcggatcacaaggtcaggagattgagatcatcctggctaacacggtgaaacccggtctctactaaaaaaacaaaaaattagctgggcgtggtggcacacacctgtagtcccagctactcgggaggctgaggcaggagaattgcttgaacctgggaggcagaggttgcagtgagccaagatcatgccactgcactctagctctgggcgacacagcgagactccgttgaaagaaaagaaagagaaaaagaaagaaaagaggagtagagagaaggatagggtcaccgtcaccattttggatagagtttcaggataggtctttgagaaggtgacatttgagcagagagttgaaggaaatgaaagagtcagctttgcagatgtctggaagaaaagcattgcagaaaagggaaagaggaagtccaaaggtcctgaagcagaagcatgcctggatttgagcaataccaagcaggccattgtggatggggtagagtgagtaaaatgggaagtggtaagagatgaggtcaaacaatggggccaaagagctctcatgtcccatccttagggctccacatctagaggtaagagaaagcctctgctcctccagttccaacggaaaaattgcaagggaatgacttcaacaagttcatttcagcatccattgctggaccagtcactgtggacaaggtcataaaatgattgaccgaatcaggtcacatgtttaccctttgggtcacagggaaaagactacttctaggaggaaaggaattggcttcggacaaagttcccaggtatttttatacccattgaacagacgagggaatgaaactcagagaggtaaaatgactcgtccagggttacacgtgtgtgttaatattaagttcttggggtttcaccaagatctgccttgaaagctattgctcaccccggacgtggtggcttgtgccagtaatcctagcactttgggaggccaaggtgggcagatcatctgaggtcaggagttcgagaccagccaggccaacatggtgaaaccctgtctttactaaaaatacaaaaattagccaggcatggtggcaaaggcttgtaatcccagctactcagaagggcaacagagcaagaccctgtctcaacagagcgagaccctgaggcaggagtatcgcttgaacctgggaggcgaaggttgcagtgagctgagattgtgccactgcactctgcccttggtgacagagtgagactccttctcaataaaacaaaacaaaataaaggaaacaaaaaaactactatttctcttttctgcaacttgagctgagtacaaggtctgttgcttttacattgtttcagggagagaagccatctcgtcctatagagtgtattgtgactcctcgggagtgtctcagtgcttggggtgggagtgactgtgttatttggagtttgggatgctcaaacacacaaggaagtggccagacttcccttaggagcctagggtatccttgggtaaaaataagtcatgtatctttcaattaattaattaatttatttatttgagacgggatctcactctgttgccccggctggagtgcagcagtgtgaacgcagctcactgcaacctcaacctcctaaggctcaagtgatccacctacctcagtcttctgagtagctgagaccacaggcacacaccacctcacccagctaatttttacaaattttttgtagaaacgggcgtctcactttgttgcccaggctggtcttaaactcccaagctaaagcaatcctcctacttcaccctctcaaagtgctggaattgcaagcatgagccaccatgcctggcctagatccttttaaaagtcattgctaagagtcgtttataactcatatttcaaacatagcacagattcctaaactcaaatggtaattgcatcagagagtctttttttttttttgagacagagtcttgctctgttgcccaggctggagtgcagtgacgtgatctcagctcactgcaacctccacctcccaggttcaagcaattctactgcttcagcctcccaggtagctgggattacagacgcacgccaccatgctcatttttgtacttttagtggagatagagtttcaccatgttggccaggttggtctcgaactcctgacctcaggtgatctgcccacctcggcctcccaaagtggtgggattacaggcgcgacccattgcacccggcctgagccaccgtgcctggccagcgagtcttaatcccacataaatttgcttgagatcccctgtgttacaacaaaaggggaatttgccatcctaaaaccattagaagaggtttatgaagaagcaatcactatggaaagaccttaggcctttgatgagtatattcagccatttggtcaaccaaccaaaaagtctaccctatctttgtacttctgtggcaggaaaatacggtctggaggcagggaacatgaggccgattcacacttcagctatcacaggaaatatcctctccatacggcgtatgccgagtcgtacgtcaagtacatgactttgtaactttacttcatcctcttcgtttacataaggcatacaccaagtgaccagtggaaacccctagagggtatttaaacctccacaaacttttttttttttttgagacaaagtcttgctcttgtccgctaggctggagtgcaatggcacgatctcggctcactgcaacctccgcctcctgggttcaagggattctcctgcctcagcctccagagtagctggaattacaggcacgtgccaccatacccggctgattttttgtatttttagtagagacggggtttcaccacgttggccagactggtctcaaactcctgacctcaggtgatccgcccacctcagcctcccaaagtgctggaattacaggcgtgagccaccgcgcccggcctaaacccccacaaattccgtaatggggcctttcatcctctatgcccaggccactctcacactgggtagtgtactttcattttcagtaaatctcttcattccttcctcgctttgtttgtgtgttttgtccaattctctgtgcaagatgccaagaacctggacactctccaccggtaacgcttccacctacatgagccagtaaaatttccttcatttgaagccagcattatttgaattttctcttgtttgtgtgtatgttgaatttttagatttttttttctcctttataactgacagcatccctgagacactttgcaactccaatatctgacactcagctccaggtacccagtgttatctggctggctttccccttgtagtgacacttgtatgcagtccagtctactccaattcctcatcatctcacgtcctactgtctctagtgagtagcactgtccatcagccaagctcacaaagatcctttcctctgagaaattccttgtttctccctgagtggacccacagcattatggactgaactgtgacctctctgtcccctgcattcatatgctgaagcaccagacctcaatatcactatatttggagacagggcctgtaaggaggtaattaaggttaaatgagacgaatagggtaggattctggtaggagcagtgtccttttaagatgaacggacaccagagatctttcttttcctgctcacacaccaaagagaggccatgggaggacacggcaagaaggcagccttctgcaaatcaggaagagaggcctcaccaggaaccagccttgctggcccctgatcttgtaattccggcctccagaactgtgaaaaaatacattcctcttgtttgagctggtatcaaccacaggttcttcaactttcatgtaataaaaattgatgggaggcagagcaagtttcccagacaaggtgttactaggcacttattttcttttgcttttctttcttttttttttttttcgagaaggagtttcattcttattgcccaggctggagtgcaatggtgtgatctcagttcactataacttctgcctcccaggttcaagtgattctcctacctcagtctcccaagtagctgggataacaggcatgtgccaccaggcccagctaattttttgtatttttagtagagatggggtttctccatgttggtcaggctgctctcaaactcccaacctcaggtggtccacccacctcggcctcccaaagtactgggattagagacgtgagccactgtgcccggcctaggggcttattttcgaacacagagaagacagcacaagagagagagttctctgactggttccccaaagagagtcaggagagtaattttttgttgttgtgttttgagatggagtcttgctctgttgcccaggctggagtgcagtggcaacatctcagctcactgcaacctctgcctcccaggttcaagcgattctcctgcctcagcctcccgagtagctgggactacaggtgcatgccaccacacccaactaatttttgttatttttagtagagatgaggtttcaccatattggttaggctggtcacaaaatcctgacctcaagtgatctgtccgcctcagccacccaaagtgctgggattacaggtgtcagccaccatgcacagctaggagagtaattttaaagtggcaaaaagcaggaagggagtgacatttacacatgtagaggcagaaaactggggcacctaagcagtgttgggaacaggccccccaaaatctggccataaactggccccaaaactggccacagacaaaaatctgtgcagcactgtggcactgtgacactgtgacatgttcatgatggccatgacgcccacgctggaaggttgtgggtttaccagaatgagggcaaggaacacctggcccacccagggtggaaaaccgcttaaaagtgttcttaaaccacaaacaatagcatgagcaatctgtgccttaaggatatgatcctgctgcagataactagccaaacccatccctttatttcccataaggaatactattagttaatgtataatctacagaaacaatgcttatcactggcttgctgtcaaaaaatacgtgggtaaatctctgttcaaggctctcggctctgaaggctgtgagacccctgatttcccactccacacctctatatttctgtgtgtgcgtctttacttcctctagcgccactgggttagggtctccaccactgagctggtctcagcaaagcagttcggttacatgcttcttcttgcatcgcatgtctcattagcatgttaaatcttcacccctgggtgtgatttttcctattatcataatggtaggattaaggatcagtcattctcctggccttgtgtgtatgcgggtggtggggttagttttcttgagcaagatttatggtggaatgcttcttatcttcgtttcttcagatagcttgcagcagctgcaagattttgaccacaggtaaggtgccagggtggtggtggtacaaggtctggtagttagtaggtatgtctagaggaatgcaggaatgcattagtgggggtggcacaataggagacacaccgagggccgtccctaccccgtctcaaaaccacccaatctgtgatattttgttatggtggtcctaacagaggaatcatgtgtatactaccatgtgtgtgccatgcaatgtccactcctgagttgatgctctaaagttggacgttttgactcagtggttcccaaactttgggccccaggcttctgaggcattatggagctcattattaccgggagcccctgtatgtttaaggatctgatgcaggttgggcgcagtcgctgacacctgcaaccccagcactttgggagcccaatccaggtggattgctgggagcccaaggcaggtggattgccaggagtttgagaccagcctggccagcatggtgaaaccccatctctactaaaaatataaaaattagttgggcatggtggtgcacgcttgtaatcccagatattccggaggctgaggcacaagaatcgcttaaacccaggaggcagaggttgcagtgagccaagatctcatcactgcacgccagcctggtgacagaatgagatgctgacataaaaaaaaaaaaaaagatatgaaaaagatatgatccaaaataaagtcccacacatacttaatctatttcttcatgctaagtgtgctattattattaacaatatacacattgattcaagtgttaaggaaggctttgatcactttctaacattcctttctcaaaggtaaatatgttgcttgcatggtgatccttaccttgacccctgtgccaagacctgaagttattccttgcttgggacctggttatcactgtgattcagaagcaaaggaacagtagtttcagaatttctctaattctagctctgatccttatttgagagagaaataaataatttctccagttccttaaaactagtaacctaggtgggactggaagattgatctttgaagctgcatttgtgtaacatgcatattctgtttacctacattgcaacttcgagcagaccaataaacatagtaatgttgaagatgatcttattcacagtttttacaagactgagaacaccttggttattattcacattaaagaggagtaggccgggcgcagtggctcacacctgtaatcccagcattttgggaggccaaggtgggtggaacacgaagtcaggagtgcgagatcagcctggccaacgtggtgaaaccccatccctactaaaaatacaaaaatcagcctggcatggtggtatgcacctgtagtcccagctactcagaaggctgaggtaggagaatcacttgaacctgggaggcaaaggttgcagtgagccaagatcgcgccattgcactccagcctggccgacagagcaagaccctgtctgaaaaaaaaaaagaggagtattattttcagtttgggtggctgcagggaagtcaggtttcccctagcaagcatgctctgagtgtcagggaggaaactggcactagattctgagggagagatcaggtcttccttaggggaaatacccttttccttgggcaagaggttaaggtggcactgagccttcggggtgtgggtagaagctggtgctaagcctctgaggtggaaagcttagggaggtcacagtaaaggtgaggagttgggggctcccagaagacgattagggagagaaggtgcggaagacaaggaacagcaaggagagagccataagattgtgtaaagggagaagattcactggaacacattctccacccctagaaaggttggttgtgataaaaatccttcaacaagctgagtttcttctgtgtgtgataggggtgagaaggaagatttactccaaaacagaggtaacaaatgaagatgtttccaggacaaaggaagacaagcttgagaaagaaagaagacggcctgggaattcccaaaatatgggggatacttatagaaatctgagtcagcccaagactgttatcaaaagacacagtgtaggccgtgtgcaatggttcacgcctgtaatcccagcactttgagaatccgaggtaggaggattcgttgatcccaggagtttggagaccagcctgggctacataaggagaccctgtctctacaaaaaataaaattagacaggtggcggtgcatgcctgtggtcccagctactcaggaggctgaggtgggaggatcacttgagcccaggaggttgaggctgcaatgagctatgattgcactactgcacaccagcctgggtgccagagtgaaatgctgtctcaaaaaaaaaaaaaaaaaaagtgggcctgtgaaaccacagcgcttggctttgaatcctaatgtgaacttgggcaagttacttaaaaactcttgagctttaatttcttcatctgtaaaattgaaataatggctttattatagagtgttatgagaattgagcctggcacatagaaaatctgaatacatgtgagatatagttattataaaaagtatgcttgcgtccaggcagggtggctcacgcctctaatcccagcactttgagaggctgaggtgggtggatcacttgaagtcaggacttccagaccagcctggccaacatggtgaagccccatcttaccaaaaatatgaaaattagccaggcatggtgtcgcacacctataatcccagctactcggcaggctgactcagaattccttgaacctcggaggcggaggttgcagtgagccaagatagtgccactgcactccggcctgggcaacagagtgagactctgtctgaaaaaataaaaggtatgcttgggcctccttcttaaattcattaatttaacaaatatcaagtccatatttaattatttaatctacgcatcagtctataccctgggaaaaccacattaaaaaaatactgcctacatggagctcatattctagtgggggagtcagtatatgagtagataataagtgctaggacgaaaaatacaacaggataagagtgtagggaaagctgaattggtctaggaaatgtgacctgacacttgagcacaaatagcttttttttttttgagacggagtctcgctctgtcaccaggctagagtgcagtggcatggtcttggctcactgcaacctccaccccctgggttcaagcgattctcctgcctcagcctcccgagtagctgggactacaggtgcgtgccaccacgcacagctaattttttgtattttagtagagacggggtttcactatgttcatcaggctggtcttgaactccttacctcaggtgatccaccggtctcggcctcccaaagtgttgttgagattacaggcgtgagccaccgtgcctggccattaaattgttttctcttgtttaattaacttcaattctgccacttgctagatgctctcttaaaatagctgaaattattgtgtgcttagtctcactctgtccttgttttgttgtatagtattttttattttattttattttttgagacggagtctcactctgtcatccaggctggagtgcagtggtgtgatctcagttcactgcaacctccgcttcccagattcaagcaattctcctgccttagcctcctgagtcgctgggattacaggcatgcatcaccacacccggctaattttgtatttttagtagaggcaggatttcaccatgttggtcaggctgatctcgaactcctgacctcacctgatccatatgcctctgcctcccaaagtgctgagattacaggcatgagccaccacacccagcctgttgtatagtatttaaataaaaggcacatagaagaaaatagttgttgaggttttaagataatcattggtactttctctgttactctatttaaaatgatgatgagaaaaattcattgtcttactttgctaagtttggcataggagctgtcagtctttttttttgagacagggtctcaccatgttgcctaggctggagcgcagtggctcagtctcagctcactgcaatctccacctctcaggttcaagcaattttcaggactcagcctcccgagtagctgccattacaggcatgcaccaccaggcctggctaattttttttttttttttgagacactgttttgctcctgttgcccaggctggagtgagcaacaggattaatgcacatgcttgagcccactcacccaactcctgagatcttatcaggaagctgctgatcaccagttccaggtgtttctatctatcaggagactgtatcttctcctcgcactgactgtgaccaattattattttagatggacgctttttttttttttcagatggagtctcgccctgttggccaggctggagtgcagtggcatgattgcggctcactgcaacttctgcctcctgagttccagtgattctcctgtctcagcctcccgagtagctgggattacaggcgtgtgccaccatgccctgctaatttttgtgtttgtagtagagatggagtttcaccatgttggccaggatggtcttgatctcttgacctcttgatccgcttgcctcggcctcccaaagtgctggaattacaggcatcagccaccgtacctggcctcccatgttctttatatagatgagaagcctgtttttcagttaactgatgcaagggggctggacttctctcctttcaaataaaaccttgaaggtcctgatgtatattgaaaagggcggctgggtgcagtagcttgcgcttgtaatctcagcactttgatgtggggaaaagggagatcagactgttacggtgtctatgtagaaaaagcaagacataagaaattccattttgatctgtactaagaaaagttcttctgccttgagatgctgttaatctgtaaccttagccccaaccccgtgctcacagaaacatatgctgtactgactcaaggtttaatggatttagggctgtgcaggatgtcctttgttaaaaatgtgtttgcaggcagtatgcttggtaaaagtcatcaccattctccattctcaactacccagggacacaatgcacggcggaaggccgcagggacctctgcccaagaaagcctgggtattgtccaaggtttccccccactgagacagcctgagatatggcctcatgggaagggaaagacttgactgtcccccagcccgccacccgtaaagggtctgtgctgaggaggattagtgaaagaggaaggcctctttgcagttgaaataagaggaaggcatctgtctcctgctcatccctgggaatggaatgtctcggtataaaacccgatcgtacattctatttaccgagataggagaaaaccgccttgtggctggaggtgagacatgctggcggcaatactgctctttactgcactgagatgtttgtgtaaagtcaaacatgcacatccaggcacagcacctttccttaaacttatttatgacacagagtcctttgctcacatgttttcctgctgaccctctccctaccattactctatagtcctgccacatccccctcgccgagatagtagagatagtggtcaataaatactgagggaactcagagaccagcgccggtgcaggtcctcacttgctgagcgccagtcccctgggcccacttttcttcctctatactttgtctctgtgtcttatttccttttctcagtctctcatctccaccttgcaagaaatacccacaggtgtggaggggcaggcccccttcactttgggaggccgaggcaggaggatcacttgaggtcacgagtttgagaccagcctggccaacatggtgaaaccccatctctactaaaaatgcaaaaattagctgggcatggtggtacacgcctgtaaccccagctactccggagactgaggcagaagaatcgcttgaacccggaaggcagaggttgcagggagccaagattgcaccactgcactgtagcctgggcaacagagcaagactccatctcaaaaaaaaaaaaaaaagtaaaaagaaaagagcatggaggtgattagaggaattgaggaaaatttgtatttggggttcctcatcctcccagggtaacatgcagaacaaatgcttaaacagacaggaaagtccttctgttataggaggaagtgagagaaatactcatggaaagccttcacatgctcacaaaaacagcagccattggatttgagtgggcggtgttgacttgcccccttgacataaagaaggaacctccagaggacctggggcttgggataagggctcgaaaatgacaaagcgctgctaactcgaagaaaagccagtaggtagggccattaaagggccacagagtaaggccctatgtagacaaactgcttcaaaagccaccaaaaaacttggccttggagtgtaacagggatgaaaagtatttggtaagtcacaaggagctggcagagcctggcttccaactagtgcctgtcccagcaatgaaccaacagacaggggaaggttaggaggtcattgagctggtaaggtcaaaacagctacaaatttcaagggtcatccacaagggagacccgctctttgcctgctacacaaatgcaacaaaggccgcgggagcacaaatcacaaacggggattgtgtgttgaaggcagagaaggaagtcatgtgtcatgcaaagtgaaagcagagaaaaggcagacttgcttgcaaggcagacagtctggtgggtgcacaaggccatttcagaatacacacggaggaaacaagagaatagacagtgcaggatttggggaaagagctgatttttgttgaagaagcaaaggtagccccatacatgacatggtcttagcctttaccctaccactcccacaagcctcactgtcccagtgggccattagtgtctcaggtctactcagtgtggaatacaagatccttcccacccctacaagtcacccatgagggtgagctgagagattagccaagaggaccagaaccattgtggccgagaggaatcattctagaggatggttagtaaacaggagagcaaaaggggagaaggaaactgcgtatcggagttaaacgcctccagctgaagaaggcaaggtgtagaggtgtgtattagtccgttctcaagctgctaataaagacatacccaaggctggatattttataaaggaaagaggtttaatggactcatagttccgcatggctggggaggcctcacaatcacggcggaaggcaaaggagaagcaaaggcacatcctacatggcaacaggcaagagagtatgttcaggggagctcccctttattaaaccatcagatctcatgagacttattcactatcacgagaacagcacggaaaaaacccactcccacgattcaatgacctcccaccggatccctcccaccacatgtggggattattacaattcaaggtgagatttgcatggggacacagaaccaaaccatatcaaggtttcttaccactagggaatgtatcttagttgtgacaccaacgcatgttaccagcagcaaatttgtacagatctgctgcaaactcaatccttgcctctgcagaggaaagcatttggcaggggcagaagtagttttaaggcagagcaagagacagaggcaagcttaagagcaggagtgagagtttattaaaaagtgttacagcaggagcaaaaggaagcaaagcacatttggaagagggagaagtgggcaacttgggagatgcaagtgccgtgttcagcccttgacttgggggtttatacactggcgtggttccagggttttcttttctcacttgatttttcccctccccttgactgctgcatgtgcagtggtggtcagcacttgggagggtgactgcatgcacagtgcgtttactgaggttgtgcacatgctctgtaggtacaattttcctttaccagtcgaacaaccgcagaggaagatcagacatgggccattttgcctcttaatgcgccagtctggtcttaaactcctgacctcaggtgacctgcccatcttggcctcccaaagtgctgggattacaggcctgagccaccatgcccagtcaatttttgtttttagtagagacatggttttgtcattttggctaggctggttttgaactcctggcctcaagtgatctacctacctcagcctcccagactgctgagattataggcatgagccactgcacccagcagaacctatcacatttgtgatgcttttgatcacagttctgtcactagattgctagcaattagatgtatgcaatgagtaagctaactactttaacacagtggtttgaagtactgcaggcagtaatgactgaacacgaaatcacagcattttaatctgtgacatgttagagagaatgccaggactctctgcagtacaaatgttctattaactaatccttgtgctgctaaattatagggctttggctcctgggtctggaaaagacaccagttcctactaaatcttaagcactgacaccagtcaatgccttgtcttcagaccccaagaggtgacaatcaaaatgaagtgctttcatgagatatggggccagaaactgaaaccgttcaatccctctaggctcacggactattgccgaagaggtgggtgtgtgatattatagttagagccaattttgagggaaaaaattatctcagagtttttctctaaattaaacattagcatccaaagcatactgacacaaggcaggtgtctgggcccctgtatcagaataatggggttttcttgggggcattgatttgatttgtaataaaaaaaagtataggcaagttgtaatgtaatctgagcactttgggaggccaaggcaagaagattacatgaggccaggagtttgagaccagcctgggcaacatagtgatgttagagtaggtagttagacagacatgagcagggcaggaaaaggcctcaagtaatgtcaggcaaccatcaggtaactgtcagttgttaaagtgtccctctgggctgggcgcggtggctcacacctgtaatcccagcactttgggaggctgagaggggtggatcacctgaagtcaggagttcaagaccagcctggcaaaaatggtgaaaccccatctctcctaaaaatacaaaaattagtcgggcgtggtggcacacgcctgtaatcccagctacttgggaggctgagacaggagaatcgctggaacccaggaggcagaggttgtagtgagccacgatcccgccactgcactccagcctggccaacagggcgagactccatctaaaaaaaaaagtgtccatctaaaataataattggtcacagtcagtgccagaggaagagacagtctcctgatagatagaaacacctggaactggtgatcagcagcttcctgataagatctcaggagttgggtgagtgggctcaagcatgtgcattaatcctgttgcccactccagcctgggcaacaggagcaaaacagtgtctcaaaaaaaaaaaaaaaaaaattagccaggtctggtggcgcatgcctgtaatggcagctactcgggaggctgagtcctgaaaattgcttgaacctgagaggtggagattgcagtgagctgagactgccagtgcactccagcctaggcaacatggtgagaccgtctcaaaaaaaaaagactgacagctcctaggccaaacttagcaaagtaagacaatgaatttttcttgtcatcgttttaaatagagtaacagagaaagtaggaatgattatcttaaaacctcaacaactattttcttctatgtccctttcatttaaatactatacaacaggctgggcgcggtggctcacgcctgtaatctcagcattttgggaggcagaggcaggcagatcagctaaggtcaggagtttgagatcagcctgaccaacatggtgaaaccccgtctctactaaaaatacaaaattagccaggttggtgatgcatgcctgtaatcccagcgactccggaggctaaggcaggagaattgcttgaatctgggaagcagaggttgcagtgaactgagatcacaccactgcactccagcctgggtgacagagcaagactctgtctcaaaaaataaaataaaataaaataaaaaatattatacaacaaaacaaggacagagtgagactaagcacacaataatttcagctattttaaaagagtatctaggaagtggcagaattgaagttaattaaacaagagaaaaaacttaatggccaggcacggtggctcttgcctgtaatctcaacaacactttgggaggccgagaccggcggatcacctgaggtgatcaagaccagcctgatgaacatagtgaaaccccatctctactaaaatacaaaaaattagctgtgcgtggtggcccgcaccggtaatcccagttactcaggaggctgaagcatgagaatcacttgaacccacgaggcggagattgcagtgagctgagatcgcaccactgtactccaacctaggcaacagagcaagactccatctcaaaaaaataaagaaaatttttatttatttatttatttattttttgagacggagtctcgctctgtcgcccaggctgaagtgcagtggcctgagctctgctccctgcaagctccgcctcccgggttcacgccattctcctgcctcagcctcccgagtagctgggactacaggcgcccgctaccgcgcccggctaattttttatatttttaatagagacgggttttcaccgtgttagccaggatggtctcaatctcctgacctcgtgatccccctgtctcagcctcccaaagtgctgggattacaggtgtgagccaccgcgcccagccaaaaataaagaaaaaatttaagaaaattaaaaaagaaaaaagagcatcatctcccatttccaagattggtttctagatacagtaatccggtaactttcaccattagaatctttaaaccagtgcaacacttgtacatatattgattttaagtacacaaatgaaggcccaacagtgagagaaggcttaggatcaaaaatcactagaaagtctcagtttttttgttactacttaatcacttaattttaataatagtaaaacaggccaggcacagtggctcatacctgtaatcccagcgcttttggaggccaaggtggacggatcacttgaggtcaggagttccagaccctcttggccaacatggcaaaaccctgtctctactaaaaatacaaaaattagccagacatggtggcgttcgcctgtagtcccagctatttgggaggctgaggcaggagaaatgaacctgggaggcggaggttgcattgagatcgtgccactgcactccagcctgggccacagagcgggactccatctcataaaaaaagctttgtaggccgggcgcagtggctcaagcctataatcccagcactttgggaggctgaggcaggtggatcacgaggtcaggagatcgagaccagcctggccaatatggtgaaacctcgtctctactaaaaaatacaaaaattagccaggtgtgatggcacgtgcctgtggtcccagctactcaggaggctgaggcagaagaatcgcttgaacccgggaggcagaggttgcagtgagccaagatcatgccactgtactctagcctgggtgacagagcaagaatccatctcaaaaaaaaaaaaaaaagaaagttaggcaggtgaaatgctgcttgcctgtagtcccagctacttgagaagctgaggtgggaggattgcttgagcccagaagcttgaggctgcagggagctctaatcacgccactgcactccagcctgggtgacacatcgtgagcctgtctcaaaaactaataaaagtaaaataaaattaattttgaagttaagctgctccattataaaaggtcacctgtttttaattgtttattacaatttttttttacatgaaggaaattatgcaaatcttaagtcgtaaaacatgatgaatttttccagctttattacatgcaataaaatacaataaaataaacctgtcttaagtgtacagttttacataaaataaaatttacatacaataaaatacacctgtcttaagtgcacaattcgatgaattttagtgatgcatatagctgtaaaactaccaccacaaacaaaatatagaatatttccatcactctaaaaagttttctcatgccctttgatcttcttccctgccctccccacatccttcctgccacacgcccaggcaactgttgctctgttttatgtcactatgattttgcctttttgaaaatttcatgtaaatatttttatatatgcaaagtatatagtcttttgtattttagttcttttacttagtattatgtttttgagattcatctttattgcatgtatcaatatttattttctattgctgagcaatcttcctttgtaaccagttaatggatgtttgggttgtttgcagggtttgattaatatgaataactatcaatataaacatttgtgtgcagtctttcaacatttttttccctctgttgcccagactggagtgtggtggtgtgatcatggctcactgcagcctcaacttcctgggctcaagcaatcctcctacctcagcctcccaagtagctgggactacaggagtgtgctattttttttttttattttttttattttttattttttatttttttatttttttatttttttattgatcattcttgggtgtttctcgcagggggggatttggcagggtcataggacaatagtggagggaaggtcagcagataaacaagtgaacaaaggtctctggttttcctaggcagagtgtttgtgtccctgggtacttgagattagggagtggtgatgactcttaaccagcatgctgccttcaagcgtctgtttaacaaagcacatcttgcaccacccttaatccatttaaccctgagtggacacagcacatgtttcagagagcacagggttgggggtaaggtcacagatcaacaggatcccaaggcagaagaatttttcttagtacagaacaaaatgaaaagtctcccatgtctacttctttctacacagacacggcaaccatccgatttctcattctttttcccacctttcccccttttctattccacaaaaccgccattgtcatcatggcccgttctcagtgagctgttgggtacacctcccagacggggtggtggccgggcagaggggctcctgacttcccagtaggggcggccgggcagaggcgcccctcacctcccggacagggcggctggccgggcagggggctgacccccccacctccctcccggacggggcggctggccgggaggggggctgacccccccacctccctcccggactgggcggctggccgggcggggggctgaccccccacctccctcccggacggggcggctggccgggcagaggggctcctcacttcccagtaggggcagccgggcagaggcgcccctcacctcccggacggggcagctggccgggcggggggctgacccccccacctccctcccggacggggcggctggccaggcagaggggctcctcacttcccagtaggggcagccgggcagaggcgcccctcacctcccagacggggcggctggccgggcggggggctgacccccccacctccctcccggacagggcggctggccaggcagaggggctcctcacttcccagtaggggcggccgggcagaggcgcccctcacctcccggacggggcggctggccgggtggggggctgacccccacctccctcccggacagggtggctgctgggcggagacgctcctcacttcccagacggggtggcagcagggcggaggggctcctcacttctcagacggggcggttgccaggcggggggtctcctcacttctcagacagggcggccgggcagagacgctcctcacctcccagacagggtcgcggccgggccgaggcgctcctcacatcccagacggggcagcagggcagaggcactccccacatctcagacgatgggcagccgggcagagacgctcctcacttcctagatgggatggcgaccgggaagaggcgctcctcactttccagactgggcagccaggcagaggggctcctcacatcccagacgatgggcggccaggcagagacgctcctcacttcccagacggggtagcggccgggcagaggctgcaatctcggcactttggggggccaaggcaggcggctgggaggtggaggttgtagcgagccgagatcacgccactgcactccagcctgggcaccattgagcactgagttaacgagactctgtctgcaatcccggcacctcgggaggccgaggctggcggatcactcgcggtcaggagctggagaccggcccggccatcacagcgaaaccccgtctccaccaaaaaaatacgaaaaccagtcaggcgtggcggcgcgcgcctgcaattgcaggcactcggcaggctgaggcaggacaatcaggcagggaggttgcagtgagccgagatggcagcagcacagtccagcttcggctcggcatgagagggagaccgtggaaagagagggagagggagaccgtggaaagagagggagagggagagggagagggagaccgtggaaagagagggagagggagagggagaccgtggaaagaggggagagggagagggggagggtgagggagagggagagggagagagagagagggagcgagtgtgctatttttttgtatgttttgtagagacggagtcacgccatgttgcccaggttggtcttgaactcctggcctcaagtgacccatccgcctcagcctcccaaagtgctgggatcacaacaagcatgagccaccgcccccggcctgatcatacatttttatttccctttaattttgtatgtgttgggttcatgggtcaaatggtaagtatatgtcaaacttcataagatattgccatattctttcccaaagtggctactacccattttgcattccaaccagcaatgtgtaaaagttctagttgttctacatcaaggccatctttagaagtgaatcttcccagactttaaaaaacatgcatatattatgtatttttaatgtaaaaatggttcacagatatcacttaatatatcagggtcatccttgtattgtctaaattagacttctgtgacaatttttttaattaattttttttgagacagagtttcattcgtgttgcccaggctagagtgcaatggcacgatctcggctcaccgcaaccttcacctcccaggttcaagcgattctcctgcctcagccttccaagtagctgggattatagtgatgtgccaccacacccggctaattttttcgtattttagtagagacggggtttctccatgttggtcaggctggtctggaacttctgacctcaggtctcgaatttccgcccacctcggcctcccaaagtgctgggattacaggtgtgagctaccgggcctggcattctgtgacaattttaatgttgtgttccaatgtctgaatctcccattatttatgtatttattatttattttgagatggagttttgctcttgtcgcccaggttggagtgcagtggcacaatcttggctcactgcaacctccgcctcccaggttcaagcgattctcctgcctcagcctcctgagtagctgggattataggcgcccaccaccatgcccagctaatttttgtatttttagtagagacggggtttcactaggttggccaggctggtctccaactcctgacctcaggtgatccacatgcctcggcctcccaaagtgctgggattacaggcatgagccaccacccccagcctctcccattatttattaccaaacaaggcaagaaaaaagggtgaggaggattttggttggatttatttcagatattggcacttggaataaattttgtttagtgagtctaaggtttgcaaagttaaaaatcaggtattggctaatgtataacatcatgatacaggattttttttttttttttttttgagacagagtctagttctgacccccaggctgcagtgcggtggggcaatctaagctcactgcaagctccacctcccgggttcacgccattctcctgcctcagcctcttgagtagctgggactataggtgcccgccaccatacctggctaattttttgtatttttagtagagacggggtttcaccgtgttagccaggatgatctctatctcctgaactcgtgatccacccgcctcggcctcccaaagtgctgggattacaggcgtgagccaccatgcccggccgatacaggattgttaaaatactgaaggtatttcatcacataaaggtatttttggacaggcatggtggctcacgcctgtaatcccagcattttgggaggccgaggtgggcagatcatgaggtcagcagattgaggccatgctggccaacatggtgaaaccccacctctactaaaattaaaaaaaaaaaaaattagcccagtgtggtggtacacacctgtagtcccagctactcgggaggctgaggcaggagaatcgcttgaacccagggggtggaggttgcagtgagccaagaccatgccactgcactctagcctggtgacagagcgagactccgtctcaaaaaaaaaaaaagctatttgtgctcaagtgtcaggtcacatttcctagaccaattcagctttccctacactcttatcctgttgtatttttcgtcctagcacttattatctactcatatactgactcccccactagaatatgagctccatgtaggcagtatttttttaatgtggttttcccagggtatagactgatgcgtagattaaataattaaatatggacttgatatttgttaaattaatgaatttaagaaggaggcccaagcataccttttattttttcagacagagtctcactctgttgcccaggccggagtgcagtggcactatcttggctcactgcaacctccgcctccgaggttcaaggaattctgagtcagcctgccgagtagctgggattataggtgtgcgacaccatgcccggctaatttttgtatttttagtaagatggggtttcaccatgttggccaggctggtctggaagtcctgacttcaagtgatccacacacctcagcctctcaaagtgctgggattacaggcgtgagccaccctgcctggccgcaagcatactttttataataattatatcttacatgtattcagcattttctatgtgccaggctcaattctcataacactctataataaagccattatttcaattttacagatgaagaaattaaagctcaagagttggctgggcgtggtggctcacgcctgtaatcccagcactttgggaggctgaggcaggtggatcacgacgtcagcagatcgagaccatcctgggtaacacggtgaaaccctgtctctactaaaaatacaaaaaaaattaaccgggcgtggtggtgagcacctgtagtcccagctactcgggaggctgaggcatgagaatggcgtgaacccaggaggcggagcttgcagtgatcccagatcacgccactgtactccagcctgggcgacaggcgaaactcagtctcaaaataaataaataaataaataaagctcaagagtttttaagtaacttgcccaagttcacattaggattcaaagccaagcgctgtggtttcacaggcccacttttttttttttttttttgagacagcatttcactctggcacccaggctggtgtgcagtagtgcaatcatagctcattgcagcctcaacctcctgggctcaagtgatcctcccacctcagcctcctgagtagctgggaccacaggcatgcaccgccacctgtctaattttattttttgtagagacagggtctccttatgtagcccaggctggtctccaaactcctgggatcaacgaatcctcctacctcggattctcaaagtgctgggattacaggcgtgaaccattgcacacggcctacactgtgtcttttgataacagtcttgggcttactcagatttctataagtatcccccatattttgggaattcccaggccgtcttctttctttctcaagcttgtcttcctttgtcctggaaacatcttcatttgttacctctgttttggagtaaatcttccttctcacccctatcacacacagaagaaactcagcttgttgaaggatttttatcacaaccaacctttctaggggtggagaatgtgttccagtgaatcttctccctttacacaatcttatggctctctccttgctgctccttgtcttccgcaccttctctccctaatcgtcttctgggagcccccaactcctcacctttactgtgacctccctaagctttccacctcagaggcttagcaccagcttctacccacaccccgaaggctcagtgccaccttaacctcttgcccaaggaaaagggtatttcccctaaggaagacctgatctctccctcagaatctagtgccagtttcctccctgacactcagagcatgcttgctaggggaaacctgacttccctgcagccacccaaactgaaaataatactcctttttttttttttttcagacagggtcttgctctgttggccaggctgtagtgcaatcgtgcgatcttggctcattgcaacctttgcctcccaggttcaagtgattctcctacctcagccttctgagtagctgggactacaggtgcataccaccatgccaggctgatttttgtatttttagtagggatggggtttcaccacgttggccaggctgatctcgcactcctgacttcgtgttccacccaccttggcctcccaaaatgctgggattacaggtgtgagccactgcgcccggcctactcctctttaatgtgaataataaccaaggtgttctcagtcttgtaaaaactgtgaataagatcatcttcaacattactatgtttattggtctgctcgaagttacaatgtaggtaagcacaatatgcatgttacataaatgcagcttcaaagattaatcttccagtcccacctaggttactaattttaaggaattagagaaattacaggcctgagccaccgtgcccagccaatttttgtatttttagtagagacatagtttcgtcattttggccaggctggcatcgaactcctgacctcaagtgacccgcctgccttggcatcccaaagtgctgagattacaggtgcgagctactgcacctggccacccttttcaatatacatctggaccttcaaggtttaatttgaaaggggagacgtccagctcccttgtgtcagttagctgaaaaacaggcttcttgtctacataaagaacatgggaggccaggcgcggtggctcacgcctgtaatcccagcactttgggaggccaaggcaagcggatcaccaggtcaagagatcaagaccattctggccaacatggtgaaaccccatctctactacaaatacaaaaattaggtgggcgtggtggggtgcacctgtagtcccagctactggagaggctgaggctggagagtcgcttgaacccaggaggcggaggctgcagtgagccgagagtgtgccattgcactccagcctggcgaaagagcgagactccatctcaaaaaaaaagaacacagggagtgggaatatgagaaaagagataataattttgttattggaatgcttagaacaagagtcactataaggtcatggagacaatgatacagggtggcccaaaaccacaggtgcaagagaccaaagtacctacagaacagcgatgaaggcgagtccccacctataggcacaaaacagatttcccctaggacagagttgaaggctggtcccggaaatgggacaagaccagggttagggtacccagtaagcactggttcattctggagcccctaggatgaatggggggacaccctgttcagtccggtctgccataagtgcaggaaaaagatagtagggaaactagaagagatgccttttcccttctctcctctgctctctcttcacagatgggtaatcatgtctccatacaacaagacgtgcccctcggatgcatctcaagaactgggataagttcaaccccaaaccctaaaacgaaaaactaattttcctttgcaaaaccagaggaactctggccaaaacaaaagtacaaattttaattttttttttttttgagatggagtctctctctgtctcccaggctggagtggcgccatcttggctcactgcaagctccgcctcccaggttcacaccattctcctgcctcagcaacccgagtagctgggactacaggcgcccgccaccatgcccagctaattttttgtatttttagtagagacggggtttcaccgtgttggccaggatggtctcgatctcctaacctcgcgatctgcccacctcagcctcccaaagtgctgggattacagatgtgagccactgcgcccggcaaaagtacaaattttcataccgtcctccagctggacctttcctgccaccatcagggcaaatagtcagaggtcctctatttacgaaccttcatggcctgaaggaaaaaccccaatccttataaagcttgtaaggcaaaccccactgtcctagctatgcttagctgccttctccagggccctccactgggactcacctgctgactcccttctcctccaaaagccaaggggaaaaattgcctccccctcctccacaggccaaaaagtgaaaaacagccacctgcctcctcccctgtttatctcactcccagacctttggaatcagccctgccctacacaaagcccgttagttctccctccaggctctgcttgttagaggaagtaagtgagccagttggacccatccaagtcctcatctccttttcagcctggacctttggcaaattaaaaaaaaaaaaaaaaaaaaactaggaaagttctcaaatgaccccagaagctcattgaaggcttccaaatattcacccttacatttatttatttatttttttgagacagagtctcgctctgtcacccaggctggagtgcagtggtatgatctcggctcactgcaaccttcacctcctgggttcaagcaattgtcatgcctcagcctcccgagtagctgggactacagatgcatgccaccatgcccagctaatttttctattcttagtagagacggggtttcgccatgttggtcaggctggtcttgaactcctgacctcaggtgatccacttgcctcagcctctcaaagtgctaggattataggcatgagccactgtgcccggtcagcccttacatttagattaacttgaaaggacataaatatcctcctgggacaagccctctcacgggaggaaagagaaaccatctgtgaagcagccagacactgtggggatgaattacacctggcaaacgtcaactactctcgaggggctacagctgttccccaacaagaccccaattgggactacaatatccaagcaaaaatatgggccaggaaccacatgctgctgtgtctaatagagggaataaaataaagtaaggttaagtctaggaactctaataagttagccaccataaaccaggggccaaccaaaaatcccatagcctttctcgaaaggctacaggaaacccgtattaagcataccaacttaaacccagaatcccctgagggacaactagttgtaaaggaccatttctttacccaagccatcccggatatcaggaaaaattacaaaagtcagccttaggaccaagtactcctatgccagaaatcctcaaatgagcctcctcgatcctttataaccaaaatcaggacaaggaggacagggctaaggaaaacgaaaatgtagggacaagaggcaggctcaactactagctgttgtgcaagcccaccagccccctccaggttgccttcaagacactcctccaggtaactgccatcagtggggaagactaggccactagagaaggaattgcccaaaatggaaggatgccatgcatagcctgaccaatctgccataggctcggccactggaaagactgtcccaggagacaaaaggcctcccggtcagatctccacccaataatggccttgaactgaaggggctcttcactcaccagcttccaaatcagacgttgtcattaaaggaacaaagccaaggacaactctggaagtggcaggtaggactctatacatttccttcgaaatacaagagctgtctactttatgctaacctccttctccaggcagctttcctccaaatcctgtcgggtaatgggggcaagtggcacccctttctttctttcttttttttttttttttgagacggagtcttgctctgttgcccaggccggagtacaatggtgcgatcttggctcactgcaagctccacctcctgggttcatgccatttgcctgcctcagcctcccaagtagctgggactacaggtgcccgccaccacgcctggctaattttgtttttgtattgttagtagagatgggttttcactgtgttagccaggatggtctcgatctcctgacctcgtgatccgcccacctcggcctcccaaagtgctgggattacaggcatgagccattgcgcccggccccctttgtttctttttgacatctctacttaagacccgaggagccttctacatttgtggccagttatttcaccaatgcctctgcattaactggactggaatgtgtaccataggctgtgtatctccagacatcttcagagctcctggcaatctctctcttcagtaccaattaatggatctatggacattctatttttttttttttttttgagatggagtctcgctctgttgcccaggctagagtgcaatggcacgatcttggctcattgcaacctcggcctcccaggttcaagcgatcctcctgcctcagtcaccctagtagctgggattacaggcatgcacccggctaatttttgtatttatagtagagacagagtttcaccatgttggccaggctggtctcgaactcctgacctcaggtgatccacccacctcagcctcccaaagtgctgggattacaggcgtgagccactgtgcccggcccaagcatttcatcttgcccagggtgaagagggctatccaattaattccacttcttgctagatgtggcattatatccagtatgggaaccagaattgccagagtcacagaagcctccttgaccagctctcaacagacatagccaacaacattgatgccacaactaaaaccttaatagctgtgcaagaacaaattgactcgtcagcagccatagtcctcccaaatcgccaaggagtacatacgttaatggcagcacagggaagaatttgtttagccttagatgaaaaatgttgcttttggttaaatcaattgggaaaagtatacgacaacatcagacaactcgtaaattgagtctcctatgtatgggaacaaggaacaagcctctcagggttggttagattaggagggaacatggaaatggttctcctgggttgtcttcttttaggcccacttgttagtctcctacttttgcttctttttggtccatgtcttctaaatctgataacccaatttgtttcctgtcaccttctggacatcaagctccagatgaccctcagtgagggatactttcctctcaatattcaagagtcacctttctacagagcacccctagacgacccatcagtgagacacgccagaggcgaaatcctgcccatctcgcttggacctggctagatacgactttcaccaacccgcaaagccacccttgctggaatcacagaagcctccttgagattttggtccacgaagacatggaccaaaaaacagcaaaagtgggccgggtgcggtgactcatgcctgtaatcccagcactttgggaggccaaggcaggtggatcacctgtggccggaagttagagaccagcctggccaacacggtgaaaccctgtttctactaaaaaatataaaaattagctgggcgtggtagtgtgtgtctgtaatcccaggtaatcaggaggctgaagcgggggaatcgcttgaacctgggagatggaggttgcagtgagctgagattgcaccactgcactccaggctgggtgacagagtcagactccatctcaaaaaaaaaaaaaaaaaaaaaaaaaaaatcaatcaatgaccagattccccatgattgaggaattgatagaaagttgggagaggggactgaaactggtccaattgtcccatagaactgatgtcaattgtttcataggactgatgtttatggtttcttttgaataaaacaaaattgactcagtcttaaaacttaagaaaattacatttgttttgtctgagttcctttctcaggaaaccaaccagcagggctcccagacagtatctaggaacttaaactcaccaggatcactgcatgaggacagtgaggtgccagacccttcacccatcatgattctctatccaatacctgtttgaccagctcctcttccttaccccaccttaattcctatttttctgtatgaagttacatttcttccttgctatataaatgcctgaatttaattgcttagggagatggatttgagactaatctgccatctcctcaactgcagcatgattaaaaccctcttccctggcaatacttgtctcagtgatgggctttcttttcttttctttttttttttttttttgagacagaattttgcttttgttgcccaggctggagtgcaatggtgagatcttggctcactgcaacctccgcctcccgggttcaagtgattctcttgtctcagcctcccgagtagctgggattacaggtgcatgccaccacgcctggctaattttcgcattttagtagagatggagtttcatcatattggtcaggctggtctcaaactcctgacctcaggtgatctgcctgccttggcctctgaaagtgctgggattacaggcgtgagccattttgtgcccagcagtgattggctttctatgcagccagcaacaagaccaagatagaactcctggtgtttcagtaacaattcccctggagattatgatttcactggtcaagggtggagcctaggaatcagtattgttaacacgtctctcagataatcctgtccttgctcattaggaaactgcaactctaaaataaacatcaaattttgtcattgtagatctatttaaaattaaaacctcttcagtggctccctgatgtggtttagatttgtgtccctacccaaatctcatgtcaaactgtaatccccagtgttggaagagggtgtcagtttccaatctgagctggggtccaagaggagttggtggatgggtggcgggtagctgaaaaaacactctagggagtataggcagttgggacatggccttattatctctctctctcctacagagtcagcagagcagttatattttcacagacaatagtggctcaaagccaggtatgagctcacacaaacaggatacatcaaaatggctacataaatgtgattacatactgcatgcaattgtgcacctgtggtcccaacctgctgtcatgctgtactggatgtctgcctcagcccactcctgactgaagcacagccattttccttacagaggggcctggtggaaggtgattggatcatggaggcatatttccctctttctgttctcgtgatagtgatttctcacaagatctggtagtttaaaagtgtgtagcccctccccctgctctctcttcctcctgctccggccacataagatgtgcctccttccttttcaccttccgccaatgattgtaagtttcctaaggcctctccagccagcttcctgtacagcccacagaactgtaagccaattaaacctcttttcttataaattacccagtttcaggtatttatttatagccgtgagagaacaaactaatacagaaaattggtactggaaagtaggggcattgctgtaaagatacctgaatatatggaagcagctttggaattgggtaatgggcagaggttggaatggtttggagggctcggaagaagacagaaagttgagaggaagtttggaacttcctagagacttgttaaattgtgacctaaatgctgaaagtgatctggacaatgaagtccaggctgaggtggtctcagatggagatgaggaacttattgggaactggagtaaaggtcactcttgctatgctttagcaaagacactggagctttgatccagtgccctagagatctgtggagctttgaacttgagagagatgatatagggtatctggtggaagaaatttctaggcagcaaagcattagagatgtggtctggctgcttctaatagtgtatgcttatacgcgtgaataaagagttgatctacaactggaacttatatttaaaaggcaagcagagcatgaaagtgtggaaaatttgcagcctggccatgtggtagaaaagaaaaacccttgggaggccgaggcgggtggattacttgaggtcaggagttagagaccagcctggacaatgtggtaaaactaaaaatacaaaaattagccggacatgttggcacatgcctatagtcccacctacttgggagggtgaggcaggagaatcgcttgaacctggagggcggaggttgcagtgagccaagatcacgccattgcactccagcctgggcaacaagagggaaactccgtctcgaaagaaaaaaaaaaacaacaaaaaacaaaacccattttcaggacgggaattcaagctagctatagaaatttgcagaagtaaagaggagccaagtgctaatagctaagacaatgaggaaaaggtctcaaaggcatttcagagaactttgcagcagccccacccagaaaagtgggggcagaggcctaggagggaagaatggttttgcaagccaggcccagggtcctgctgccctgcgccttgcctccccagccatgcttccagtacaacctgtggaacaatgaaccaatgaaacctttctgttttgttgttgttgttgttgctttttgagacggagtctcactctgtcgcccaggctggagtgcaatggcatgatcttggctcactgcaacctccgcctcccaagttcaagtaattctcctgcctcggcctccctcccgaatagcctggataacaggctgtcaggcctctgagctgaagctcagccattataacccctgtgacctgcacatacacatctaggtggcctgcaggagccaagaagtctggagcagcaaaagaaaaaaactacaaagaagtaaaacagcgagttcctgccttaactgattaactaacattacaatattttattattgtgacttgtccctgccctaccttagctgatcaatcaactttgtgacattcttcttctggacaatgagtcttatgatctctccaccatgcaccttgtaaacccctcctctgctaacaatagataaccaccttttgctataattttccattacctacccaactcctataaagcaacccattccctatctcccttcgctgactctcttttcggactcagcccacttgcacccaagtgaataaacagctttattgctcacacaaagcctgtttggtcgtctcttcacacggactcacttgacacaggcgtccaccaccacggtcggctaatttttgtatttttaatagagacagggtttcaccatgttggccaggctggtctcgaactcctgacctcaagtgatccacctgcctcggcctcccaaaatgttgggattataggtgtgagccaccgtgcctggctgaaacctcctttctggtaaattacccagtttcagggtttttttttttttttttgatacggagtctcagtcttgtcacccaggctggagtgcagtggctcaatcttgggtcactgcaacctccgccttctgggttcaagctattctcctgcctcagtctcctgaataggtagcacacgcctgtagttccagctacttgggaggctgaggctggtggattgcttgaacccaggaggtggaggttgcagatgacaccactgcactccagcctgggtaacagtgagagtccatcttaaaaaaaaaaaaaaaaaaaaaaagaaaatttccccaggtgcagccaatgttgagaaccaccagaaataatcaagcctgagctgtttaacctggtgttgaaaacccaaccatgaaagcctcctgcctgccgaaatagccccattttctatgacacttgtgcatatgcacgctacagtccagctttgccagattatcttcaaatagggtcatctaaggatttaaaacattaaattacctgtaattcccaaacctatggtactttcacacatctaggtctttccacagtttattctcactttgtcttgaatacttttactgtcctggcaaacagttattttcccacaaggatgaaactactggctgagcacagtggctcatgtctgtaatcccagcacttggggaggcagaggcaggcggatcacttgaggtcaggagttcaagaccagcctgaccaacatggtgaaacccgtctctacttaaaaatacaaaagttagccgggcatgatggcaggtgcctgtaatcccagctactcaggaggcagaggcaggacaattgcttgaacccgggaggtggaggttgtagtcagccaagattgtgctactgcactccagcctgggcaatagagcaagactctccttttagaggttcctctggcacatgtgctgaggtagagtaaaacacttccttctttgtgctaaactacccctcttggcacagagctgtattactatacttatcatatgaggggctagcaatattatatcttgagtacaggtactatgtctggttcatctttatatcccttgcacctagccgagggtaggaacagagtaggcagccaataaatgctttttggcttagtgaaagcactcacaaggaacaaaattaaaacaagcaggaacattaccctttttataaaaaatctgaatataatctaatcatctaaccacactttttttttttttgtttgtagagacaggtgtctcactatgtttcttaggatggtcttcaactcttggcctcaagtgatccttctgccttggcctcccaaagtgctgggattagaggcatgagtcaccacacttggcccacattaagatcttaattaggaaagaatttttaaggccaggtttgtggctcatgcctgtaatcccagcactttgggaggccaaggcaggtttgagaccagcttggccaacatggtgaaaccctgtctctactaataaaaatacaaaaaattagctgggcgtggtggtgggagcctgtaatccccgctactgaggaggctgaggcagaattgcttgaacccaggaggcagaggttgcagtgagccgagatcacaccattacactccagcctgggcaacaagtgcgagacgccctctcaagaaaaaaaaaaaaaaagaatttttaagctgtaggtctcatgtggagaaatacaccttgaaagcactccaaagagagtaatgagccatttccttaattaactataacgtagttcacatgttcattccaaggccttgaaataatcctgtttcttcatatgtatctgatatggcttggctgtgtccccattcaaaactcattttgaattgtaactcccacaattcccatgtgtcgtgggaggaacctggtggcaggtgattgaattacgggggcaagtctttcctgggctgttctcatgatagtgaatacatctcaagaaatctgatggttttaaaaatgggagtttccctgcacaaactctctctctgcctgctgccacccatgtaagatgtgacttgctccttgcctttcaccatgattgtgaggcctccccagccaggtgaaactgtaagtccgttaaaccttttttactttcgtcttgggtatgtctttatcagcagcatgaaaatagactaatacagtaattttggtaccagaagtggggtgctgctgaaaagatacctgaatatgtggaagtgactttggaactgggaaataggcagaggttggaacaatttggagggtcagaagaagacaggaaaatgtgggacagttttgaatttcctagaaacttgctgaatggctttgatcaaaatgctgataataatatggacaatgaaattcagcatgaagtgctcttagatggagataagaaacttgttgtgaactggagcaaaggtgactcttgttatgttttagcagatctactggtggcattttgcccctgccctagagatctgtggaactttgaacttcagagagatgatttaaggtatctggtggaagaaatttctaagcagcaaagcattcaagaggtgacttgggtgctgttaaaggcattgttatttttatttttattttttgagatggagtcttgctctgtcgctagctggagtgcagtggcacgatctcagctcactgcaacctctgcctcccgggttcaagcatttctcctgcctcagccttctgagtagctgggattacatgagtgcaccaccacacccagctaatttttgtattttttagtggagacagggtttcatcatgttggccaggatggtctcgatctcctgaccttgtgatctgcccaccttggcctcccaaagtgctgagataacaggtgtgagccactgtgcccggttggcattcagttttataagggaagcagagcataaaagttcagaaaatttgcagactgacaatgtgatagaaatgaaaatcctggctgggcatggtggctcacgcctgtaatcccagcactttgggaagccaaggcaggtggattacctgaggttgggagttcaagaccagcctgaccaaaatggagaaaccccatctctactaaaaatagaaaattagccgggcttggtggtgcatgcctctagtcccagccacttgggaggctgaggcaggagaatcacttgaacctgggaggtggaggttgtggtgagctgagtttgcgccactgtactccagcctgggcaacaagagcaaaactccatctcaaaacaaaaaacaaacaaacaaagaaaatcccattttctgaggagaaattcaagctggctgcagaaatttgcataagcaatgaggagctgaatgttaatcaccaagacaatggggaaaatgtcttcagggcatgtcagaggtcttcatcacatccccccgacattcacaggcctggaggtttaagaggaaaaagtggttttgtgggctgggcccagaatccccttgctggttgcagcctgggaacttggtgccctacgtcctagctgctccagccgtgactgaaggggtcaatgtagagcttgggccatggcttcagagcatgtacgcctcaagccttggcagctttcacatggtgtgcacagaagtcaaaattgaggtttgggaacctctgcctagatttcagaggatgcatgaaaatgcctggatatccaggcagaagtttgttgcagggacagggctctcatggagaacctctgctagggcagtgtggaaaagagatgtggggttggagtccccacaaagagtcgctactggggcactgcctagtggagctgagagaagagggccactgtcctccagaccccagaatgatagatccactgatagcttgcactgtgtgcctggaaaaatcgcagacactcaacaccatcctgtgaaagcagccgggagggaagctgggaggtaaagccacaggggtggagctgcccaagaccatgggaacccacctcttgcattagcatgacctggatgtaaaacatggagtcaaaagaggtcattttggagcttttaagatttgactgccccactcaatttcagacttgcatggggcatgtagcccctttgttttggccaatttttctcatttgaaatggctgtatttacccagtgcccatgcccctgttgtagctaggaagtaacttacttgcttttgattttacaggctcatagatggaagtgacttgccttatctcagatgagatgttgaactgtggaggtttgagttaatgctgaaataagactttaggggactgttaggaaggcatgattggttttgaaatctgaggatgtgagatttgggaggggccaggggcagaatgatatggtttggctgtgtccccacccaaatctcattgtgaattgtaactcccacaattcccatatgttgtgggagaaacccagtgggaggtgattgaattatcgggtcaggtctttcctgggctcttctcctgatagtgaatgtgtctcatgagatctgattcttttaaaaacgggagtttccgctgggcatggtggctcatgcctgtaatcccagcactttaggaagctgaggcaggtggatcatgaggtcaagagatcgagaccatcctggccaacatggtgaaactccatctctacaaaaatacaaaaattagctgggcgtggtggcacacgcctgtagtcccagctacctgggaggctgaggcaggagaatcacttgaacccgggaggcagaggttgcagtgagccaagatcccaccactgcactccagcctggtgacagtgcaagactctgtctcaaaaacaaacaaataaacaaacaaacaaacaaaaaacaggagtttccctgcacaagctctctttgcctgccaccatccatgtaagatatgacttgctcctccttgccttttgccatggttgtgaggcctcccagccacgtggaactgtaagtccattaaacctctttttcttcccagtctcggttggatatttctttatcagcagtatgaaaatggactaatatagtatctaagacttaaaaaaaaatttaaggtgaaatcaagacttaaaaaaaaatttaaggtgaaatctacataacacaaaattaaccatttttaaatgtccaatacagtggcatttagtaaattcacaatgttatgcaactacaccacctctatcaagttccaaaatagtttcatcactccccccccaaaaaactctgtatccattaagcagttatttttcattttccccctagaccctggaaaccacaggaacattaacttttaagttattctaaggaattttagagacatagatattaaaacagacagatttcagatggctgtgcaactgcttccagtcatacagaaaagagttttttttcaataatctcaattccaatttttattagccattctatgtacattgataccaagtcctgaaaactgataaaaacatgtccagaatttctttttttccttttctgagaaagggtcttgccctctcacctaggatggagtgtagtggtgcaatcacagctcactgcagcctcagaatctcccagtctcaagtgatcctctcatgtcagtctcctgagtagctgggactacaggcacatgccatcacacccaactaatttttttattttttgtagagatgagggctatgttgcccaggttagtcttgaactcctggactgaagcaatcctcctgcctcagcctcccaaagtgttgggattataggcatgagccacaggacctggcccatggtttcttatacagtcaatgtacaaatgctcatttatattttgcacaataatgaagataaaaataacaattatagcaacatacaaatatgtacaaagattccagacagactttgttttttggcttataacaatgtgtagatactacacaaagaatgaggatgtaattttcatttacaagcaaaatgtgaccaaaatcccttttcttcttaaaattgaaaaatgaaattcttgagaatactaattagtgacggccaaatcttagactattttaaattagccatggttaaacataggtgagttaaacattgtgcctttccaaaattaaggtttgcagttagaaacataaacatttgataaaacttctcaaaattaattatgagtggcttattcatgtcctttggattccagacacacactagaaaaagtaaacgttaaagaggtgatattttggaaagcatccctagtactgaaaagcatccctagcactgaaaaaagcatccctagtactgaaaagcatccctaacactgaaaaaagcatccctagtactgaaaaacatcttcaggagtactcagtactccctagtacatccctagtactgaaaaaagcatccctaatactgaaaagcatccctagtactaaaaaacatcttcaggagtacccagtggtcaaacactagcaggaaactcatgatgcactaacaatactgagaacaaagtgtgggaagtaataagcagctattttactgatgtattaaatatattagaattatgaggcatgagatgatatttatgtgatttttaaaaggtttaaaatattcttagggactcaattagatattgagaatgactgataactatgatctcaaaaacagtatatcacacataatcatggtgttaccttactaataggaatttagtttttaataactaactgaattttattttactggcttcagaagcagctgcctattttgagaactacatgagttaatacgatcatatataattaagttaatgtcacagaaaccaaaatgataatagtttacaaaagaagaaagtgccccatttattgggttgtgacatcaggctgagatggcttagggctggaaagcaaggatgagtgtagcactggggctcaggtacaaatctgtttataaagctcaaggagagaaaaggcacgagaaggggtgagacaactctgaatggcggtggtacctggatgtggaattaccacagtgggccagagacaggatggtatataaccctctggccaggtactatgggaaccaaccccttccttcaatattaaattaagaatacaaatatctcaaagcatgctatcaaaagtagattatttatcctcatattacagaacacagaaggagacatttatttttaaaagagagctaaaaagttatggggtttctccttatttcatcttgaaaactcaaggagcaaacattaaaaaaaattccctatttatatatatatatatattttttgagatggagttttactcttgttgcccaggctggagtgcagtggcgcaaccttggctcaccacaacctccgcttcctgggttcaagcaattctgcctcagcctcccaagtagctgggattacaggcatgcgccaccacacccggctaattttgtatttttagtagagatggggtttctccatgttggtcaggctggtctcgaactcctgacctccggtgatctgcccgccttggcctcccaaagtcctgggattacaggcgtgagccacagcgcctggccggactattagtatttttaaaaggcacttaaaatattcctttccaatccaactcaaaatacatctctgtcaactacattttggataaatattttaaaaagcacataatttttgtgcaattttttcttataacccagtgatatttatcatctatagggctaaaaggtttgaaggacagagctccaactttctgcagaacaatctgaaagtgcttttatcatagaaacaagaacaacattaatgatttgctctttcactgacaacatcctgtagtcgtttcagtaaaacgtcatcattttcttgacagacgcgtttggcaggggattctgcatcactatcgatggctattactcgcttcttggttctctgctcaccttgccttatcatgttgttgatatctttcaaactctgtgcagaaatagagaacgtgtgtgagtaaaagagggagaggggaaatggcagcaaacaaccaagctaattgttttttcctgtgctctatcctctatccaaatcttaacactgggataaggactctttttaaaacttagaacaacctaataagggatggcttgaactaatcttttcaggtggtttaaaaattagatttaaggccaggtgtggtggcctgtaataccagcactttgggaggccaagatggttcaatcacttgagcccaggagtttcagaccagcctgggcaacatggcaaacctggtctctacaaaaaatacaaaaattagccaggtgtggtggcttgtgcctgtagtctcagctactcgggaggttaaggagcatcacctgagcctggggaggttgaagctgcagtgagcagtgatcatgcctgggaaacagagtgagaccttgtctcaaaaaccaaaccaagaatagaaaaataagcttcccgtctccctcctctccctctccctcctctccctccctcctctccctctccctcctctccctctccctctccccacggtctccctctccctctctttccacggtctccccctgatgccgagccaaagctggactgtactgctgccatctcggctcactgcaacctccctgcctgattctcctgcctcagcctgccgagtgcctgcgattgcaggcacgcgccgccacgcctgactggttttcgtatttttttggtggagatggggtttcgctgtgttggccgggccggtctccagctcctaaccgcgagtgatccgccagcctcggcctcccgaggtgccgggatggcagacggagtcgcgtttactcagtgctcaatggtgcccaggctggagtgcagtggcgtgatctcggctcgctacaacctccacttcccagctgcctgccttggccccgcaaagtgccgagattgcagactctgcccggccgccaccccgtctgggaagtgaggagcgtctctgcctggccgcccatcgtctgggatgtgaggagcctctctgcctggctgcccagtctggaaagtgaggagtgtctctgcccggccgccatcccatctaggaagtgaggagcgtctctgccaggccgcccatcttctgcaatgtggggagcgcctctgccctgctgccccgtctgggatgtgaggagcgtctctgcccggccgccccgtctgagaagtgaggagaccctctgcctggcaaccgccccgtctgagaagtgaggagcccctccgcccagcagccacaccctctgagaagtgaggagcccctccgcccggcagccactccgtctgggaagtgaggagcgtcttcgcctggcagccaccccgtctgggagggaggtgggggtcagccccccacccggccagccgccccgtccagaagggaggtgggggggttagccccccgcccggccagccgccccatccaggagggaggtgggggggtcatccctctgcccagccagctgcccgtccgggagggaggtggggggggtcagcccccccgcccggccagccgccccgtccgggaggtgaggggcgcctctgcccggccgcccctactgggaagtgaggagcccctctgcccggccagccgccccgtccaggaaggatgtgggggggtcagccccgggcccggccagccgccacatccgggaggtgaggggcgcctctgcccggccgcccctactgggaagagaggagcccctctgcccggccagccgccccgtccgggagggaggcggggaggtcagccccccgcccggccagccgccccgtccaggagggaggcgggggggtcagccccccgcccggccagccgccccgtccgggaggtgaggggcgcctctgcctggccgcccctactgggacgtgaggagcccctctgcccggccagccgccccgtccaggagggaggtgggggggtcagccccccgcccggccagccgccccatccgggaggtgaggggcgcctctgcccggccgcccctactgggaagagaggagcccctctgcctggccagccgccccatccgggagggaggtggggggggtcagccccccacccggccagccgccccatccgggagggaggcggggaggtcagccccccgcctggccagtcgccctgtcccggagggaggcgggggggtcagccccccgcccggccagccgccccgtccgggaggtgaggggcgcctctgcccggccgcccctgcccggccgcccctactgggaagtgaggagcccctctgcccggccaccaccccgtctgggaggtgtactcaacagctcattgagaaccggccatgatgacaatggcggttttgtggaatagaaaggggggaaaggtggggaaaagattgagaaatcggatggttgccatgtctgtgtagaaagaggtagacatgggagacttttcattttgttctgtactaagaaaaattcttctgccttgggatcctgttgatctgtgaccttacccccaaccctgtgctctctgaaacatgtgctatgtccactcagggttgaatggattaagggtggtgcaagatgtgctttgttaaacagatgcttgaaggcagcatgctcgttaagagtcatcaccactccctaatctcaagtacccagggacacaaacactgcggaaggctgcagggtcctctgcctaggaaaaccagagacctttgttcacttatctgctgaccttccctccactattgtcctgtgaccctgccaaatccccctctgcgagaaacacccaagaatgatcaataaaaaagaaaaaaaatggaaaaaaaaaaaaaaagaaaaataagcttcccattatgcaagagtcctatggcctttgtgctttcctaccctgtgaactaagagtctaaatctgtgaaaagatgtccatgaggtagagttgaattaaaatagcaggttgcagaacaataaaaaaaaaaaaaaaaaaaaaaaacaaaccaaaccaatccaaaccaaaacaactgaatttactgtataacagtagctctcgatgtgtagtacccagaccagaagcagcagaagcatctagaattttttattttttgagacagtctctctctgttgcccaggctggagtgcagggcatgatcttggctcactgcaagctctgcctcctgggctcaagctattctcctgcctcagcctccctagctgggactacaggcacatgccaccatgcctggctatttttttgtctttttagtagagacagggttttgccatgttggccaggctggtcttgaactcctggcctcaagtgttcccccaccttgggctcccaaaatgctagaattacaggtgtgagccaccgtgcctagccttatctgttttttttttttttttttttttttgagactaagtcttgctcttgtcgcccaggctggagtgcaatggcacgatctcggctcactgcaacctctgcctcctgggttcaagcgattctcctgcctcagcctcccaagtagctgggattacaggtgcccaccaccatgcccggctaatttttgtatttttagagacggggtttcaccatgttggccaggctggtcttgaactcctgatctcgtgatctgcctgcctcggcctcccaaagtgctgggattacaggcatgagccaccgtgcccggccctaatctgttttaacaagccctcccaatgattttaaagctccctacagtttgagatcttcttccttagagtaatgattttcaacattttttttttttgagacagagtctcgttctgtcgcccaggctggagtgcaaaggggtgatctcggctcactgcaacctccgcctgccgggttcaagtgattctcctgcctcagcctccacagcagagtagctgagattataggtgcgcaccaccatgcctggctaattttttgtatttttagtaaagacggggtttcaccatgttgcccaggctggtcttgaactcctgagctcaggcaatctgcccgccttggcctcccaaagtgctaggattacaggcttgagtcactgtgtccagtcaggtatattatcttagccaactttgtcaagtatagtaggaactctgtagttatctgtataactgaataggaaagtaataagaaggagccactgtatttggacagagttacaatctgccccactacaatttcttccagtttatactgattctgacttctggagacatactgaacatatctgcttgatagtccatgaagtctctgaaaacagcaatcatgtccataccacatcttcaccactgaacaaggataaggatggagatgatcacagagttgtctatgtacgtaagaggaggcttgtgttttcagacatcttcctatcctgggtgccatctaccaaatgcactttcacttccaatgcctttctttcaacttgacatcccccaggtctgaccacttgcaggtgttgccttactggtcccttctcaagatcttgcttgaacaggaaaacatgctggactttcaaagtgaactccacaaataccatgtcaataataatggattaaactacctcaaactgaatatactgctcttgatgagaggagacatgccatagttaacatttcatattttattagtatagtagtaacttggccaaaaaagaaaaaaaaaaaaagaggcaggattaacagttactgactgttaatctgaaatccaacttttagcctattcaccttaccttagaagggctgccattgaacttgtacagcagagcgcttcttggtgtaaggcctgacccattcttgtgcggggaaatataaatggagtgctgctgggaaatgcggcgtggtgagcctggctgttgtttaatatgtggaaaaggagagagtggtggagcatccatctaaaataacccaaaagtcagattttttagataaaagtttttctttgtttttgaatcccatatttttattcttatggtatcttctagttagaaaacagttatactgtaaaaagctcatttatggttgagaaaaaaaatgatcctttacttcttcttttttttttttaacaacaatagataaactagaatttattttcctgaatctttttttttttttgagatggagtatctcttgctcttgttgcccaggctggagtgcgatggcgcaatctaggctcactgcaacctctgcctcccaggttcaagcaattctcctccctcagcctcccaagtagctgggattacaggcatgtgctgggattacaggcatgtgccaccacgcccggttaattttgtatttttaatagagatgaccatgttggccaggctggtctcgaactcctgacctcaggtgatccacccaccttggcctcccaaagtgctgggattacaggtgtgagccactatgcccggcctattttcctggatctttcaggaagtcctataactagtattaagaattctggccaggcacagtggctcacacctgtaatgccagcactttgggaggctgagatgggcggatcacctgaggtcaggagtttgagaccagcctggccaacatggtgaaactccgtctccactaaaaatgcaaaaattagctgggcgtggtggcatatgcctgtaatccgagctatttgggaggctgaggcactagaattgcttgaacccaggaggcagaggtgttgcagtgagcccagattgtgccactgcactccatcctgggtgacagaccaagactctgcctcaaaaaaaaaaaaaaaaaaaaaagaattctggggccgggtgcagtggctcactcctataatcccagcactttgggaggccaaggtgctcggatcacttgaggccaggaattggagaccagcctggccaacatggtgaaaccccacttcagcctcctgagtagctcctaaaaatataaaaattagccaggtgtggtggcgtgcgcctatagtccctgccactcgggaggctgagcatgacagttgtttgaacccggggacagaggctgcagtgagctgcgattatgtcactgcactcctcctggggtgacagagtgagactctgtctcaaaagaaaaaaaaaattctggacaagacaccaggagttaagccacgagcatgagaacctcatattcatgcttaaaaagtaaggacaggctgggcgcggtggctcatgcctgtaatcccaacactttgggaggctgaggcgggtggatcatgaggtcaggagttcaagaccagcctggccaagatggtgaaactctgtctctactaaaaatacgaaaatcagctgggcgtggtgacaggcgcctgtaatgccagctactcaggaggctgagttacagaattgcctgaacccaggaggcagaggttgcagtgagctgagattgtgccacttgcactccagcctgggcaacagagcgagactccttctcaaaaaaaaaaaaaaaaagtagggacaaagagtaaccaatcttctaacacttgctgtaacaagctctctctacacacatacctgctcacaaccaaagcagtagcagagagaataaaagaggcagagaattctattagccagcaggatgattccaacgtggaaaaaatctgttaatgaaatgggaaagacttcatatggaaatggaaaagatttataaataagttggatgagcaaggatttcatttttaatatcctgtataatggaaataaattaagatggtagagatattccgagtatagcacatgacagaggggaagtgaaactgaagcaggatgaacagttatgacctctgaggatagtcatagaccatattccatgaaaagaggaagaacagaaatctacagaggcacatagatacatagaaacagctattggctgtccggctgcagcttctgctagggccttcttttcttttttttttttctttctttttttttttttttttttgaggcagggtcttgctctgttgcccagactggagtgtggtggtgcgattgtggctcattgcagccttgacctcctgggcccaagcgatccacctaccttagcttgctgagtagttgggactaaaggtgtgtaccagccactacacggctagtttttagtttttttttttaagagacagggtcttcctgtgtttctaggctggtctcaaatttctgggctcaagcaatcctccaggcttagcttcccaaagtgctgggattacaggcatgagccacagcacctgacctccttttgttttttttttgagacagagtttccctcttgtcacccaggctggagtgcagtggcgcgatctctgctcactgcaacctccgctttctgggttcaagtgattctcctgcctcagcctcccgagtagctgggattacaggtgcctgccaccacgcccagctaatttttggtagagatgggatttcaccatgttggccaggctggtctcaaactcctgacctctggtgatccgcccgcctaggcctcccaaagtgctgagattacaggcatgagccaccacacctggccccttttgtctttgacttgagaaaaacattaatctcacaatataacaacagaaaaatttaccaaatttgctgggtgcagtggctcatgcctgtaatcccagcactctgggaggccgaggtgggcggatcacaaggtcaggagttcaagaccagcctggccaacatggtgaaaccctgtctctactaaagatacaaaaaattagccaggtgtggtgacacactcctgtaatcctagctactagggaggctgaggcaggagaatcacttgagcccgggaggcagaggttgcagttgagctgagatcgcaccactgcacgccagcctgggtgacagggtgagactgtctcaaaaaaaaaaaaaaaaagaaaacaaaaaaaacaaattagttgttttaatattcatgttcccatcaagttcttacccatatgtatacggaatttctagcaacataatcatggtatagataaaattcatgccaggcgtggtggttcacacctgtgatcccatcactttaggaggctgaggtgggtagattgcttgagtccaggagttcaagaccagcctggccaacatggtgaaaccccgtatctactaaaaatacaaaaaaattagctaggcgtgggggcatgtggctgtcgtaccagctatttgggaggctggggtgggaggatcgcttgaggcctggaagcaagggttgcagtgagcccagatctcgccactgcactctagcctgggcaacagatcccatgatttcctctggtctctgttgtaccatagccttaatcactgattaagttactggacatgctctgattaattgctagtaattttacttggacatatttatctagcaaaataaacttatagtaatccaactatgacagcaaataataataaagtagtaaaacatagaacataccatatggtcctgattcgccaagtcgtatttcagtgcaaatgacttcactcttcctacatatattgtattgtaaaattttataagatcacctctttcctctttcactggtccactggaacagtcaggtgtttttgtagcatcttctaagtctgttaaaaagaatgcaatgttgtgatacaaagcatactttttatttttttgagacagggtctcactttgtcacccagggtggagtgcagtggtgcaatcttggctcactgcagccctgacctcctggattcaagtgatcctcccatctcagcctcctgagtagctgggaccacaggcacgtgccaccatgcctggctattttttatttttagtagagacggggttttgccatgttgcccaggatggtttccaactcctgggctcaagtgatccaccagcctcagcctctcaaagtgctgggattacaggcatgagccaccatgcccagccacaaagcatactttaatatacaagttggtgatttaaatgacctttctacaatattaaaaaaaacccacaaatctttatgtagagaaattaatattttcagagaaggttcagcaatccatctgtattacttataagtcaaattggaatctagagaaatgcaaacatatgaactgaaggtggtgctcttttctctagattccacttcagaatgttttcacaaccatagctgttgagctcactgtcactagtggctcttagaggggtaacagccctgggctggtgtttagctaagttctacagtatgggaggcagtggcaaacctcagcttcagacaactaaaaggcctgcagatattcttcttgtgtctttgagaaaggtggaaagattctaaaaggtaaagcatatcctgagaggttaaggaagaagcaaaatgaattacatttatttctctgcaaatacatggcaggtgacaggtgttctaagagccttattgtaccacatacaacaggaaccctgatcaggaaccagtgttcaggttttactgagcaccctcaattgtaaaataacagcttaccccaacatagtttcctacttaatggtgcaactctgggatagcttgtgaaaccaggcagaactttgtcctactattttttggggaaggaagagtattacagggtattacaaactatcatttacttgtatacacaagaaccatgtgctaagaaaaccactaccaattaaaaagaatttagcacatatatgaaaaaagctctcattctcaatacactggcctacaaacattgagaacatgggtagaagcaatgccttcaccttaggaaaaccagaaaacacaaacatggttcaaaaaccaaacagccccaggggatgtcagtcttaatttggatgtctttttcacttctgctatttctaaaggatcttgacgagggtgggaggggaggggagctatgtggttaaataaagttgaggaaatgctgtatattatattggaaattcagaaattcatgttagtataaggctctgagaagtactgcagttggggaaaaaaaataactctcatgttcactttaattccatacttccccagttttttgtgtatagtctctcttcccccaaaacactttttttttttttgagacggagtcttgctctgtcacccagcctggagtgcagtggtgcaatctcggctcactgcagtctctgcccgctgggatccagcgactctcctgcctcagcctcctgggtagctgggattacagaagcatgccaccacgtctggctaatttttgtattttcagtagagatggtgtttcgccagctggaaaggctggtctcgaactcctgacctcaggtgatctgcccgccttggcctcccaaagtgctgggattacaggcgtgagccactgcgcctggaccccccaaaacacttatactaccattctgggaaacactgtttcaaaggatactggcttgttaacagctcttctaggttattctcattatatggatcaattaaaattatttttttgttttgtttttatgaaaggttcttgatcctcttgcctcagtctcccgagtagctgggactacaggtgcacgctgccacaccgagctaatttttttttactttttgtagagacagggtctccctatgttttctaggctggtctctaactcctgggctcaagtgatcctcccaccttggcctctcaaagtgctgggattacagacatgagcgaacacgcctggtctaaaattatttaatgtcctccttagattagaaatttcttgagacagagactatagtgtctctatatttctgtgtcattccaattccagctgttaatactaacataaggtaaggagctatactttacttgaatgaaccaaacatttaaaattgtgggaggctgggtgtggtgaaaccctgtctctataaaaatttttttaaaaattaaagaaatttaaaaactaggtgtggtggcatgcacctttagccctagctacttgggaggctgagatgacaggatcgcttgaacccaggaaatcaaggttgcagtgagctatgattgccccattacattccagcctgggcaacagagcaagatctcatctctaaaattaaaaaaaaactgaagaaaaaaaagacatttaaaaaaacatacttggccgggtatggtggctcatgcctgtaattccagcactttgggaggctgaggtgggaggatcacttgagcccaagagttcaagaccagtctgggcaacacagtgagaccccatctcggtctcccaaagtgctgggattacaggtgtgagccaccatgtccggccagaaatgggtttttactgatgaaaatagtgaatgtttattaagtgtgactaatgctaaaaaagccatactcattaatacaataaatttgatattgcttataaataatagctattactaaggccttactatgaacaagccctgtattaaatattatatatatgcatatatgtatacatagttgtgtattgcataatgatgggttatcttctcagaaatgcattgttgaaatgattttgtcatgagaatactatagaatatacttacacaaacctagattgtatggccaactacacacctaggctggatggtatagtatattgctcctaaggtacaaacctgtacagcatgttactgtattgaataccacaggcaattgtatcacaatggcaagtatttgtgcatctaaatatatctaaacatagaaaaggtacagtaaaaatacagcactataatcttataggaccactgttgtatgtgtggaccatcacggactcaaacatcattatatggcacatgactatgtgtgtgtgtgtgtgtgtgtgtgtgtgtccacacatacatacatatacatataattatcttttttatttttagagacaagatcttgctctatcacccaggctgaagtgcagtggtgcaatcatagtgcactccaatctcaaattcctggattcaagtgatcttcctgcctcagcctcccaagtagttgggactacaggtgtgagccaccatgcccagctaattttttattttcattttttgcagacaggggtcttgctgtgttgctcatgctggtctttaatttccgggctcaagggatcctcctgcctcagccttccaaagtgctgggattacaggcatgagccacaacactcagcctaaatataattctttttaatccttaaaacaagtttctaaggaagcaatgtaaagttttcaattaactacaatacacttgagtacagtgttatgtttgtgttacttaggttaagctataacctgggtctcacaagtattctaatcaagactgccactctggagcagtctgctaacatgacattgaagaattcacagcccatgaggagtgagctggtgttttaatcaggaaattcattctccactccaacagtttctgctaggcatatctcagtcaatgaccaatgc

SEQ ID NO: 61741 - DNA, 294 bp, Homo Sapiens
ctgttgtgtctgtggccatgggacagacaatcaagatcacatgccaaggagacagcctcaaaaagttttatgcaacctggtaccagcagaagccagggcaggcccctgttcttgtcgtctatggtaaaaacaaccggccctcaggaatcccagaccgattctctggctccagctcagggaacacagcttccttgaccatcactggggctcaggcggaagatgaggctgactattactgtaattctcgggacagcagtggtaaccatgtattattcggcggagggaccagcctga

SEQ ID NO: 61742 - DNA, 251 bp, Homo Sapiens
gcggccgcctactactactatacggctgttagaagacgacagaagggcagtgactcgacaaaggccacaggcagtccaggcctctctctgctccatccccctgcctcccattctgcaccacacctggcatggtgcagggagacatctgcacccctgagttaggcagccaggagtgcccccgggaatggataataaagacactagagaactcaaaaaaaaaaaaaaaaaaaaaaaaaaagtcgtatcgatgt

SEQ ID NO: 61743 - DNA, 2743 bp, Homo Sapiens
gaattccgcagggcgcgggcaccggggcgcgggcagggctcggagccaccgcgcaggtcctagggccgcggccgggccccgccacgcgcgcacacgcccctcgatgactttcctccggggcgcgcggcgctgagcccggggcgagggctgtcttcccggagacccgaccccggcagcgcggggcggccacttctcctgtgcctccgcccgctgctccactccccgccgccgccgcgcggatgccaagcaccagctttccagtcccttccaagtttccacttggccctgcggctgcggtcttcgggagaggagaaactttggggcccgcgccgcgcgccggcggcaccatgaagtcagcggaggaagaacactatggctatgcatcctccaacgtcagccccgccctgccgctccccacggcgcactccaccctgccggccccgtgccacaaccttcagacctccacaccgggcatcatcccgccggcggatcacccctcggggtacggagcagctttggacggtgggcccgcgggctacttcctctcctccggccacaccaggcctgatggggcccctgccctggagagtcctcgcatcgagataacctcgtgcttgggcctgtaccacaacaataaccagtttttccacgatgtggaggtggaagacgtcctccctagctccaaacggtccccctccacggccacgctgagtctgcccagcctggaggcctacagagacccctcgtgcctgagcccggccagcagcctgtcctcccggagctgcaactcagaggcctcctcctacgagtccaactactcgtacccgtacgcgtccccccagacgtcgccatggcagtctccctgcgtgtctcccaagaccacggaccccgaggagggctttccccgcgggctgggggcctgcacactgctgggttccccgcagcactccccctccacctcgccccgcgccagcgtcactgaggagagctggctgggtgcccgctcctccagacccgcgtccccttgcaacaagaggaagtacagcctcaacggccggcagccgccctactcaccccaccactcgcccacgccgtccccgcacggctccccgcgggtcagcgtgaccgacgactcgtggttgggcaacaccacccagtacaccagctcggccatcgtggccgccatcaacgcgctgaccaccgacagcagcctggacctgggagatggcgtccctgtcaagtcccgcaagaccaccctggagcagccgccctcagtggcgctcaaggtggagcccgtcggggaggacctgggcagccccccgcccccggccgacttcgcgcccgaagactactcctctttccagcacatcaggaagggcggcttctgcgaccagtacctggcggtgccgcagcacccctaccagtgggcgaagcccaagcccctgtcccctacgtcctacatgagcccgaccctgcccgccctggactggcagctgccgtcccactcaggcccgtatgagcttcggattgaggtgcagcccaagtcccaccaccgagcccactacgagacggagggcagccggggggccgtgaaggcgtcggccggaggacaccccatcgtgcagctgcatggctacttggagaatgagccgctgatgctgcagcttttcattgggacggcggacgaccgcctgctgcgcccgcacgccttctaccaggtgcaccgcatcacagggaagaccgtgtccaccaccagccacgaggctatcctctccaacaccaaagtcctggagatcccactcctgccggagaacagcatgcgagccgtcattgactgtgccggaatcctgaaactcagaaactccgacattgaacttcggaaaggagagacggacatcgggaggaagaacacacgggtacggctggtgttccgcgttcacgtcccgcaacccagcggccgcacgctgtccctgcaggtggcctccaaccccatcgaatgctcccagcgctcagctcaggagctgcctctggtggagaagcagagcacggacagctatccggtcgtgggcgggaagaagatggtcctgtctggccacaacttcctgcaggactccaaggtcattttcgtggagaaagccccagatggccaccatgtctgggagatggaagcgaaaactgaccgggacctgtgcaagccgaattctctggtggttgagatcccgccatttcggaatcagaggataaccagccccgttcacgtcagtttctacgtctgcaacgggaagagaaagcgaagccagtaccagcgtttcacctaccttcccgccaacggtaacgccatctttctaaccgtaagccgtgaacatgagcgcgtggggtgctttttctaaagacgcagaaacgacgtcgccgtaaagcagcgtggcgtgttgcacatttaactgtgtgatgtcccgttagtgagaccgagccatcgatgccctgaaaaggaaaggaaaagggaagcttcggatgcattttccttgatccctgttgggggtggggggcgggggttgcatactcagatagtcacggttattttgcttcttgcgaatgtataacagccaaggggaaaacatggctcttctgctccaaaaaactgagggggtcctggtgtgcatttgcaccctaaagctgcttacggtgaaaaggcaaataggtatagctattttgcaggcacctttaggaataaactttgctttta

SEQ ID NO: 61744 - DNA, 433 bp, Homo Sapiens
gcgtcgacctgccaccacctccaaagttgcttgcacagcagcatccacctccagatcgacaggcagtacctggaagaccaggcccctttccctccaagcagcaagtagctgatgaagatgaaatatggaagcaaagacgaagacaacaatcagaaatttctgcagcagtagaacgtgctcgtaaacggcgtgaagaggaagagcgaagaatggaagaacagaggaaggcagcttgtgcggagaaactgaaacgattggatgagaagcttggcatcctggaaaaacaaccatctccagaggaaattagggaaagggagcgagaaaaagaacgggagcgtgagaaagaacttgaaaaagaacaagaacaggagcgagagaaggagagggaaaaagacagagagagacagcaggaaaaggagaaagagctggagaa

SEQ ID NO: 61745 - DNA, 2173 bp, Homo Sapiens
gagcgaactagtctcgagttttttctttcttttttttttttttttgatacggagtcttgctctgtcgcccgggctggcatgcaatggcatcatcttggctcattgcaacctctgcctcccaggttcaagcgattctcctgcctcagcctccctagtagttgggattacaggtgcccgccagcatgcccagctaattttttttatttttagtagagacagggtcttatcattcttggtcaggctggtctcaaactcctgacctcaggtgacccacccgccttagcctcgcaaagtgttgggattacaggcgtgagccaccatgtccggcctcatttaattctcataacactttaggtagcttattttattttattttttttacacggagtttcactcttgttggccaggctggagtgcaatggcacaatctcagctcactgcaacctctgcctcctgggttcaagcgattcttctgcctcaggctcccgagtagctgggattacaggtgcctgccaccacacccagctaatttttgtatttttagtagagacagggtcttgctatgttggttgatcttgaactcctgacctcgggtgatctacccgcctcagcctcccagagtgctgggattacaggcgtgagccaccgtgcccagccttggtagcttatttttaaattgcatttgctacaattctcctgcctcagcctcccgagtagctgggactacaggtgcatgtcgccaggcctggctaattttttgtattttagtagagatggggtttcactgtgttgcccaggcttgtcttgaactcctgagctcaggcagtctgcccgcctcagcctcccaaagtgctaggattgcaggtgtgagccaccgcacctggccactactttttggaactctattttgtacttgctgactttcacaaaaagtttgaggcagcttacaataggatgtaataggatgaaagaagaaacaacaatatattaatacgtggccagaattagtgtgcttcagaggttgtagaagccttattaacctttctcacgtttttcaggggaaagccttgccaggcagttactactactcaattgagaaagatgtgtgctaagtctcaaaagcaagtacttgttctcagtcacatcagtagtgagtagcacgcttaaactgagagtttctggttctggggtgtttctgttttactccaatcaagaaagattcttcgttcctccatactcaacaaaatggagggagactgggtaccaagttcagacacaacaatatatttacttttgtttgttgttttttaaaatattttttcagtatacatgtagcatatcatcttcttacagcaagactgtgcaatagatcatatacttgctttgtagatgggaaggctgggactgcgtgaggtcacgtaatgcacccaaagccatgtagccattaactggtagagcccaagctcagacactagaattaattctgtctgaaaccaaatgcaagcttggtccattgttctagactgttgcacttattctgtgctggccagctggcataggcaggacaacactgtagtgtggggacattatcttcccagtggcctagatgggaaggttaagttcagaagctagttgggtctgattccagagttcaccttgccagtccatttattggtggatttccttccagtgttttttccccatccataagcttgtggtttttcttttttcttttttttttcttttgagacggagtcttgctctgtcacccaggctttagtgcagtggcgcgatctatgctcactgcaagctccgcctcccgggttcacatcattctcctgccttagcgtccccagcagctgggacaacaggcgcatgctgccatgcccggctatttttttttgtatttttagtagagacagggtttcactgtgttagcaaggatggtctcgatcttctgacctcgtgatccgcccgcctcagcctcccaaagtgttgggattacaggcgtgagccaccacacccatctttttatttatttattttttgagacagtctcactctgtcgcctaggctggagtgcagtgagccaagatggcaccactgcactccaacctgtgcaacagagtcagactctgtctaaaaaaaaaaaaaaaaaaaaaaaaaaaaaaaa

SEQ ID NO: 61746 - DNA, 2239 bp, Homo Sapiens
acacgcataactaaggaggccggcagtgtatctctgcgtatgaagcaggtggaagaactgtgagtaggctgagagtcttgcagagcaccaatgtccactgctaccctatccattctccctctgccgcttctcttgaaggcctttgtccatccagaaagatgaggtggtgggaggaactgcctgtccgtgcagcagctttggctcacaagggaagaggtcgcggtgcagctgtgtcggtcgatgactgcttatctcattggttgcttccatgtgcagctgtgtgttcagagtggtgttggttctccctcctgttggtttttgtggtggaccagccactatcagcagcaaacctgaaggcctgttctatagttttccttagtaggaaggaaatcatatgcttctcttaaagtgctctgattcttggtaactcattgcttttttattttactttgggacacttagatttgatgatgattctagtttttttttaatttttagttttttattgtttgttgttttcgtgttcaaagataatatttcagccttttgtattttagttcccgagggttagaatattctttgattcttaagaaatctttcaagtaacagaatggcacagatactcagtactgtgcctgattttccttctgaacttgccaaaactttctgagagctgaatgtatcattttagaaatgtcctactaatatggagataaaacatcctatatggggatattttaaagctcagtgtaccctcccccacctcaccccagcctgggggctcttcagagaattataaaagacagaaaaaccctctgtatacattctgcccagcaagttcatctcgtctctccactgtagttgcatgagccctgtgttactgtgctaagcgcttggtttcagtcccttgtggttgtgttgttctaagtgcagaatcggcctggggataagtgtgcctggctgttctagccacctggttgtgaacagtacaagtgtgcgcatatctctcaggctgtggcgtgggtacttgggatcctcgtcttcatctgataactctgttactagggcatcatcattacaaactcgtagcctggaatccacatcttggagacacctcgtggtttgcctttatgttagcatctacagctaactgccttccttgtccctcttgtcaccctcttgaattccatcagatatcattctctgctggaactgggtgagaagcgtaaaggcatgttggagaagagttgcaagaagtttatgttgttccgtgaagcgaatgaactacagcaatggatcaatgagaaggaagccgctctgacaagtgaggaggtcggagcagacttggagcaggttgaggtgctccagaagaagtttgatgacttccagaaggacctgaaggccaatgagtcacggttgaaggacattaacaaggtagctgaagacctggagtctgaaggtcttatggcagaggaggtgcaggctgtgcaacaacaggaagtgtatggcatgatgcccagggtaagtttcgggtgctgtgtgtggatcttgaacatgagaaggacttaaatcttgggaagaatatcaagccaagaacttcttcatcagaattgctgttcctgaacctcagatgccttttgtgtgtaaagatttgtggaaaactccaaaaattgatttctttttttttgagacggagtctcactctgtcaaccaggctggagtgcagtggtgtgatcttggctcactgcaacctccacctcccaggttcaagcgattctcccatctcagcttcctgagtagctggaattccacgcatgtggcaccacacccagctaatttttgtatttttagtagagatggggtttcaccatgttgtccaggctggtctcgaactcccaacctcaggtgatctgcccacctcagcttcccagagtgctgggattacagacgtgagccaccacgcccagcccagaaattgatttctatttgccattctccaaaagacaaaaaagttggttttttttttttttcggtcttttgtttgtttgtttgttttttaagagatagggtcttgctttgttgcccagactggaggtcagtggcttttcacagctgcagttatagcctactgcagcctcgaactcttggcctcaagcaatcctcccacctcagcctcccaggtatctaggacaacaggcatgcaacacaaagcacagctctaaaaaaaaaaaaaaaaaaa

SEQ ID NO: 61747 - DNA, 3444 bp, Homo Sapiens
gtgtgtgagagtccagccttgggccagagtgccgggtctaggcctggaagcgcgaggcgggcatttcggaagagagtggcgcggcgtggggcgccgcgagggcactacgagcccaggaactgccgcgccggcccgattttccgcggctgtataaggactagcgcttcggtagccggggagctggagggaacctgatttgagatcaattcttggagaacacaaagaagtgtgatgccgataacagtagaactctgaacgtggattccactgcaatgacactacctatgtctgatccaactgcatgggccacagcaatgaataatcttggaatggcaccgctgggaattgccggacaaccaattttacctgactttgatcctgctcttggaatgatgactggaattccaccaataactccaatgatgcctggtttgggaatagtacctccaccaattcctccagatatgccagtagtaaaagagatcatacactgtaaaagctgcacgctcttccctccaaatccaaatctcccacctcctgcaacccgagaaggaccaccaggatgcaaaacagtatttgtgggtggtctgcctgaaaatgggacagagcaaatcattgtggaagttttcgagcagtgtggagagatcattgccattcgcaagagcaagaagaacttctgccacattcgctttgctgaggagtacatggtggacaaagccctgtatctgtctggttaccgcattcgcctgggctctagtactgacaagaaggacacaggcagactccacgttgatttcgcacaggctcgagatgacctgtatgagtgggagtgtaaacagcgtatgctagccagagaggagcgccatcgtagaagaatggaagaagaaagattgcgtccaccatctccacccccagtggtccactattcagatcatgaatgcagcattgttgctgaaaaattaaaagatgattccaaattctcagaagctgtacagaccttgcttacctggatagagcgaggagaggtcaaccgtcgtagcgccaataacttctactccatgatccagtcggccaacagccatgtccgccgcctggtgaacgagaaagctgcccatgggaaagatatggaagaagcaaaggagaagttcaagcaggccctttctggaattctcattcaatttgagcagatagtggctgtgtaccattccgcctccaagcagaaggcatgggaccacttcacaaaagcccagcggaagaacatcagcgtgtggtgcaaacaagctgaggaaattcgcaacattcataatgatgaattaatgggaatcaggcgagaagaagaaatggaaatgtctgatgatgaaatagaagaaatgacagaaacaaaagaaactgaggaatcagccttagtatcacaggcagaagctctgaaggaagaaaatgacagcctccgttggcagctcgatgcctaccggaatgaagtagaactgctcaagcaagaacaaggcaaagtccacagagaagatgaccctaacaaagaacagcagctgaaactcctgcaacaagccctgcaaggaatgcaacagcatctactcaaagtccaagaggaatacaaaaagaaagaagctgaacttgaaaaactcaaagatgacaagttacaggtggaaaaaatgttggaaaatcttaaagaaaaggaaagctgtgcttctaggctgtgtgcctcaaaccaggatagcgaataccctcttgagaagaccatgaacagcagtcctatcaaatctgaacgtgaagcactgctagtggggattatctccacattccttcatgttcacccatttggagcaagcattgaatacatctgttcctacttgcaccgtcttgataataagatctgcaccagcgatgtggagtgtctcatgggtagactccagcataccttcaagcaggaaatgactggagttggagccagcctggaaaagagatggaaattctgtggcttcgagggcttgaagctgacctaaatctctttgcctaacaacttgggatcctgaagataaatatgtgttggacaagcatagaaagtgatttatatttttaatggttttcaagtggaagttcctttgaatttgtcagttcattcctggaaaatcttttgagttaaaataaggatcctaggacagcacctcgaactacaggccctaaagagaaattgcctcaaaccacaagtgctgtaacttcctcccctttctgtcaattggttgtctttaaatattgcaaaagtcctgatgctaaacagtatttggagtgttttcagtgtctgtactactgttgtagaccttggtatttttttaaacactgttaactgaaatgttttgatgatttgtatgtgatttgtgtttctaaacttctctttacattaatgttgttactggtgaaaggcatgagagcagcactaagtcctctgtgtaactgccattgtctttccaatccccagtagaccagtaaataaataacacatcagtgtcttctagaaggtgcctgaccaggttcaccttttaaacgacaaagcatggtttgtggctttttgcaaaattactatgaaccaaaagttgacaaatgttccaaagttattttctctaacatatcacattaaagatctgtttcagaattgtaaaaagtacatctagatgtgtttacagaaagcaagtatccagtatgactggcatgtgttcatgctattcagaatcacttgtaaatagtctgcttttaaaggagggcatgttcagttttctgtgaattaaaatatgctcatgtgtgggcacacacgcacaaacacacacacgcacgcacacagtggcagaagggatttatattaatattctttcccctctggccttcttacagtctgttggtccctttgcttctgttgtcagtgtgttgaattgcaaaccgagtactgctgtaaatactatgtttacttcatgctgaatgtttgcaaagacttgatataagtattaatagtaatgaatcaatgaataaataatgagctagggtttgtgaggctttctacaaataggtcagctccacctggagtgcgaattgccagagacaccttggtagtgcccatcggcaaatcgcaatggcagcatgtgagtggaccattcagaaacttctgcttggtggaaagtaaacagagaggatggaggtttggggcgaatgtcctgaggcagagatggtctttattgtgtgtggtggtggttgtggtatttataataatgcaagcataccctcccttgagtctcaattgaagataaaagaatgtgctgagcaagcaagccatggagagtatttcacaaaatactttgtaaatgagatgccagtagtgttcaaagttgtatttttaaaagataaatattcctttttatacctcaaaaaaaaaaaaaaaaa

SEQ ID NO: 61748 - DNA, 3039 bp, Homo Sapiens
atggaggtggcggtggagaaggcggtggcggcggcggcacggctcggctgcgctccggggggccctcggggcggcggggagaacgaggccgagagtcggcagggcccggactcggagcgcggcggcgaggcggcccggctcaacctgttggacacttgcgccgtgtgccaccagaacatccagagccgggcgcccaagctgctgccctgcctgcactctttctgccagcgctgcctgcccgcgccccagcgctacctcatgctgcccgcgcccatgctgggctcggccgagaccccgccacccgtccctgccccggctcgccggtcagcctcgtcgccgttcgccacccaagttggagtcattcgttgcccagtttgcagccaagaatgtgcagagagacacatcatagataacttttttgtgaaggacactactgaggttcccagcagtacagtagaaaagtcaaatcaggtatgtacaagctgtgaggacaacgcagaagccaatgggttttgtgtagagtgtgttgaatggctctgcaagacgtgtatcagagctcatcagagggtaaagttcacaaaagaccacactgtcagacagaaagaggaagtatctccagaggcagttggtgtcaccagccagcgaccagtgttttgtccttttcataaaaaggagcagctgaagctgtactgtgagacatgtgacaaactgacatgtcgagactgtcagttgttagaacataaagagcatagataccaatttatagaagaagcttttcagaatcagaaagtgatcatagatacactaatcaccaaactgatggaaaaaacaaaatacataaaattcacaggaaatcagatccaaaacagaattattgaagtaaatcaaaatcaaaagcaggtggaacaggatattaaagttgctatatttacactgatggtagaaataaataaaaaaggaaaagctctactgcatcagttagagagccttgcaaaggaccatcgcatgaaacttatgcaacaacaacaggaagtgactggactctctaaacaattggagcatgtcatgcatttttctaaatgggcagtttccagtggcagcagtacagcattactttatagcaaacgactgattacataccggttacggcacctccttcgtgcaaggtgtgatgcatccccagtgaccaacaacaccatccaatttcactgtgatcctagtttctgggctcaaaatatcatcaacttaggttctttagtaatcgaggataaagagagccagccacaaatgcctaagcagaatcctgtcgtggaacagaattcacagccaccaagtggtttatcatcaaaccagttatccaagttcccaacacagatcagcctagctcaattacggctccagcatatgcagcaacagcaaccgcctccacgtttgataaactttcagaatcacagccccaaacccaatggaccagttcttcctcctcatcctcaacaactgagatatccaccaaaccagaacataccacgacaagcaataaagccaaaccccctacagatggctttcttggctcaacaagccataaaacagtggcagatcagcagtggacagggaaccccatcaactaccaacagcacatcctctactccttccagccccacgattactagtgcagcaggatataatggaaaggcttttggttcacctataatcgatttgagctcaccagtgggagggtcttataatcttccctctcttccggatattgactgttcaagtactattatgctggacaatattgtgaggaaagatactaatatagatcatggccagccaagaccaccctcaaacagaacggtccagtcaccaaattcatcagtgccatctccaggccttgcaggacctgttactatgactagtgtacaccccccaatacgttcacctagtgcctccagcgttggaagccgaggaagctctggctcttccagcaaaccagcaggagctgactctacacacaaagtcccagtggtcatgctggagccaattcgaataaaacaagaaaacagtggaccaccggaaaattatgatttcccagttgttatagtgaagcaagaatcagatgaagaatctaggcctcaaaatgccaattatccaagaagcatactcacctccctgctcttaaatagcagtcagagctctacttctgaggagactgtgctaagatcagatgcccctgatagtacaggagatcaacctggacttcaccaggacaattcctcaaatggaaagtctgaatggttggatccttcccagaagtcacctcttcatgttggagagacaaggaaagaggatgaccccaatgaggactggtgtgcagtttgtcaaaacggaggggaactcctctgctgtgaaaagtgccccaaagtattccatctttcttgtcatgtgcccacattgacaaattttccaagtggagagtggatttgcactttctgccgagacttatctaaaccagaagttgaatatgattgtgatgctcccagtcacaactcagaaaaaaagaaaactgaaggccttgttaagttaacacctatagataaaaggaagtgtgagcgcctacttttatttctttactgccatgaaatgagcctggcttttcaagaccctgttcctctaactgtgcctgattattacaaaataattaaaaatccaatggatttgtcaaccatcaagaaaagactacaagaagattattccatgtactcaaaacctgaagattttgtacgtgattttagattgatctttcaaaactgtgctgaattcaatgagcctgattcagaagtagccaatgctggtataaaacttgaaaattattttgaagaacttctaaagaacctctatccagaaaaaaggtttcccaaaccagaattcaggaatgaatcagaagataataaatttagtgatgattcagatgatgactttgtacagccccggaagaaacgcctcaaaagcattgaagaacgccagttgcttaaataa

SEQ ID NO: 61749 - DNA, 3634 bp, Homo Sapiens; identical to SEQ ID NO: 29018

SEQ ID NO: 61750 - DNA, 334 bp, Homo Sapiens
cagtctgccctgactcagcctgcctccgtgtctgggtcgcctggacagtcgatcaccatctcctgcactggaaccagcagtgacgttggtgcttataactatgtctcctggtaccaacagcacccaggcaaagcccccaaactcatgatttatgaggtcagtaatcggccctcaggggtttctaatcgcttctctggctccaagtctggcaacacggcctccctgaccatctctgggctccaggctgacgacgagggtgattactactgcatctcatatacaagtagcaaccctctcgtggttttcggcggagggaccaagctgaccgtcctag

SEQ ID NO: 61751 - DNA, 4331 bp, Homo Sapiens; identical to SEQ ID NO: 28783

SEQ ID NO: 61752 - DNA, 1442 bp, Homo Sapiens; identical to SEQ ID NO: 56640

SEQ ID NO: 61753 - DNA, 1337 bp, Homo Sapiens
ccttgcattacaagtgccagctgctcaatgctgtgtcgggacttacaaaaaatgagttacagagatgttacatggttcagaacatgtcaaaatgcacaagtagcttttgaataagtgataattgctttgcagaaagtaccctatgtatataaaggccatatgttaatgaggcaaataatacttcatctcccttccttcaaagaaagttggttttgggggagaggaatgtagagtatttcctggaaattacctgaaagaagagttttagtaagagcagaaagcaccttagccacctacccattttgctgtttactgtcaccctgggatcctcttctctgtccctctgctagctcctgagaagtctcggaacacacgctggtgactgtgggctgccgtgggacattaactgcagttttaccagcgctcagtgcagatggagactggtcagcactaagattggcattagcatgcagtccagatgcagcgaacaggggaggagtgacggcagccacgggtgaaggggaagcatgtgatgaggtggtcgcatgggctggggtgaaggcagacgatggtgatgggatggatgtgacttttggtgaaaacacagaaccaaaaggccgtggtgccttattgtaggccatgttgtttgtggaagtgactttggacacagcaggagatgtaatgggcacaggtttaactacttctttaggttctccctatgtaaaacaaaaataaacatacacaaaaccacaccaaacacatgcaaaatatatttcaccgaaaagaacacagagctgattttttaaaagacaaacacaatcaggttagcagctcaaacatcatgtttccagataaaaacaatgggctgataaagcataacgtgcatgctaactagtcccaacatgcataacacagatgcacacattaggtataatttttaaaaataaaaatgaaagtagtttcaaaatatttcggaaatacagcaggaaaactatcagaaagcctaaagcccctcatcagtgtcaacctaggcatattccaaaggaaaaatgtttaaataccctacaataaacaaaacattgctaactgaggtgttttttatgttaaaatatccaaagcccatctttccatctttcaaagcccatagtcccatttttcaaacatgtttcatttctctccagagtggaatcatttgtttcacgcagaaggagcagcacatttctaactctttaagtttaaaaaaacaaaaaacacagggaataagataattttcacctaactcaggaatgtgcaaactctaattaataatcttaaagaatttgaaaaaaaaaaaaaaa

SEQ ID NO: 61754 - DNA, 1824 bp, Homo Sapiens
agggacagcactcacactcttctggtcatgatctctgatctccacctcaaatgacaataaaaaactggtccaacgaagacactgctcagcacttcagccatcaggactaatccatcgatgactggaaaagaggctagctttgaggaaaacagcctgggctcttgggagcagagtccagtgggtgtgaggctgacttgccgacggtcggcaggtaatggctctcagccggcgaggcggtcccacagctctcctcccagggcagcctgaggaggaggaggccgggtgcctgtttggtggcagcttcagcctagggatacctgaagctgttgagcaacacctttatgaaatgttgccagagcagcaacacttccctgtgggcacagccccgggaaatccggtaccaagtgagcaaggtggcaggacccacccaagcctgatacgcatctgggcccgccgggctcagcaggggaggctgctacggctgcccacttcccagcaccgtctgtcaggcttgaacccctctgtgctgttcccttcctggctaatagggagacccttcgcaggcacccactgtttcaacttgaccctcccaccccctgctactctcctccacacacccctccgttccgctagcctaccctgtcagcctttcaataaaagttatgcacaaatgtgaacacctgagatggagctgaacatttcttcactttgttctttttctgaagtcaaactcttatcaaatgccctaaaattattaccacccaagagaaacaggaaaaaggttacatgtttttgtttactgagagtaagatcacctgcatctggaagacgggctggtaaattggtttggctacagaacagaaagaaaacaaaaacaaacctcgtaagggaagtatcgcactcagacaccaccacttcctagagccaaatgagcaatcccaaactgcaagtgccgtaagtgggcctgtgacgtcacaccgcccggcccgaggtatcgcatgtgcgggggaggcccacactacagctgtcctctcgtctagaaggcaccacctcgctttcatgtcccgtgtgttttggaaaagcagtatggtgtgtcatgtctagcggcgaacacttccctccctctgtccttgaggttgtaatataaaaactgtgtttctgtacgtgtgggtgggaattctctgacggtgctcgttcatagcacaagcttacgctgagttctgaactgtcgttcacagctgcgtgtctgcatggtgtcgcatctgttgtacctttggggaaaatttgtatgtaaatgtacagaaataaaaacgttgccccattaacagatttcctctggaatgtcttccctacctcacctgatggtatccaccgaagggcatttcactaccattaatggtgagtaataaaatcctccgtgttcattcagacctcactgcgtcactactttgaacgcctctgtaagctgtgtcttcactcgccccgaggtgggtggagggaggcctctcactctgcttcgagtcctggtcttaaaggtagtcagaggcagaggctggattaaacacacactgtttaccaagtgccactctcagaccacctgagagacggggggccatcagtaaaattaagaggaatttttttcccttgttcgtgtatgttctgctgatccgtggcctgaaggttcctagagacgtcaagaaatgaatatcttacactgtgattctgtgaggaaagactggtaacccaaaactctcttctctaatgtattttttaacgaaaatgacaatatttctttaataaagtatttatacctaaaaaaaaaaa

SEQ ID NO: 61755 - DNA, 3160 bp, Homo Sapiens
  misc_feature (1930)..(1930): n is a, c, g, or t
cacccgtggtgccccatccctataggagctggtgagattgcagcctgctgcctcccctccatcagccacagctattggatttcccacccagaatctttaggtaaatgagatcatgattctggaaggaggtggtgtaatgaatctcaaccccggcaacaacctccttcaccagccgccagcctggacagacagctactccacgtgcaatgtttccagtgggttttttggaggccagtggcatgaaattcatcctcagtactggaccaagtaccaggtgtgggagtggctccagcacctcctggacaccaaccagctggatgccaattgtatccctttccaagagttcgacatcaacggcgagcacctctgcagcatgagtttgcaggagttcacccgggcggcagggacggcggggcagctcctctacagcaacttgcagcatctgaagtggaacggccagtgcagtagtgacctgttccagtccacacacaatgtcattgtcaagactgaacaaactgagccttccatcatgaacacctggaaagacgagaactatttatatgacaccaactatggtagcacagtagatttgttggacagcaaaactttctgccgggctcagatctccatgacaaccaccagtcaccttcctgttgcagagtcacctgatatgaaaaaggagcaagacccccctgccaagtgccacaccaaaaagcacaacccgagagggactcacttatgggaattcatccgcgacatcctcttgaacccagacaagaacccaggattaataaaatgggaagaccgatctgagggcgtcttcaggttcttgaaatcagaggcagtggctcagctatggggtaaaaagaagaacaacagcagcatgacctatgaaaagctcagccgagctatgagatattactacaaaagagaaattctggagcgtgtggatggacgaagactggtatataaatttgggaagaatgcccgaggatggagagaaaatgaaaactgaagctgccaatactttggacacaaaccaaaacacacaccaaataatcagaaacaaagaactcctggacgtaaatatttcaaagactacttttctctgatatttatgtaccatgaggggaacaagaaactacttctaacgggaagaagaaacactacagtcgattaaaaaaattattttgttacttcgaagtatgtcctatatggggaaaaaacgtacacagttttctgtgaaatatgatgctgtatgtggttgtgattttttttcacctctattgtgaattctttttcactgcaagagtaacaggatttgtagccttgtgcttcttgctaagagaaagaaaaacaaaatcagagggcattaaatgttttgtatgttacatgatttagaaaaaggtgatgcatcctcctcacataagcatccatatggcttcgtcaagggaggtgaacattgttgctgagttaaattccagggtctcagatggttaggacaaagtggatggatgccgggaagtttaacctgagccttaggatccaatgagtggagaatggggacttccaaaacccaaggttggctataatctctgcataaccacatgacttggaatgcttaaatcagcaagaagaataatggtggggtctttatactcattcaggaatggtttatctgatsccagggctgtcttcctttctcccctttggatggttggtgaaatactytaattgcvctgtctgctcacttctasctatttaagagagaacccagcttggttcttttttgctccaagtgcttaaaaataagttggaaaaaggagacggtggtgtggaaatggctgaagagtttgctcttgtatccctatagtccaaggtttctcaatctgcacaattgacattkkkggccggagtgttctttrtddtnarggctttcctgtgcattgtaagatgttcagsagtatccactcatggtctctaaccacttgacaccagaaaccccccagctgtgataacgcaaaatstctctabacatcaccaaatkttccctggggggggcaaatttgcctttgattgagaaccaccagtttagctagtcaatatgaggatggtggtttattctcagaagaaaaagatatgtaaggtcttttagctccttagagtgaagcaaaagcaagacttcaacctcaacctatctttatgttttaaatgttagggacaataagttgaaatagctagrggvgcttctyttcagaaccccagatgagagccaatgtcagataaagtaagcatagtaatgtagcaggaacyacaatagaagacawwtwcactggmattacaaagcagaadtaaaattatattgtagaaggaaacaccaagaaaagaatttccagggaaaatcctcttttgcaggtattaattcttataattttttgtcttttggattatctgtttactgtctcatctgaactgatcccaggtgaacggtttattgcctagatttgtactcagaggaattttttttgttttgttttgtcttttaagaaaggaaagamaggatgaaaaaaataaacagaaaactcagctcaggcacaattrtcaccaaggagttaaaagcttcttctcaatmggarggwwtkkttctgggggkycykgrrrmtamcmwtgagccatgcaatctgggaagcacaggaataagtagacactttgaaaatggatttsaatgttctcatcccttttgcagcttttctttttggctctctcatgtccttggcttgctcctctattckacctctctttctccagcaataatatgcaaatgaagacatgtatccataagaaggagtgctcttcatcaactaatagagcacctaccacagtgtcatacctggtagaggtgrgcaattyatattyaaaggttgcaaagtgtttgtaatatattcatgaggctggaagtaagragaattaaaaatttktcctaattacaatgagaaccattctaggtagtgatcttggdgcacacatgaataactttctdaaggtgcaaccaaatccatttttatttctgcctgragyttgdcacctctgrggaggatggggcttagatagtatcgaatgacwattactgwgaaaaacttraraaaaragcgagggggcw

SEQ ID NO: 61756 - DNA, 997 bp, Homo Sapiens
ggcacgagggtggaaccaagctgcagtgggagcagcctgggacccgacaagggcctggcccagagccctcccagctcatcacttaccgcgacaccgcagaagccttcccagagcccctctgcccctcctgccgacgtcaccccaaagccagccacggaagccgtgcagagcgagcacagcgacgccagccccatgtccatcaacgaggtcatcctgtcggcgtcaggggcctgcaagctcatcgactcactgcactcctactgcttctcctcccggcagaacaagagccaggtgtgctgcctgcgggagcaggtggagaagaagaacggcgagctgaagagcctgcggcagagggtcagccgctccgacagccaggtgcggaagctacaggagaagctggatgagctgaggagagtgagcgtcccctatccaagtagcctgctgtcgcccagccgcgagccccccaagatgaacccagtggtggagccactgtcctggatgctgggcacctggctgtcggacccacctggagccgggacctaccccacactgcagcccttccagtacctggaggaggttcacatctcccacgtgggccagcccatgctgaacttctcgttcaactccttccacccggacacgcgcaagccgatgcacagagagtgtggcttcattcgcctcaagcccggaagttcaggctgaattctgaaggcaaacttgagcagacggtctccatggcaaccacgacacagccaatgactcagcatcttcacgtcacctacaagaaggtgaccccgtaaacctagagcttctggagccctcgggagggcctggctactgtgcctcaacggttcggctcctcaacagacagtccctgcggcagaagtgggtgtggccgtgagcctctgcaggctcaagagtgttgtccagatgtttctgtactggcatagaaaaaccaaataaaaggcctttatttttaaaaaaaaaaaaaaaaaaa

SEQ ID NO: 61757 - DNA, 2797 bp, Homo Sapiens
gtgcagtgtcctgactgtaagatcaagtccaaacctgttttggaattgaggaaacttctcttttgatctcagcccttggtggtccaggtcttcatgctgctgtgggtgatattactggtcctggctcctgtcagtggacagtttgcaaggacacccaggcccattattttcctccagcctccatggaccacagtcttccaaggagagagagtgaccctcacttgcaagggatttcgcttctactcaccacagaaaacaaaatggtaccatcggtaccttgggaaagaaatactaagagaaaccccagacaatatccttgaggttcaggaatctggagagtacagatgccaggcccagggctcccctctcagtagccctgtgcacttggatttttcttcagcttcgctgatcctgcaagctccactttctgtgtttgaaggagactctgtggttctgaggtgccgggcaaaggcggaagtaacactgaataatactatttacaagaatgataatgtcctggcattccttaataaaagaactgacttccatattcctcatgcatgtctcaaggacaatggtgcatatcgctgtactggatataaggaaagttgttgccctgtttcttccaatacagtcaaaatccaagtccaagagccatttacacgtccagtgctgagagccagctccttccagcccatcagcgggaacccagtgaccctgacctgtgagacccagctctctctagagaggtcagatgtcccgctccggttccgcttcttcagagatgaccagaccctgggattaggctggagtctctccccgaatttccagattactgccatgtggagtaaagattcagggttctactggtgtaaggcagcaacaatgcctcacagcgtcatatctgacagcccgagatcctggatacaggtgcagatccctgcatctcatcctgtcctcactctcagccctgaaaaggctctgaattttgagggaaccaaggtgacacttcactgtgaaacccaggaagattctctgcgcactttgtacaggttttatcatgagggtgtccccctgaggcacaagtcagtccgctgtgaaaggggagcatccatcagcttctcactgactacagagaattcagggaactactactgcacagctgacaatggccttggcgccaagcccagtaaggctgtgagcctctcagtcactgttcccgtgtctcatcctgtcctcaacctcagctctcctgaggacctgatttttgagggagccaaggtgacacttcactgtgaagcccagagaggttcactccccatcctgtaccagtttcatcatgaggatgctgccctggagcgtaggtcggccaactctgcaggaggagtggccatcagcttctctctgactgcagagcattcagggaactactactgcacagctgacaatggctttggcccccagcgcagtaaggcggtgagcctctccatcactgtccctgtgtctcatcctgtcctcaccctcagctctgctgaggccctgacttttgaaggagccactgtgacacttcactgtgaagtccagagaggttccccacaaatcctataccagttttatcatgaggacatgcccctgtggagcagctcaacaccctctgtgggaagagtgtccttcagcttctctctgactgaaggacattcagggaattactactgcacagctgacaatggctttggtccccagcgcagtgaagtggtgagcctttttgtcactgttccagtgtctcgccccatcctcaccctcagggttcccagggcccaggctgtggtgggggacctgctggagcttcactgtgaggccccgagaggctctcccccaatcctgtactggttttatcatgaggatgtcaccctggggagcagctcagccccctctggaggagaagcttctttcaacctctctctgactgcagaacattctggaaactactcatgtgaggccaacaatggcctagtggcccagcacagtgacacaatatcactcagtgttatagttccagtatctcgtcccatcctcaccttcagggctcccagggcccaggctgtggtgggggacctgctggagcttcactgtgaggccctgagaggctcctccccaatcctgtactggttttatcatgaagatgtcaccctgggtaagatctcagccccctctggaggaggggcctccttcaacctctctctgactacagaacattctggaatctactcctgtgaggcagacaatggtctggaggcccagcgcagtgagatggtgacactgaaagttgcaggtgagtgggccctgcccaccagcagcacatctgagaactgactgtgcctgttctccctgcagctgaaaatggagccacagagctcctcagggctgtttgcttgtgtggcatcccagcacacttcctgcctgcagaacctccctgtgaaagtctcggatcctttgtggtatggttccaggaatctgatgtttcccagcagtcttcttgaagatgatcaaagcacctcactaaaaatgcaaataagacttttttagaacataaactatattctgaactgaaattattacatgaaaatgaaaccaaagaattctgagcatatgtttctctgccgtagaaaggattaagctgtttcttgtccggattcttctctcattgacttctaagaagcctctactcttgagtctctttcattactggggatgtaaatgttccttacatttccacattaaaaatcctatgttaacg

SEQ ID NO: 61758 - DNA, 1942 bp, Homo Sapiens
gccgcttttttttttttttttttttttttttttgagatagattcttgctctgtcgcccaggctggagtgctgtggcgtgatcttggctcactgcaacctccatctcccgggttcaagcgattctcctgcctcagcctcccaaagtgctgggattacaggcatgagccacgactcccagcctgaaatatagattttaatcttcagcttgcattttgttctaaacaacttgttttcaataagaacgggcagacaagtttaagccaccatttgttggagcagatcatttattggtgtgttcagatggtactgtactagccttcctcttcccctccatcctcctagccatgtgcagggaattttctctttttgttggttaacactcttcctcatctggattgccttcaactatgtgacaacgaagaattcaagcaccaaaatagcagcagctacatatcctttgcatgacagtgtaatttcttctgccttaaggctgtgtctagcactgaaatcatagtctgtttacttcgatctggtgctacattacaatgggagggatttaactcttacttataaacacacaagggaattatttctcagctctgtttagattagaattagagatgaaattgtgcagttcttgttgctgctgagccaatcaccccattgagcaaaaacttaccttcctactttactagacaagcaagaatactgtgctgtcttttaaaatgttctgcaatataactattagaaccaatacagaaaatttttggtggctagtgagtataggcaattaatcttgaaagtttcccacttgacttgaatgtttgactttctcttcagatgctttctgctggggaaggagcacttctgaattaaagaattttgcaaaagaaaatgtggccagggatattatgtgcgtgtgtctaaaactggggattatcagtacatgctaagtgaatatgaggctttataaaccaatattttaaaatttcatgatcagaaaaagtaatctttaacaccattctcttacccgtgatcgcttagtaatcttcgtgtctatgaaattctacctctgaaatatctcttcagctgttcccttctctctattcccaattttatcttttagatcctattgtctcatctgaatttttagaagagcctactaatttaatcttctgcttctgatcctttccctatgttaactttctaaattatgaatataatgtcacaatttggctcaaatgtgattttaaactataaagtaatttaaactgtaagtcatataactagtttgatgataccgtaaaggtagatataagatattaatactactactcagagacccatgaatgtatctcagtgcctggcacagaataggcacttgataaatatttgcttaatgattagtaagctttccatcgttgggcttatgagaagccaacatttattgagcatctcctttgtggcacatgcgtcaagtctccagcacttgcttgatctttagctaacactgttgttttaatgattttctcaatacaatacttctctgtcttggtaaaaataataaagcaaagaaaataattcatttctgaagttgctttccttcacttgtaaaggtctgatctcctcccactatgcatatgtaccctttactgttaaggaaagctttgcatatgtagatatagaagaataagctacgtaaatactaaagatatgtcattctcccaaaggagacacaggtggttttcaatgattccttgcctcatgttgatgagtctgtagaattcagaacccatttggacacagctaatatccctgctcttggggtagaaaataaggacaccaagtcattggtagggaggtacaggcccttcctctgctgctgcagagagagaatgactcaagaaaattgggctaaaatttgtttaaaaaaaaaaaaaaa

SEQ ID NO: 61759 - DNA, 500 bp, Homo Sapiens
ttttttttttttagaaatttaaaatttagttgaaatataaaataaattattgccagaaacacaaagggcacatgaatacaataggggaaacagcttaatgggtttctgttctctgaaaactcaaggcccatctctgagtgataagagtaccctaacaggcaaagcactctgaggtccgggaccaggaagacagtgctactccacctactggcggtctggcactatctgtaggctggagttgggctggggatggtacattcaaaatggactttggtaaactaggggacaacccagacaaacactgcagaaaggaggaaggactccctttccagcatctcaaattcaaggctccaagttactgggcttgggcaaagtcacacattttctcaacaaaggccaactgctgacaatccaaattttaaaaacactgccattaggccaggcgcagtggctcacgcctgtaatcccagttctttttttaatgaaaagaatttgacatt

SEQ ID NO: 61760 - DNA, 571 bp, Homo Sapiens
tttttttatgcttaagtatttattttctaaagtaaggactaaattgtctctcttccttaagtaggaattaggcttggggaattcatgtctttaaaatgacaaagataacttaatacaaatggcacatcagcctttaaaaaggcttaatttggtttcattttgagacatcaggtaaacctgaataaacatatacagaaaagggataagctggattatgtgggatatttctaagaaatcaggggtcagcagaaagcttttctactcttagcataatatttggtattaaacttcaagttaatctaatagtatcaaaaaaactgtattcatataatagaatgtctgttaaaactgttaggtcacaaagtatgcaaagaaacagaacaggcaagttgctttttccatagtaatccaatcggatttttcttaaacaagttaatatctcacaaaatataaatatctacaatactcatggatgcagagtgctgacctaaatgttataatttattaacagcttcccatttttaggagtacaacgtaatgaaataatatggaatgctacacatcaagttat

SEQ ID NO: 61761 - DNA, 561 bp, Homo Sapiens
tttataatttaaaatacatttatttaatgtttccatttgtttctggttctgtgacacaaagctgttaaataaatacattctccacagtccctctgggacgggccacacagatgaggtagagaaatcattgcacgcacggagactcggagcacagacagggcccctcccacccacccacacctggccagaagccacctgggggtccaggtccctcaaggcagggcctggtgcagagaaggtggctgggatcccctggccaaggagcgggctgaacccctcccaacagccctttctcctctactgcccctcagaagagaagcgcatgaaacaggaggctccggctgagcggcctcttcatccagcaagacattcgaatatgtatttgtatagaaaccaactagctagcagacatttttggtctgccttgtttaaaaaaatagttttctgaatatttatgacatagagctaaatgtggtatttgattaaaaataaaaaccttcctctgacttgacgcccttcatagacccaatagtgactgagtgacagtcttgtcatgtcatg

SEQ ID NO: 61762 - DNA, 556 bp, Homo Sapiens
  misc_feature (484)..(484): n is a, c, g, or t
gaagtatgcaagcattgagaaaaacggtgaatttttcatgtcccccaatgactttgtcactcgatacttgaacatttttggagaaagccagcctaatccaaagactgtggaacttttaagtggagtggtggatcagaccaaagatggattaatatcttttcaagaatttgttgcctttgaatctgtcctgtgtgcccctgatgctttgtttatggtagcctttcagctgtttgacaaagctggcaaaggagaagtaacttttgaggatgttaagcaagtttttggacagaccacaattcatcaacatattccatttaactgggattcagaatttgtgcaactacattttggaaaagaaagaaaaagacacctgacatatgcggaatctactcagtttttattggaaatacaactggagcacgcacagcaagcctttgtgcaacgggacaatgctaagactgggagagtcacagccatcgacttncgagacatcatggtcaccatccgcccccatgtcttgactccttttgtagaagaatgtctagtagctgctgct

SEQ ID NO: 61763 - DNA, 2968 bp, Homo Sapiens
agttctctgtagtgtttgccaatgttggagccgtctgcaaagtgtccccggcaagaagaggctgcctaccacaaggactttagcttactttttaaagattgaagaaaaaaaagaagacagaaaaagaagaactcaaagatacacaaagtaatttgaaccaaggctcagaagtttttggagccgtgagggatacagcagtttggtcaatattgtcttaacatgcttcaaataaatcagcttctctccaagataaaatggcaaacccaaaagagaaaactgcaatgtgtctggtaaatgagttagcccgtttcaatagagtccaaccccagtataaacttctgaatgaaagagggcctgctcattcaaagatgttctcagtgcagctgagtcttggtgagcagacatgggaatccgaaggcagcagtataaagaaggctcagcaggctgttgccaataaagctttgactgaatctacgcttcccaaaccagttcagaagccacccaaaagtaatgttaacaataacccaggcagtataactccaactgtggaactgaatgggcttgctatgaaaaggggagagcctgccatctacaggccattagatccaaagccattcccaaattatagagctaattacaactttcggggcatgtacaatcagaggtatcattgcccagtgcctaagatcttttatgttcagctcactgtaggaaataatgaattttttggggaaggaaagactcgacaagctgctagacacaatgctgcaatgaaagccctccaagcactgcagaatgaacctattccagaaagatctcctcagaatggtgaatcaggaaaggatatggatgatgacaaagatgcaaataagtctgagatcagcttagtgtttgaaattgctctgaagcgaaatatgcctgtcagttttgaggttattaaagaaagtggaccaccacatatgaaaagctttgttactcgagtgtcagtaggagagttctctgcagaaggagaaggaaatagcaaaaaactctccaagaagcgcgctgcgaccaccgtcttacaggagcttaaaaaacttccacctcttcctgtggtggaaaagccaaaactattttttaaaaaacgccctaaaacaatagtaaaggccggaccagaatatggccaagggatgaaccctattagccgcctggcgcaaattcaacaggccaaaaaggaaaaggagccggattatgttttgctttcagaaagaggaatgcctcgacgtcgagaatttgtgatgcaggtgaaggtaggcaatgaagttgctacaggaacaggacctaataaaaagatagccaaaaaaaatgctgcagaagcaatgctgttacaacttggttataaagcatccactaatcttcaggatcaacttgagaagacaggggaaaacaaaggatggagtggtccaaagcctgggtttcctgaaccaacaaataatactccaaaaggaattcttcatttgtctcctgatgtttatcaagagatggaagccagccgccacaaagtaatctctggcactactctaggctatttgtcacccaaagatatgaaccaaccttcaagctctttcttcagtatatctcccacatcgaatagttcagctacaattgccagggaactccttatgaatggaacatcttctacagctgaagccataggtttaaaaggaagttctcctactcccccttgttctccagtacaaccttcaaaacaactggaatatttagcaaggattcaaggctttcaggcagccttaagtgccttgaaacaattttctgaacaaggactggatccaatcgatggagcaatgaatatcgaaaaaggttctcttgaaaaacaagccaagcatctgagagagaaagcggacaataaccaggcacccccgggctccatcgctcaggactgcaagaaatcaaactcggccgtctagcagctcccagaacccgcggctgccaccgcatccttataaacctgtcagcacgcatgagggtgtctgtgttcagggaaatgaatgactaataccattatttgagtcttatgtgaagacaacactattctaacacgagagataatatacatggtactgtttattcaactggggaaaaataaaactttgagcatttcccttggaactcgagatcagatcataactcatttgcctagaggcagcagaaatctgatcctgctactggagcttaaaataacaagtaaagaaaagtgttagaaacaaagctaaaattttaacatgattaataatagagaagttgggtttggttctgttgttatgattgttttgtcgtggtgcttgtgttcagttatattctctctctctctcatttcaaatactgcttgacaattcgaaaatgaaccaatgatgtgctgtggaatgtgatggttgtcttcatatagagtcacatggtttctctttttatgcagatatttataatcttcatcctatatcagtaggaataactataaggtgcactacaaaaagatgtatgcaaacaaacatgttttaaatcaggtcagatatctgatgaaaaatacgaactaatgttaagagcaagtagtttcaacatactccaggaactgagaaacaaaacaaagcaattgtgggttttgagctccatatactcttagcaagtaagggggcgtcttgcccctatatatcatcttcccggattccactccctgttgtgggaatcgcgcccacccccatccgtgtgttgtagccactcacggtttgcatcaagagtgttttttgtaactgcctctggacttgggacagtgagtaggatcaaaaataaataatgtacatgacggggaagggaaaaacctgttggagttgcttccagccagccacgctccgggccagcatgttggaatccagcgtggagcagatgcagtaaaaatgtggttggtttctgtgtg

SEQ ID NO: 61764 - DNA, 573 bp, Homo Sapiens
tttaaaaaaatgctcaaaatcagttaatcacaactaataaaaattacatttggtcaagaactaaaaagtcaattgcaaaaatgagaatagctatgttacgctgataaattatgagtgattctttcatatcttttatgttgttgccaataaagaaattttttttaaaagaactaccctttataggggttgtcctactgatttctttgccataatttggctgcattcaatctgtccttttcagataaggactacaattaaccagttcctgttaatgtcttcaaactttcctttttgctgctaaataatggtcccattccccatacatgcataccctctaccccatccttccccccgccataacatttacattttacccaactctagagcactggccaagctaatgcctctacttcttagcagtctctttctcgcagagcacttcctaagcttatgggttctctcctcaccaaggagttaatgaccagactcaaggactaggtaagtcgtaagataaccatataaagagggagaagtctgtgtctgtttttatgagatctctggaatggtatccat

SEQ ID NO: 61765 - DNA, 545 bp, Homo Sapiens
tttttttttttttttttacaaaagaaaaaatactgtttattccacacaactacatcaagcgcttcttccccattctcctctccccttgctgcccctccagccctcaggaagctttgtctgtgttgggaacagtgagaacctcagtgccagagcctggtccaagaggcaggaaggaaatctgggcatgggaaggtaattggatttccaagaacacaaaaatgtcagagtctcgcattccaaactcgtgtgttccttagtccatttggctgagttctttccctggacttcacctggataaaatgccgtggtaatgcagggtcaaaggccctagctgatccaccaggaaagttttggtctttcttccatttaaaacaaaacaaacaaaactccacacagttaaaccatttctgtccattctcctctctttccatagtaaagacgacactaagctctggtgtaagtccagaagatgttttcaaaacaaaatgtataccaactccttcagagcctgatgctaacaaaaaataaaataaacctacctccta

SEQ ID NO: 61766 - DNA, 402 bp, Homo Sapiens
ttgcattcttgaaacaattcttaatcatttattttcaacacgtgtactataaagaacctaagaaatcagacaattttaataacccataaacatgttgaatccatttgcagatttaaattttgtaaaaatagctgtcactgcctccatatatcaagtgtactatgtttataatcacatttatgctaccgatactcctcagaaaaaaacagattctgcttggttctagcttcagtattatgaactccaataatgctttgaggacctccaaaaaaaagagattctgcttggttgtagctgaagtattatcaactccaaataatgcttggaggacctccacaggtaaaccaccaatccctttggccatttattgagacagacagagagagagatacttatattaga

SEQ ID NO: 61767 - DNA, 2098 bp, Homo Sapiens
acagattgctagaactactttatgcatgaaaaaagtctgtttcactgatatgaaatgttaatgcactatttaatttttttctctttgttgcttcaaaatgaggttggtttaagataataataggacatctgcagataagtcatcctctacatgaaggtgacagactgttggcagtttcaaaataatcaagaagagaaatatccttagcaaagagatgactttggggatcatttgaggaatactaactctgttgcattaatgcttcaaaaaatcatcaaatgattcatgggggcctgattcgcatttgaaaaatgtctgaaattagagtctcatttgtttcaggaatgcagctacctgagttttttgtctcggcaaagtcacaaagcccatatactcacattgtgtgtctatacttgccaattaattctaaacttgtaggaaatatgccctctcttaaaggagaattttttttaaatctctgagaaatgagattctgagtttatttcagctaaaaggttgcaattcttctgaagatatctcaaatataaggttgaaagttaagtgttaataatttttgtgaatttatacacacctaaacgttaagtacacaaatattttatttgttttacaaataaggaataagtaatttataaattaagaagttacctataaaaataaaaagataacaaccctatcatatagcttatttttaaattacctgaaaaacgatattctacactgtttcctttttgactctgagttttcaaactgttacttctcccatatttctcaatccatttcactcagttgcacagtcttttaaaccctgtaattgtcataccaaagtttctttttaaaaaaaaattactttaaatgcttagtttattcaaagagcgatccaataatataaaaggaacatgtgttcaacacaataaaattttaaatggctctaaatcaagcacatcaagagtatacaagtcttaaaggctttttaatacatactcttttcccatctatgtaacccaacttgcacatttcagctgcatgtggtgaatatgcatcatatatttactttaagaggtaagattttacttgcaaaatacatgtgcaaattaggatccatcagttgatggaagagatggactctagaatattatttcttgtggttattactcctttacaaagcactttcgtctcacttgatcctcataaggaaactaaggctcagaatgagtagagctgggttcagaatctagctcttctaactccaagccatctcctctttccactgcaggaaactgcctcttttgtcagtgaaataatagaaagattgtgttagttaagtgataactgtcatttgtttgaaaatgttcgagactgaacaaatagcatttaaactgctggcatatagatgagatattgtacttttgtgcaatgtttattacctttgattaaattgtaatgtgaagcttttactaggtgaatagttcattatgtagtggaggcttcgtggttgtccattgaattgtcacagcaaaatctataagtttcttcaattctacaagatagatccatatacctttgatcacttggagactctttttttgctggtttctagataactcaggtaaatcagacctttacagagtacagggctaggtgaaagaattactgaaaaatcaccttgaaaatccgaagggctgatataccctttatgttcctgactgatgcgcagaacctgggggaaatctacagcaatatacaggttgcaatgctgataacacaacagcaatcctctcctctacgtggacttactgttgtttttttaattattattggaatgggattttagaaaatagaagttacctttgtgtgtgttttagggaaggtagagaagaatctgctctttctctgaatactgttttgaccccaggcaggaccttggaaaggccaaaacattaacagtagtacttctgttcactgaagagttatgttacatgaagataaaatggttttgtcgtgtttattaatgtattttgtgttgatataaataaacatggtaatgaaaccaatgaaaaaaaaaaaaaaaaaaaaaaaa

SEQ ID NO: 61768 - DNA, 549 bp, Homo Sapiens
agatttttagaaattcatttatttgcaaattacagtgaaaaatttctcttccagatgcatataaatccgaagtttttatcctagtgaagcgtacagaatgctattgttatgacatttaagtatcataacataatgtagctaataaagctttttaaaaattatggtaaagtgtatgtgaaatttaccattagtgacattgagtaccttcaccatgttgtgcaatcatccccaataagtagttccagaacattttcatcaccctagaaggaaactcctttttagcaatctctccccactcctttctctcagcttcttacaaccatttatctgctttctgtctccatggatttgcctattttggatatttcatataaatgcactcatgcaatacgttgccttttgtgtctgccttctttcacttggcaaaaatgcgctcaaggctcatccatgctttagcatgtatcagtccctcatttctctttatggctgaatattctattgtgccgtgtggagataccacaatttgtttattcattcatcagctgatgg

SEQ ID NO: 61769 - DNA, 580 bp, Homo Sapiens
  misc_feature (148)..(148): n is a, c, g, or t
  misc_feature (323)..(323): n is a, c, g, or t
ctgtaggcaccattctgcatcttgaacccagactgaagtgtgcctctcacagatggaaggtgcacacgctcctgtctcctcctcactctgccacgttcacttggctttttcattggtacctaggaatttaagaatatcgaagcgaganagtaacaaaccatagatgagcagactcccacaccgggttttcttgcccgtctttaaggcactgtttctaaattttgaacttagctctgaatccccaagaacttgagcacagcaagggttgctgagctgctgtcgccgcagccctggcccctggtgctggagctgcagcacctttngggagaggtcctgcgtcgtcctcagctgcgtcgctgtgaactcccgctctccactgtgttcctcagtgtctgcttttcaggaagtctgctgtgacctttgcccaacttctgagctcctcagggactaggaacaatttcagtagctttgccctgaaccaaacgagaaaacaaaagggaactcccgtatgacccacgtcacgtggtgcactcagagtgtgtgcggcatgatcctcggttgctcctcctctcaatttaaa

SEQ ID NO: 61770 - DNA, 614 bp, Homo Sapiens
  misc_feature (581)..(581): n is a, c, g, or t
  misc_feature (591)..(591): n is a, c, g, or t
  misc_feature (610)..(610): n is a, c, g, or t
cgaagatcagtactttattttctctagctccagtgttttgcaactgtagcagcatatcagaaacatccccacacaaaaacacacaattctccccttcttcaaagagctggcaacaattgagaggcagaaacaatagttactacaggcatttgagaaatttaagaaataacacttgctcacccttgaaacatacattgtgcgtcttgcaggtaggaagcagcagtacatttgtcattcaaagacacaatcatccttaaataaagttaaataaaaccttattggcataacaatgtgttggagatgcagctttatggggactttggaggaaggtgcttggaataagacatgagcattttaaaagaaaaaaaaatggaagaaagcaaactacacatagaatgtaacccagtaaatagattcaatgcaaagttaagaaaacatagtcatggggagaagatttcacccatttggaaaaaatcagtttatcgttctaaataaagccttgatctacaggtagttgaacctcaatcagggttggacagagagctactcacacacacatcctgtaaagtacgagtgctgtnccaggtggcnctactggctgcagtggtcnccca

SEQ ID NO: 61771 - DNA, 488 bp, Homo Sapiens
  misc_feature (422)..(422): n is a, c, g, or t
  misc_feature (484)..(484): n is a, c, g, or t
aaattggcattctatatatttgagaaactaatgtataaaaattcaagataattacaattggaaggggaccaataattccactttttaatcgaaaataatctatatactcccaataaactcacagtaaaataagcttcaaaaagccttaagacaccaaaagaggaaaaaaagccagtaattagaacaaaatgtgtaatgtggttaatagtatagatatgcttgcctttacgacaattcttatatactcaattcttacatgattgaaagattctgtaataatgctctacctttttataaagaaaaaagtaggtttccaaaagaaaattaaaccgtttatgactggagttagcggtagtaagggaattagatgtgagtgggttgactgctccttggtgccttccgacattttggcagaaaattcnggtcctccttttagtccatcccaaatgactggaattattagatcccagactctggggtccgnggga

SEQ ID NO: 61772 - DNA, 533 bp, Homo Sapiens
taactgatgaaacatacatttattttttccaatcaagtcttaaaagtttgatgaaagcgcattattgttaccaaaagtcttcaggcaataacagagataaaacttaacacagacaaacaatgattttattccatagtctcttggacttgagaatccatttgagtttcagaaagaatactaaattaatgggggttatgtcaggatgccaatgtccatgctgaggcttctcctgatacaatcttttgcaacataaccaacaaagatcaggagcttaaaacaaaacaaaacaaaaacaaacaaaaaacaagttcatgttatttctacaatgtccaaaaagaaagaccaagatctttgcttaaaaatagaaatgcatactgcagtggctcaaaaacttaggcctgcatcaaaattacatgaagcgcttgttaaaacagattgagccccatctgcaaagtttgtgactcaagtgttgggtggggccaaataatttgtatttctaacaggtttctaagtgaagtcaatgctactggtgt

SEQ ID NO: 61773 - DNA, 512 bp, Homo Sapiens
  misc_feature (480)..(480): n is a, c, g, or t
tttagctttaaaaatgcttttaatttgtataaagtgcaaagaaaaagaatattgagaagcacatgaaagaatataaaatggctagagcctaaaaaataagctaatatacacgcatagggacacatctgcatatttgagcatacagagacatgtaaatactcaggagagaaatttgcttttcctcataacttattttgtgtttctccaaaacctgaagagtagataacagctgacagttacccccctctgagtgtgacaagaggtcacgcacagggagggcctctagctgccatttcctgttgcttccctggtcaaacaacgcaggcggctaagtcactttaggaaacgctcaacagggctcccattgttccaacctcaaaattccgagatacaacgggccccattaatacagacagcttacaggctgggggatggtcccttagtgtgcagccactttttattgggacactgaattttcanaaacactgacttgcacaaatagtgttaattat

SEQ ID NO: 61774 - DNA, 585 bp, Homo Sapiens
tttaagtgagtcttgttcttcctatttctttcagcagaaatgaaatcccaggtaagtataagtattcaagtatttgatcagtaagtcacagttatctccagtgcattaaataaccttcatcaagaaataggttataggtaaaatctctgaaggatcatctatgtattcaagtaattattttttagataataactgtcttctggacttggtcttgaagtctgtacagattcagcctcagtagtagcgaactgcactgctgtttggtttggagtacaaattagacttatagtcctcctggaacttgagttattaaaatcataggaataaaattatgggatctcaacaaagggtcgagggtttgaggcttaaacaagccaacatatgaatatatgttttgtctcgctatactgcacttacgctatccagttgcaggtagttttttgtctgctagtagtgttctagattatgtctttccaaagcgctgaggctgtgcacctattctgtagttgcagctgatgcctgaatgtatcctagctgacaaattattgattaataagaacttgaatttctggaagattcttactg

SEQ ID NO: 61775 - DNA, 6140 bp, Homo Sapiens
ggcctcctcccaggcaccaggacactgggccatgtcttgagaagacccctgcagaaggcagggacagtcccacccgggagccaggggccttgccgtgtgcctgtggccagctcccagacctggaggacgagctctcgcttctagaccccttgccccgctacctaaagtcctgtcaggacctcattgtccccgagcagtgccgctgtgcggacacacggcctgggagcgagcagccccctctgggcggggcggcctccccagaggtgctggctcctgtcagcaaggaggctgctgaccttgctcccactggcccatccccgaggcccggccccgggctcctgctggatgtttgcactaaagacttggcagatgcacctgcggaggagctccaggagaaggggagccccgcggggcctccgccgtctcagggacagcctgccgccaggcccccgaaggaggtccccgccagccggctggctcagcagctccgtgaggagggctggaacctgcagacctccgaaagcctcacgctggccgaagtctacctcatgatgggcaagcccagcaagctgcagctggagtacgactggctggggcccggccgccaggacccccgccccggctccctacccaccgccctccacaagcagcgcctcctcagctgcctcctgaagctcatttccaccgaggtcaaccccaagctggctctggaagcaaacaccatctctacagcctcagtaaggcccgcccaggaggagcagtcgatgacgcccccagggaaggtggtgaccgtcagctctcgcagcccccgctgccctcggaaccaggcctccctccgcagcagcaagaccttcccgcccagctctgcaccctgctcctcaggtttgagaaaccctccaagacccctcttggtgcctggtccctccagcacaggaagcaatgactcagatggaggcctttttgctgtcccgacaaccttgccacccaacagccgacacgggaagctcttctctcccagtaaagaagcagagctgactttccgccagcatctgaactccatcagtatgcagtcggatttcttcctgccaaagccccggaagctgcggaaccggcacctgcggaagccactggtggtccagagaacactgctccctagaccatcggaaaaccagtcccacaacgtttgttccttctccatcctgtctaactcttccgtaactgggagaggttcgttccggcccatccagtcttctctgaccaaagcagctctgtctcggccgatcgtgcccaaggtccttccaccccaggccacgagtcacctggccagtgctatcgacttagcagctacaagtgccggcatcctttccgggaaccccctccctgccttggacaccgagggcttgtctggcatctctccactgtcttcagacgaggtgacgggtgccatctcggggcaggactctactggaactcaccaggatggagacaccctccccaccgtggggggctccgacccatttgtcagcatcccttcgaggcctgagcaggagccagtggcagacagtttccagggctcatctgttctctccttatctgagctgcccaaggcccctctccagaatggcctctccataccgctgtcctcgtcagagagctccagcacccggctgtctccaccagacgtctctgctctgctcgacatctccctgcccggcccacctgaggatgcgctgtcacagggcgagcctgccacacacattagcgactccatcattgagatcgccatcagctccggtcagtacggtgaaggagtccctctttctccagcaaaactgaatggcagtgacagttccaagagccttccctccccgtccagcagcccccagccacactggatcgcctctcccacccacgacccccagtggtaccccagtgactccaccgactcctcgctcagcagcctgtttgcaagcttcatctccccagagaagagccggaagatgttgccgactcccattgggaccaacagtggcacttccttgcttggccccagcttgttggatggaaactcgcgggactcatttgtgtccaggtccctggctgacgttgcagaggttgtggattcccagctggtgtgcatgatgaacgaaaacagcattgattacatttctcggttcaatgacctggcccaagagctgtccatcgctgagcctggccgccgagaagctctgtttgatggtggtggaggcggccccgctgtcagtgacctgtcccagtgaccacacgtcctggtggcggatgaagccctcttcgagctagagaaaaatagataagcccagcagccccagaagatggtctgaacagaggcatctccgcacccaagactgtgcaacgggcaggaacgtggtcacagagctgcttccccacgagcagcaggcaacggcgtccaaggagactaggatgagttcttggcaagggccagcgttagaaatcactgtggtactagagccgttcttcaccacgcctgggcccatgttagggtctgcataatgatcccatttcagcctgtgctctgcctcgattgttgtgttggacattccggtggcatttccttctgagacaagggagtatgtgtgccttggtgtagttgctgtgcactaggagctgtgatctccctctctgcagggaggccccagcccctgctgcttgctttctgccaaacctgtgctatgcatcagctgtgccctctgtggactgtaacgggcaggacagttgggtgtggcctgggctcatgcctggtggtgtcacatcccaaggcagcaagagcatggataccgatcacagggctgctgcggagtcgtggggccctgggctggtgcctcccctccctagaggttttgttcgtactcttaacagggagtgggggcaggaagagtcctgtactatgcaggttgtgtggactttacatgggaccctgctaagctggttgaaaatgtttttcttgtgttttaagaattaggagacatggaagaggaagaacaaagtcccctctgtagttggtttccttcctgtgtccctttgcaagcttccaggcgatctaaggtgtcatttctccctcctggggtgacccttaggcgctaatatgattacagcgaagactttcctgataagttctcaaactcgatgtgtgactgtttggcacttgagacaaacctgcctttgcagggaaagtgtctctcacgggcattggtgtgggcgtgcctgacatacgtgttcagtcccttgcatacctttgccttgagacttctgtgtctccttcccatttgggacacccaggtgagggcccagacatctggatgtggtcagacctcaccaaatatatgccttcgtggtggtctccctccttgcgccctcttgggtggccagcgttcctactgcagacggcccaacatccagtctttccccaggacagagctaacaagggcccctttgccttctcatcctcaggagttccaggcacatgagtcaccgtccatccacatccagtgtggcctggagctgctacagaggtgttgggcaggccatgcctgtgccgccatctctcccttcctgcctcatttcatcccccgcagcagccgggattgattgtgctttcctaacccccttggacctactctcgctcctccccaccattcctcttcccccacatgtgtggcacgctgcagccctcaaggccagccctggcccctccactgcttctctccccatccacaatggagaaggtgaaaagaggagggaaaggcctttggtgtggacaagcatgtggacgccctccgtcctgcagtcttgccagcccaccacagccactgtagaccacaggcaggccgtgtactgcaccactgggaggacgtggagaggacagtgaacttccaggcaagagcttccttcttttgtctcacgagtttttcttagagctcttgcctgagctggcttccctccttcagacattgacatgagatcttaagcaaacagtcccaaacctcttaggggtgaaaaaagaaacatgccacttgattaggagagagacagcagtgtttgaactacagcatctttacactagcttgtgttttgtgctacgtataccagcttccaaaattagcatctcattgagccagagaagacaaggagatctccctctgggcatctggctttgctgcgtctctagagggttaggataccaggccgagttcaggccactgctagctttctcatactcccacaggctagaccagagatgccaagtcccaacagcactgagctgtgtgcactgtgccagggacaggagggtttgtgaactgcctgtcagggtacctgttagcccctgacaactcagtggggtgaagttttggaggtcagagtctgctttcgtaggctctttagacagcacctaccacttggttctccagcgtagactcctgggagcagccaactgcagccattgccatccagtggggagatgggttagggaggaggacgggctgactcctctcctgtaataaagctgacaagagttctagaggattctgcttctctagtaactagacaggtgatacgcatttgcttgccacattaagggaaaatggtgtcatttgttgcagaaaaacaatggatacattttcttctggcctaaatgaatatttatgtgcaaacataggcaactgttaaaggctggaattttcaaaagatccaaacagagacttcctgcatcttctgcctttccaacagaagcggtgatcgtctaagtatgagcctgtggcttcctttgtgcatttgagcatgctgtaattaagatgagatcagtttcttagaaaaagctttcctgaatccctctgacgttgcctgggatctttctgttgattcgtcttttctggagattgggacagagcatctgtggtccagggaagttagtcctctggcctcaattctgttgtggatgtgcagtgataagcgggcattgcgtgcctcgggggatgcctagttcgtggcttcctggctgttttgtccttctgtgtcttgtagctgtagggtgccagctcagggagtggggtgttggcggcgtttccgcggttggcctccttgctttgccgcacctccaggttctgggcatgagaggccgtggcctcatttctggtggataacctttttagtttaatagcatctttaattagatcacagcattgaattcaaaatttcttctgcaaagaaagttgtggggcataagacaccgggaatgagggaggaggaagacagttgtgttttctctttaaaccttgagctctagccgatgcatttgtcaggaaatacagcactttgtcttaagaaaacaaggaaggaggccgggcgcagtggctcacgcctgtaatcccagcactttgggaggccgaggcgggcggatcacctgaggtggggagtatgagaccaccctgactaacatggagagaccctgtctctactaaaagtacagaattagccgggcgtggtggcgcatgcccataatcccagctactgaggagacttgaggtaggagaatcacttgaacctcagcggcggaggttgcagtgagtcgagatcgcgccagtgcactccagcctgggcaagaagagcgaaactgggtctcaagttaaaaaaagaaagcaaggaaagagtaatttacaacgaaggaaaaaaacccacagcacacccttcgcggctgtcagcgctctcctgatgtcacagtggctgcgtgtccttggggtgggtgaggtgtggggagcccagcccctggccctgcctcccgcgccccgctccccttctctctcttactcggttaagccatagcgaggcctccgctcgtttcagatatgaatttgttttatagattataaatatgcatatacagtgtatgtataaagcagaatgcctgcctttcctggttattttttgtaccatattgtaaattatattatttattctttaccaattttgggaataaaaggtgttttggttatttaatataataagagctgttaaacttctgtttaaatttccagttcaacttgtaaatgtttttattgtgcataaatacatactaatgttgatct

SEQ ID NO: 61776 - DNA, 593 bp, Homo Sapiens
tttttttttttttttttgcaggcacaagggtttttttggttctctgtaatatggttgggaattcaatattaagaagtagagatcccagctactcaggaggctaaggtgtgaggatcacttgaagccaggagttcaagatcgacctgggctatgtagagagacccgttccaaaaaagatgtaaagctggaaggaaacttgggggtcagctggactggccgcctttgttgacaaggcaggaaagcctggctcagtaccgccgaatgatttgtccaaggtgagcggtggcagagctggaaccagaagctgttagatgtttgctgccccttaaactccagcaccaaacctccctctgtccccgaagaccatcttcacagggcatggttagtgcgtagtggatctaggctccagactgagggtctgtctgggaagggcttctaggaatcccccagcttcctcgataaaggatgtggctctggttacccccctcccccatttccagatggaaatttagctaaagagtgagggccacagagcccagcaaggggcgtggtccgtgcctgttcccaagggcggagccagccagcagggtcac

SEQ ID NO: 61777 - DNA, 528 bp, Homo Sapiens
tttttttttttttttttactttttccaatggtcttttattttcaaaggctccactaaaattactttttttagatttctgggctatgggtttttagttgtgaattcaaagataaaagtcaagtagagcactgcatgagaataattcattttacagggcaatcaatcagaatttgcacatttgttatatccgagatgtacagttaggactcaccccttcttccactcacatactctgatttgcacagggctaagtgttacaaagacatggaaaatcttgaactttgttctttcttgggttcagaatctagaaaatggataaacaatgataagagatgacaggtcccttagagaaagttcactataaggcacaaaggggcttggcaaggtaattccaaatcagcagcagggttagaaatgaggagagcctccatatacagcctggtggttggtacccaaaaccggtttacatattttcaccatagagaaaaaaacagcagaatgtatcacatagaagacagagacatttgc

SEQ ID NO: 61778 - DNA, 580 bp, Homo Sapiens
  misc_feature (5)..(5): n is a, c, g, or t
  misc_feature (28)..(28): n is a, c, g, or t
  misc_feature (353)..(353): n is a, c, g, or t
  misc_feature (445)..(445): n is a, c, g, or t
  misc_feature (463)..(463): n is a, c, g, or t
  misc_feature (496)..(496): n is a, c, g, or t
  misc_feature (539)..(539): n is a, c, g, or t
  misc_feature (555)..(555): n is a, c, g, or t
  misc_feature (561)..(561): n is a, c, g, or t
  misc_feature (575)..(575): n is a, c, g, or t
ggtcnacagccgtttttctagttccaanttttaaatacatggaaggaagtccgggagaaccatatgaaggagcaggaggagaggaagaaactttttttccttcttttccaggagtagctggaaattaagatcgggttccttttctgccagcttggaagggcaacccatgactgattgcgattctgaggatgtctatgcaaagttggattcttgttacagtgtatccaatctgaagtattgcacatctgaactgggactgttaacactgatgccaatacagtgtggggtgccagaaaagtgtctgcctgatattttgtggaaaaaaaatctattttgtttacctactgtatccnaggggagtctgggggagaatggtagtattttttttttttttatcagctgtggaaaaaaaatgttacagatctgcacattttccgtgtggacnatgggtgtgtgtgtgtangtgtgtggtgtgtgtgtggtttaagtttagccntttggttttggtttttgggtggcagtaaccgattttaatgacnagcctttaaaaatacngtaccnaagactttgtaaanggtga

SEQ ID NO: 61779 - DNA, 620 bp, Homo Sapiens
tttatttataacatttcctttatttatcaacagcaacgatatgacattacaaagtgacccgtgacatcttttttaatcttgcacacgcactgcagcaaggttaatcctgtatgtgaaaacctctgagtgactatctcaaagtgtatatgtcatataacctgctgagttttctgatattgtaatactagatacaagatgtctgaataactccttacatttataaattcttatttaattttatagctttaatgcggtccatcatttctaataatgatattggctacaagaataatgatcatattatttatcatataatttaccattttgtaagcaacaaattgcccattaacaatgaaattgtagttacagcatctaaaattattagaaaattatattagcatggaaatatgttcatgatatatcactgagtgaaaaaaatctggctaccaaatatgtagtctgactcattcttatttcaaaaaaaaaaaatatgtgtatgtttgaaaatatgcacattagtatttgtattttatatatattatgtacatcattatatatatatgcatacatatttgtatatacacacagatagcacaggagagagacagagtgggagagag

SEQ ID NO: 61780 - DNA, 516 bp, Homo Sapiens
  misc_feature (321)..(321): n is a, c, g, or t
  misc_feature (458)..(458): n is a, c, g, or t
  misc_feature (469)..(469): n is a, c, g, or t
  misc_feature (489)..(489): n is a, c, g, or t
  misc_feature (494)..(494): n is a, c, g, or t
  misc_feature (507)..(507): n is a, c, g, or t
  misc_feature (513)..(513): n is a, c, g, or t
tttttttttttctcccctgcctggaggtgctcttttaccatggacgtggacaaaggaggtttaaatgaatactttgttttgtcatgttcaaaaaaagagtattaatattttgtgactgcatctgtgaatgaagacactcaaaaagccatgtttccaacttaggttaataataaggctatttgtccacccactcttcgggcattgctgcaatattcctgggcctcaagtgggaggccacgtgggaacaaggcctcagaaaacaaaggacatgcagcctccctgagccagttcctataaaacaccaccagggcaggccacagnctttggactctcttaggtgggctgcaactctccttttccctttctccaggcaaggcgtacgggttttgtggacgttcaagggtcttgccaaaaggagcttggggtcacgggtaacctagggtttttgggccaaaatnatttttccctntaatttccattcaggacggncagtnaaaaattttggancacaantgt

SEQ ID NO: 61781 - DNA, 568 bp, Homo Sapiens
tttcacgttcaattaaagtaatttattgtattcttccagatcagacataaagagcatcttgggaattgataccacaacacaatgttatacaccattttcacaaccaggcttgcattgaattcttttttaaagaacatagtaattttaaaaaatctaaatatttacatattaataaaacatatatacagaagattgagacattatccatagatatggattttttttttgctaagaaagcctataaaaaggtttctgaataaagactgaacagtagtcacagtaagtaaacacaattttaatttacaaaatatgattttgctgttgcagttttgatacgtatttccagtggtgggatccgttcatcgcacacatctttgggttgaacaagctccacccgtcctcaagtgctgaacaccccaagctgtggccccgccttggaaggcagtgcttctgaaggttcccagcagatctcttaacagaccacagttggaagttagcgtttctgccttgaccagcaacatactcatcctattttaacacggcgaaaggtcaccaattaatcttctcc

SEQ ID NO: 61782 - DNA, 511 bp, Homo Sapiens
ttttctgcaagctgctttattttttattttcatttacattagaaaataatctctcccttgcttgattttacaagggtaagggtggtcacatgactgacagagacaaccatggtgacacagctcttttcagctgttcatcaccagcaacctggatttcctatgcccagaacagcaatgcactgaactcaagtacaaattaaatttaatcccaactttagtccagtctgagattagcgcattcaaagaatctgtcataacgtttactatagactcttgtcgcccacagaatcagtttccagttcgtgtgtgacatgttctattgttgaatcagtacagagttcttatgtgtgtgagttttctatggtgactacacaaaacctcaggcttacaattgtggaggtcagaggtcaaggtgctggcagggcaggatccttcctttcctccatcatgggggctgctggcagaattcagtttcttgcagggctgggacggaggtccccagtcccagctg

SEQ ID NO: 61783 - DNA, 529 bp, Homo Sapiens
acagcacactgtacatagaatttatttgtttgcctcatacattaaaaaatcggaatagtgcaattacctacaaataattgcaatcttctcattcgcgagttgcaaagtttaaagagaaactttaaattgcttggggtttacgtttttaaagacacactcagatttactaagagagcatatcagaaaccagatctaaaatgttaaggcataaactttaattatcaggtctacttcttctgcccctctaatgccagttctgcagatcgctcacaccactccaacctacagctaaagaatgaagtaaaacaggtacacactaaatttggcatttaactgctgaaagaagtgttagaattttttagggtgaaaaagttatctgtatcaattatcttacacaattccactccttccttcaagaaaaggaatccaatggcttagctctttcccaacctttaaaatgcatcgcggtccaccccactcccctcaattccttctaggaaaatgtgaaactaacggtttccgtggtggc

SEQ ID NO: 61784 - DNA, 678 bp, Homo Sapiens
  misc_feature (488)..(488): n is a, c, g, or t
ttttatagctgctgttaccttttattgagtacccacaatgtgctaggcaactgtgctagatacttttacataatctcatttaatttaaccctcacaacaaccctgtgaggtaggtatttgctccattttacaaatggagaaatcgaggcacaaaagattaaacatcttaccaaagtctgcacagccacttatatgctggagctagaatttgaacccaggtgtgcctccactttttaatactagaccaatcttttcacgggggaagtttcctagattaacaccctcacatcttttaagaccattccaaaacctgcgttctgttttgcagaagccctcactgtgtttctgctgccctgaaacagtggaggcagacaaaggtgagtgccaagtgaggaaccataagaagtggtagatctctgtggagtgccataagaaccctcaagagccttaacaaaggtagttgggggagagggggaagaggtgttcancagctctgctcccagcagccatttcctctctccagggcaaaggggtggggctgcgaggccagctgaccaagaaacccctccagctcctccagtccaagtccagcatctttcctacaactattctggcttccacttcgtgttcttccttgcctcactctatgttatggttacccttaacaactggttcagg

SEQ ID NO: 61785 - DNA, 537 bp, Homo Sapiens
  misc_feature (243)..(243): n is a, c, g, or t
ttttttatttttaaatttttttaattgaaattttgaaaattttttgactctaaaaaggtattaatgaaacataaaacttaacaatgaaggcagaagaagaacatagtagaaacaattactacaaacattttagcttccaatttcatataatgttatacagtttagaaggagatagtctattcgttaatagaaatagtaagtgtacttttttagcttctgctgtgggagcatggcatacaccanccttgggtggtggggaaagcgggtctgtaatgttccagcctctggttggctccatcggctgcttttgggcaacacccagctttagagatcttttttgttactttctgactttgcttattctttttcttttccaaccaagaacatgctaattctttgaaaattagtttgccaagcagccaatttagtgaatgaccaatttacttaatttttcaagtttcagtttgtgaaaatgtggttgttttatctgtatataaagtttacagttcctatttaatgggaagttttggttgacta

SEQ ID NO: 61786 - DNA, 830 bp, Homo Sapiens
aacacccgaaaagcccaagggaaaaaaatccaaaaatttttaaggtttgaggtttataaatcgttaaaaaatagtgtttaaaaagagccccttcccctataagggcaccaaaatatttaaaattttaagagccatttgggaaaaaacgcgaaaagttttaattcccagggggtaattttacctccaaggttccaaggatatttccttaaccggtgtataaatccccatttggggattggcacaattttataaggggttaataatttaaaatttctacaagaaatcctgacaaggaccccactaaaatttgcctttaaaaatttaattttccaaagaccaggaaccaaatttgtggtcaattgtccagtttaacaaaaggggacttgaatgggataaaattatcctttaattatctagagctacccagttcgaggcttgaatttaatcatagcaaatgtttccttgacagcataatattaccatacaccatattaccttataattgccattacagttccttatcaaaaatgttaattctttgcgtgagcaaaaatcaataaaaccttatgtttgaccctaaagtatttgatcagggaacagaaggtgtaaattggacagatcccccgaataactttcttcaatcaagttgaaaatccaaacagctatgtaagtccccaggagagctctttttcccttatcttctcatttgttttgttataaactgtttaaatagttcaaatggttgtgcatgcctaggggatgaaacctatgtaatagaaatgtactgttttatgaataaggagtaaaattgttttaaaaaaaaaaaaaaa

SEQ ID NO: 61787 - DNA, 562 bp, Homo Sapiens
tttttgtggacagtatttattgggcacgcctactctgactgaaggcattttggacttgctaggacagtgataagggccttgggtacaaaatgctcctgattctggtgtagctccatggcgagtcagaacactgaacaggaatatgaagccaagctggccccatctgttggtggagagccaacaagcgggggcccatctggttcttcacctgatccaaatccagattccagcgaggttttggacaggcacgaggaccaagccatgagccaagatccaggctcccaagataactcaccaccagaagaccgaaaccaacgcgtggtcaacgtggaagacaaccacaacctttttaggctctccttcccaagaaagctttggacgattgtggaggaagacacattcaagtctgtgagctggaacgatgatggagacgccgtgatcatcgacaaggatctcttccagagggaggttcttcaacggaaaggtgcagagaggatcttcaaaacagacaacttgacgagtttcattcgccagctgaacctctatggattctggaatacat

SEQ ID NO: 61788 - DNA, 2174 bp, Homo Sapiens
cttatatgtgaaaagtctataggtacttgtaatagacctttgggcgctggggaggccttgagacgagtaatggagtgtttggcatctggaatactacttcctgggggtcctggtcttcatgatccttgtgagcgagacccaacagatgctctgagctatatgaccatccagcaaaaagaagatattacccacagtgcacagcatgcactcagactatcagcctttggccagatttacaaagtgctggagatggacccccttccatctagtaagccttttcagaagtattcctggtcagttactgataaagaaggtgctgggtcttcagctctaaagaggccatttgaagatggattaggggatgataaagaccccaacaagaagatgaaacgaaacttaaggaaaattctggatagtaaagcaatagaccttatgaatgcactaatgaggctaaatcagatcaggcctgggcttcagtataagctcctatctcagtctggccccgttcatgccccagtcttcacaatgtctgtagatgtggatggcacaacatatgaagcctcaggaccatccaagaaaacagcaaaacttcacgtagcggtgaaggtattgcaggcaatgggatatccaacaggctttgatgcagatattgaatgtatgagttccgatgaaaaatcagataatgaaagtaaaaatgaaacagtgtcttcaaactcaagcaataatactggaaattctacaactgaaacctccagtaccttagaggtaagaactcagggccctatcctcacagcaagtggcaaaaaccctgtaatggagctcaatgaaaaaagaagaggtctcaagtatgaactcatctcagagactggtggaagccatgacaagcgctttgtaatggaggtagaagtagatggacagaaattcagaggcgcaggtccaaataagaaagtggcaaaggcgagtgcagctttagctgccttggagaaactgttttctggacccaatgcggcaaataataagaaaaagaagattatccctcaggcaaagggcgttgtgaatacagctgtgtctgcagcagtccaagctgttcggggcagaggaagaggaactctaacaaggggagcttttgttggggcgacagctgctcctggctacatagctccaggctatggaacaccatatggttacagcacagctgcccctgcctatggtttacccaagagaatggttctgttacccgttatgaaatttccaacatatcctgttccccactactcattcttttagcaaatgacagaagctaattcctattgaacaacaatacagtacaacacagaatgttagagaaaaagcctttttatcctgctttctttgaacacatacttgatcaaaattatttgtaaagaacatctttcctactttttgattttaacaaatgcaaatttagttctctaaaacttgaaaaaaaaaaaaagaaaccagttctgtgaaaacggtacctcatttctggaaaataacttataccagcccttctgttctagggaaataaaagtctagcagttcaaagtttaagttttaagagacgtatcagattatgtaaaattaaatttgtgaaggatgtatagagtctcaaacactgatcacaaataaactgctttgttgtaacacagagtactgcctggttcctgatgcagtcactgattcttagttgattgatatgtatttgccccagggcactttaatttgggctgtagttattttttttaatacaatagagacttttcatttaactttaactttgtaaatattgaagtgtgtaataaagccaataaaatatgggtttgaatattgttttagcttattatttttgatatgttttggtatcaaattacaaggaattgaaaactaataacttagccctagaagcccattcacttgtaagcaaagtgctaaaacaaagcaaaggtgattgttagtttgagccagtctactcactttgtaagccctttgtactcctgttgtacaagggccatccccatgataaaggttccattctgttatttgagcattgcttattaaaatgatggcactacccagagatggggaaggagaatgtgattatcctagtttatgaatttccaagtttttaaaaataataaattaatcaatcaatc

SEQ ID NO: 61789 - DNA, 514 bp, Homo Sapiens
ttgaggacctacatttaataaatcaaactgtactggcgcgtcagaatattcacagtttgcaacaggatcagcgcgttttctcacttgcagactcggaggtatttcaggagaaggcgacgtgagcgcaccattccgatgcttcattcttgaccctctctggggctttcaatgtgtcattgtgtcagatccctctccccttcaggttttcacggtgctcctcatgcctccgccctctgggatccctttgccgtcttccggtgtggaagctttggctgctggccggctggcctcgaaggagtccaggtgagatttagggagctccccctggatggccaggcctggcggggctggccccgtctcactcctctgaccttctatgggactctctcttctgacctcttccagttctgcagctgcctgttcctttgtcagtttaattatttccctcccaaggctgtttacttcttcctcagaaggtaactggggtaatgaaggatgaaagagcttgcattgg

SEQ ID NO: 61790 - DNA, 594 bp, Homo Sapiens
  misc_feature (319)..(319): n is a, c, g, or t
  misc_feature (521)..(521): n is a, c, g, or t
  misc_feature (577)..(577): n is a, c, g, or t
aatttcagcagcatctttattgcaacaaagaacctgtaataaaatgcaagaaaactaatgtttcactttacatgattaaaagccatatacctaaaaatgagaaaacccataagcttactggagacatgcaattctttttatacaagtcaatgcttaaaacagcaggcacttcatgttctaaaattaaacacctgaattccaattttgctgaatacaatataaatttgttttggggttacttaaaaacaaacatacaaacactactttttctttatctgtaaaggacttatgaaatgatcacctagagcccaggaccttngcactaacatctctatatttgaggctggaagatggctaggtgaggctgggaaggtgggaatcaaaaaagtttcctttttcctttatatctgctgggaatagacacactcaccttatatagtttagaaatgggccatgtctcctttcttacatccaaatagctataaagatgggctcccaggcttaagccagcactctactcnaaattcccatcctcaatcctccactatacccagggagaccatttggtgcatgaccncgtgccgaatcttgggc

SEQ ID NO: 61791 - DNA, 491 bp, Homo Sapiens
  misc_feature (173)..(173): n is a, c, g, or t
  misc_feature (308)..(308): n is a, c, g, or t
  misc_feature (404)..(404): n is a, c, g, or t
  misc_feature (444)..(444): n is a, c, g, or t
  misc_feature (454)..(454): n is a, c, g, or t
  misc_feature (474)..(474): n is a, c, g, or t
  misc_feature (479)..(479): n is a, c, g, or t
ttttttttgtaagtatttaaatacaattatttttttctctcaatggtatagcatattcctatgcttgagaagtatagggtctactgaaaaaccattgtaaatggacgttacaggtatgctgtatttttgaaggtattttgttgtattaagtttgatgaagctaaaattagggnactctgaacagatttgcagggaaaaaatgttttaaaggctttaaaacattaggggaggcagtctagggtgataacgaacaggggttaagtattaaatacacggaagttacatttttgttcatgtttcattgtccnggaaagcaggcagggaaactatttcagttgtgatccaagccgggaaaaaaggaaacacccacagttgcccgtgtttttgctttttagcctaaagcntagtgaggtgcttgaggagtctttgctacccgggggtttntagaccggcngtctgaggggctttccgccnttttngggcccccgccc

SEQ ID NO: 61792 - DNA, 2381 bp, Homo Sapiens
aaacttttgaatgtataaatatcttaggtccaaggggagaaaattacatattacaattatgaaacaggtgaatttctgctttaaagaattgagattctccatacccctaaacttaggatctcttgatataaactgctgtaagtgcttttgggaaacctttgcaaaaccattttgataaaactgctttccaagttattgttggttatgtaaaattctatttacattgctttttctccttactgggaattagcacattattggcttccttaagactacttatttctctcttgatttatataatagctcattaagttgttattaatcaaaaacacaaagaggtgattgcttagacaatttttaaagtgactatagtataaacttttaaaagaataatatgaaaatgactgtggaatgcagtgtaaagcagaagcaaacggccctgaataacttacttggaagtaatttatatcaacttaagctgttagctcattgtataacttttcttatgtgaccctcaccaatatccctaagtaatgcctttggaagcttcagagtagaagatgcttcctactgtgttggctctgaggagatagtaggattagataggatccagattaggaaatgatccagttagtttatctgaaaggttaactcccaggactccaggtctttgaatccagccagtagagtgaatgcttccaattaagctgtaggtgttaccctgcacttacggaactgatcaaacaggtgactccaacaggaggttgcagtactgtaaacgtcaccgcaaggcaagggatgcttaaagtcctgggttctggactttaaaagctacattggccctggagggagggacccttggcattgctttgatcaggtagtgagggaagacagggttctggggtgggggtgtatttatatataatttaggttttgtttgtacagcatactgtgtcttgtaatgacacatccttgtcctgctttccttttttgagtttttttttttttttttacacaacatgcagaggcactgaagtgaccatgtcattttcaagtgtcaagaatgtagacagtgtttcagtaccaaagtctaaaataaactaaaattatgaattttttataggtgatacatttggattcttctcaactttgaaactgtttagcacagttccattgtattatataagaagacactgtatccaacaagactggctgtacattgaaaagctttatgtaccagccaacttatttaaccatattcagcctgttccgtgggggctgttctgtggttccaggtattttcaagcctgtgattaacttctcatggcttgtcacttaaaagtccctaaatttgagagacttaaagggcaccttgaaatacatttgtggagttttgatccaacttatggtggaagagccccataggaagactgttttgagtggccaaccattcccacccactgcataattcagcagaaactagaggagcagggcgtgtactgattggaattgacacgcttattctgtctacctatcagctaactcattagcagccaagcccttaggcagcttagtgtgaaaatacaatgttaactgtttgtttctctgtgaggttagtgggaaccgcttggataagcctattgggattaatctaaatgatgtgatgatttgattcaggtatagcccaaattagtaaggggctttagctgtaaactgaaaacaatattcacaccctctcctgggcctgtaaggtctaaggtgagaatttcaggatggaaaatgcaatgtaaagcttccacaggaaagtattcgggtatgtaaggtgttatttctgaccagagccctagttctgcaataaccaaaaccaaggagtataaataacaatcaggctctgggggaatagaaagcaggctttagacaatctgtccatttctacagtaaaattggagtgagtgtgtatatctacttaaaacttaatagaagtgacttctactttttgggctattccagaagtattttaaaattattatttaaaattttgaagccccatttcaaatcttgccgaccttagttcaaagccccctgagagatcacttttagaattgaggatttgttaaaatggcaagtcatttcatttgtgttaaaaagaaaatacccaaaaggaaggagggagccctgtttgccttgagataaacggccttggcattttctggcattaatgtagaaataatgttcctatgatgacatattttcaaagaaacactttcttatttactgtgtggtgtaaaatgttgctaaatgtgttgttacattatgtcactgctgaaagtaatttgcactataataaaggaattttctacaaaacaaaaaaaaaaaaaaaa

SEQ ID NO: 61793 - DNA, 465 bp, Homo Sapiens
taattcagcatcttagttttaatgtaattataaaagtcaccaaaaattgacagaacactagaaaacaagtaattgctaaatcaaaatagaatatcgtatacttttaatctttcatttttttttctttcagtttttcagttgccttctttcctagatcacgtatttctatcgttgttccttttttattgttcctgtgaccactggagcactagtaataaatccttaactcaaataggttatatttaatttcagcacccaagctccaaatgcatcagctaaactgggttatagcatggagaatacctcagacgaccacagattttatttttgttaagattctatcaagactgaggcaaattataataaaagttctcatatcatagaaaacaaattacgtggaaaaggataaacatttatacagtactgaagcgttatcaacaatgagtagcagaaattctttttcac

SEQ ID NO: 61794 - DNA, 548 bp, Homo Sapiens
  misc_feature (349)..(349): n is a, c, g, or t
taaaattgcacttctgaatttactccacaatatcaaagtttaatcagtacagtccaaaagatctatacagaggtatgattcttaaaaaattataattgagttgtacagagccagtgctcagggaatgccactgacaggaattcccgacagctccagtcattgtgtgtgcttcttgggcatgggttcaggtctgtgcgtactcggtgttgttataaaggtagtccaagagtggaggattgggaaaaggggaaggaatattcagaattggagacatcttgctttacacattccacataaattacctgaggcacacatccaaaatatcctgagaattagatacagccatttncagtttggaagaaggacagaataatagagaaccttctggaacttattcagaaaatcaaaggagttcataaagcaagattagtgacagaggcaagagctgaactgaagtaccttgacttattccagcactaggatttaaagcagcagctaaaatcccatctgtctgatccaggagacttgaacgcttgggcactgtggct

SEQ ID NO: 61795 - DNA, 435 bp, Homo Sapiens
tgaattgttagcaatggctttatttgctgctttgtcagggcaagagagtaaccgctagatgagactaagtcagctttccacaaacatatttttgcagtgtgttagcatttgtgaagaggtaaacgtattttctggaaacagagtatacttgcagttttgttcctgaccaacagtagaccaatcagctgaggtctgaaccctaattatgtaccagaatcgccttgagtgcttgttagcacaattcttgggcctcaggaatccactgagactttctcaaaagttcccctagagactaactactagcattttattcaatttctggagtgagttctggatgcttacatcacatccctttgtactgtttgaaatccttcccacagaagacacctcacacacgcacaacagtgccacacttaagccaacaccacaggaaaa

SEQ ID NO: 61796 - DNA, 535 bp, Homo Sapiens
tttttttttttttttgttagcagtcagaaaaatttttatttaggaaaaatattccctcaatatttattagataatgaatcttatttaaatgaatagtttacttttacttttctgtgtagaccaatttaaaagtatgccactttcctttcataagcaaactgtatttgtctcattctacatggcagatcaaaaattaatacttctttctgccttaaaaattatgagattttcctcattatgaattagttgtttttatatggattactgttgtgctgctaaaaacaaatgttagtaaaagttatggagacatgggaaaaaaacaaactataatactagttaataatgaaatacattaaacattgtttaaatattaaacagtaaaatactcctatattaaataaataattaaaaattgcatttgtcaatgggaatataggccaataccaccaataaaagggatggtctagtgcaaagggtggccacaaaacaacaacaacaacaaaaaatcaaaaaccacacatacatacagaaaaga

SEQ ID NO: 61797 - DNA, 492 bp, Homo Sapiens
ttggaaatcttggtaatatttattcatgataataaacacgtttttaatgaaagccatagatgtccaaacacaaactgaatcatgacaacccaatggtcttttttacaaaaaccatgacatatgtcccattaatttgctaaatgatatgaatgcagagaaaggatgaatcaaaaccactaaaatccttttaaacacaccatctagtttagatgtcaactctgaaaatggcattcaaaaatggtccctctcttttaaatttatctgctgagtttttgttacggtacctttaccaatttcttaaaagctttaattgttatcattcatttcaactcaaaactgctagcaatttggtttgactttccataaaggactaaattctgtcacattaatacatatgtaggtagttatacaatgttatttgtaagtatatgggtctgaaagggccattataaatgttatataaaccatatagtatatagggtatatatatta

SEQ ID NO: 61798 - DNA, 474 bp, Homo Sapiens
  misc_feature (4)..(4): n is a, c, g, or t
  misc_feature (18)..(18): n is a, c, g, or t
  misc_feature (67)..(67): n is a, c, g, or t
  misc_feature (72)..(72): n is a, c, g, or t
  misc_feature (113)..(113): n is a, c, g, or t
  misc_feature (379)..(379): n is a, c, g, or t
  misc_feature (424)..(424): n is a, c, g, or t
  misc_feature (429)..(429): n is a, c, g, or t
  misc_feature (448)..(448): n is a, c, g, or t
ctanttcaagttcaatangtaaaagctcaaaaatgaatgttctactccatgctgaaggagctgaaantgccnttcttcatattttgcactttctggtagttcccctgtttttnctaattccctaaaattgtgtgggtggagtggagccctgcagttggggggtaacatggaccactgattttgccctttgaccctgcacaatgacctttgcatcagccaaactcattgccatgacaactctttgtactgtgtccgtgccacagatctgttggtcacattgttaatagtaaaggggacaagttgggagacgggtcaatttttacattttttgttgcaattttttcttcaatgggttggtaaggtaggttttttttttttntaataataaaaggggttcactaggttaatactctaggaaatatcngtgtngttgccaattcaaatgtangttgagggttgtggaaaaggcgcttc

SEQ ID NO: 61799 - DNA, 535 bp, Homo Sapiens
ttttttttttttttttgctttctgccttctaaagtgcaacagtatatatcttgtagaactgtgggaggagagaagataatttttctaccttactccatattcttacttcaaactattttgaatagaggttcactgagccattgctgatagactgtgcatagctactagctgtcacactattgtaggttttttggagagattcatagggaagtgaatgtaaccaggaataaaggctctcactttagctctgggactatgcagtggatcttgggaacaaaataagatatctaatctattttccccattctggctagattttggttgttgtgatgctcctacttcctgtataggtttttgggatcatggtgcaggctagtaataggattcagaattgcttcccttttatatcgaccatgtaagggattctaaaggagggtaaatctcaaagtgctctgaaatcatccctctaaaatctgtcctgtggtgtgctaagatgtctgttgcctttttatgttaagctaaggaacttgaatgc

SEQ ID NO: 61800 - DNA, 437 bp, Homo Sapiens
gtagaaataggttctcacaatgtttcccaagcttatctcaaactcatgggctcaggtgatattcccacctaggcttcctacagtgctgggattataggggtgagccaccacacccagcctggagctaagttttgaacccagggatgtaactattcacatgcactatccaccatgctatagcagaaatctgagcacctgcctgcccacgaagacttggagtcctcgttattccttttgcaaaataattattaaagtagtagtcatgcaccagtgttggctcatatcccaaacgtacaaatatatttagcattctaccatcggaaacagcaactgctaaggtatcatggaataataaaataaatcagcagacaaaggctttgtaagtctgttattattaatcaaatgcctaagaacttctcaagtagagttgttataat

SEQ ID NO: 61801 - DNA, 477 bp, Homo Sapiens
tttttttttttttcattcaacaaatatttattgaacaactactctgtgtcaagtcctgtaccaggcactgaggatacaagaataaataaaacagtctctgccctcaaggagcttacagtctagcataagaacttaaaacacctcagaacctactgagaaaagtttctgggtatctagtatattgtctggaatactccaaatttcctaaaaatgtgaatctaaaatttatcaggaaacacagttgggcaattgaagatgcagtgaaatttaaaagaaaattcaaatattcaccctttatgtaaaaaccatgaaatctaaatgagggagaaacttaagaaagctgaaaatctacctattttaaagactttggaccagatttaaactttaaaaattattttattatctctgggtgacattttcatttatagtggcatttatatatacacatacatataggaggtgaatgtgagatatatt

SEQ ID NO: 61802 - DNA, 565 bp, Homo Sapiens
aaacctctgataaaatccaaagtcataaagatagttcagtacgtcctctgatgacaaggtctcctgtaaataccattgtgaacagaaggaaaaccatagtgtaatcccttgaccaccaaagcatatcccttgagcctgttgtagtacttttttctgggagagaggaaattgcgatctgaagattaaaatctttggtgacagaactggagtggatatgcaaatttcaaggaagaagttttccaaagcctcaagagaagtatcctaggacagttaatgtgaatatattttaaaaagtcaatcatttctttctatagctttggtttggtgcagtcaatgtcctcttagtgattacccaatacttatttctaagtacctgttaaaagctctggatttagtttcttacttaaaacagagataatgctttgagtgcttaaggaatttcttatgctagtttggatggctctaaatggagtttttctgactaacaaggctgacaactttctgaacaatatttaaacttggaatagtagacttggacggatagtaaagaagagagagaaaaaga

SEQ ID NO: 61803 - DNA, 503 bp, Homo Sapiens
cattttgccattttatccatttattatgtacaatattaaggcacaagtttaagcagcaaaggagaggaaaatctttggctgaccaacagcatcaatatttgctgtgggggacaggcagtgttcttggaatccccacactggtacacagacccatttggctgtatggccatgtacatcacccctcaatacagactggcaatatgaagacgtcaaacgttacagccagataccagtctgctgggaagagccggcacgagcacggcacactgccaccaagcacagcgacacacacacacagagcaggttggagggcagcggcagcaggacagctgaaatcgggtgcccatgcttaccactgtttcacagaattttacacaattctgtaagtgctcatggaggaggaggctccctgttcctcctcaaaaggaaaaaaaacaaaaaacaaaaaaacaccttgattcaaataaaaccaatgtggatatatttgcttacattccgttttg

SEQ ID NO: 61804 - DNA, 527 bp, Homo Sapiens
ggtggacttacaaattttattttatttgcattcacaaagaaatcaagtataacgctgactatgcagagtcactgtttacagccacagtttggagggagggagggagggaggtgtcaaaagtataaaggcagcaggttcagccccttaaaaatgatcaataaccatatacaatcatgagaaatcctggcctaaacatcgcaatgatcaatcccctacatgttagggcattgagtcctctgagtagttcacaaattttagcaattactttatatcttaaacttttaaaagtttcatgcaactgtggattttaatgcagcacagttccttaaaaatgtcaatacttcccttactggaaatagcgcattcctaaaaatacacgcatttttacaaattattacaactagctttccctctacacaatatttaagtaccaggaaataaaacttcttaaaatgcctatttaaggggcaaaatattttgtttttggtttgtgcaacctgctggcttttaaaaaagttcctcgtgcc

SEQ ID NO: 61805 - DNA, 559 bp, Homo Sapiens
tttttttttttttatttcatgtcactgttttgtctttttttttttaaactacacgagcagaacatgcagctatgtgtgtgcgctgatattgtttaaaggtaatacttattctcggaaggcaaggcacatcttgtggtagaaaatttcgtgcaaattaggaaacatggaatttttttaaaggtttttcttgtatcttttttttttttttttttttttttaaagaggaagtggggggtggagggggcgagggacagggagatagagccagggatagtctgccatgcatgtgtgtcagcgccgccagctgacctcgggagccaggtcgcaggagtccttgactaagcaccatgcaaagttaggtaaagagttggttctcgtcgcgctctcacctcccaccgccaggggctgacgggggcgctccagacgggcacccccaacttggggagctctgggtgtccgggctcccccatccccttcctcggaaagtgcatttcttacagtgtgtgcaatgtgggtccctccctttgggggtgtgagccgggcgaggtgggggggcctc

SEQ ID NO: 61806 - DNA, 569 bp, Homo Sapiens
ttttttttttttttaaattttttcccaaccttttaaaaaggaaaatgtttttttcaaaataatggcttatatggagtgtcaacataaaaacaatataatttcaaattgataagtaaaatatagtcagcaatctcacatacgtcaaaatttggtatataacacacattctggagaggtgttgcttttggtcttactttttttccatttttaaaattgtaaaacacatacaaaatttagcattttaatgacttttaagtgtacacttcagtgtcattaaattcacattgctgtgcaaccatcacgaccatccatcttcaggccactttgcatcctgtgtaacagaaactctacacccattaataactcccctttctcccctccctccagcgtctagcaaccaccattctactttgtctctatgaatctgactaatctaggtactttatataagtggaatcatacagtatttgtccttctgtgtctgatttatttcactttgcataccgtcctcaagattcatctatgttgtagcacgtgtccgaatttcctttcaaggctgaataatattc

SEQ ID NO: 61807 - DNA, 1694 bp, Homo Sapiens
tgaatctctagtttcctgcaacctgggagtgtccccatgagttttactttcctactttatgaagtgaacctgctttctttgggatttcatgtactcctaatgctttttctctccaggtatttctttcctgctacatattaggactcccaaggcaagagtgcacctttatttagacctgggagtaaagggaaagagttgcctgtctttcgtgtgttttcagctttggctctgtgggatcagttatgcctcattcctgaaaagggcctttttatccccccagaatgcttttgctttgccaataccaccttcctcagcctgccttttggaaaggttgagaagctaaaaagtcaggtaagagaaggcagagatggacttcagaacctgatttttaaattttaaggcaaggctggctgccactggtgagagtgatgcagcagcctagcgtgttcccagcagaggtctagtctttgccctaagaagtcaccggcttatgaggttgctatcacagtgcatgtggtaggttagatttgagaaatggttaggattgttctgttggataagtgcagacacctgcccagggaagcagctctttttttgtaagagttttcttggttactgaaatcaaatgggggaccagtttgttataggagacatctgtggccagcaaatctgaacagcttcctagagggaaagtacctcttttaaactaagttattatagacagtgaatgaatcctacccttaaaagagatgacggcagggtaagtgcaaagtaaaacctccttgctctagtctcttgggagagtattgtaatgaaagcagcgtttacttcgttgttgttgcattggggtgaaaaatctgagatgctggaatgatggcaatgtttgccttctctccttcccttcctgacagccagtgtgggccaggctccactctccatcttcacaccctgcccttgctccagtatttccattctgtttttctcctctgtctctttctgtctttctctcaaactccattctgcttccacccctgcccgcttttcttctcctttcctggaagtaatcattaaacaaaagaaaaagttgaatgttctttggtgagtttccttcttctctgccttttccttctttagccagttcccctcaacccctgtgcactccataggaaggacaaacttacctgtctgcttccttcccatgtgcttctccccaaattttcatatagatatatacgtacactccttttggaataaacgaagaggtacattatatttgacacaaacttgggagtgttaagaggtcataagtgtttacctatcagataaccatctgtggctctgtgttggattttttttataccattaggaaaatgggaatttttttataggcctgccatacttctactttgccaaatagcactttattatcaagatacacccatggctcatttcagactcactgaactttttttatatgaatgcacagtcgtcatattttgggcagtctgtgagttcttggtaactcatccccttactacaaaagcactaagtgaacaatacaaaagtataaaagcacaaatttgaacttacatagtttagtttaagtatgtttcactagaaaatcaaatatttagatttctcacattgaaaatgcttaggattgaggtttagctgcttcctttaaaaaaaaaaaa

SEQ ID NO: 61808 - DNA, 541 bp, Homo Sapiens
tattttgttcaaaaattttttatgaataattcattttcatagctcagaaaaggatataatcagtagaacaactaaaaacaaaacctcacctctacagagatagccagtgtgtagactttattacataggcacatattaaaaaaaaaaaacataaactggttttacataaaattaaccacaatagtgcaagaggttacactgaatgagaatggatgatgaatgatggaaaatgtaaggcttggaacagctgaatcattcactggatcttgggttcatccatcctgacgcactgaaatttattacagacattacaagaatggagggtgaggaatggtgcttctctgtcatcgcctggctaaaacactgatttgggataaaccccttggattacggtagtttcctccaggttctcttgttaagtagacataaaagttaaatgaatgctggcttaaggtcagaggagttcatatccttctcttccctcacccctatactttagaactctcacacccaacaatttgctgttgggacctgactatac

SEQ ID NO: 61809 - DNA, 654 bp, Homo Sapiens
  misc_feature (603)..(603): n is a, c, g, or t
tacctctgtcaatgattctttggagaaaattacccataatttgctacttgaggattttattccctggattctctggatgctcattgcatgaaaagtggaaaagtttagatctatggaaacagaactgttgcctatatggaaaatcagtgccttgtggcaatacaggtaagaacagtgttgctcttgaaaaagtggacagtgggtggtctgaatgtgtcctggtccctggagtgggtttttagattgatgtggactcttcttagacttgtaagtaaaaaagttgtttcttcccctaaaagggaactgtgcgccttatacctggaattgctgggaaactgaaacattctgtagacttacttgtttccaactgtatcgcagcaagaagtctatgtgccccaggatcctggattacctgaggaagaagagatcaaggaaaaaaaacccaccagtcaaggaaagtcaagtagcaagaaggaaatgtctaaaagagatggcaaggagaaaaaagacagacgagtgacgaggtttcaggaaaatgccagtgaagggaaggcccctgcagaagacgtctttaagaagcccctgccttctactgtgaagaangaagagagtccctctccacctaaagtggtaaacccactgatctgcctcttg

SEQ ID NO: 61810 - DNA, 517 bp, Homo Sapiens
gctgttgttactttggaacttcttgcatgagaatatttgcgtatatgaatctccagtaccaagcatacaccaaaaatgtgtacatttcagatgaaggacataacagagccctaataaaatacagaattgagcttaatttaactgtcttgggcaaccatcatgcctggctaatatgccatattatttccgttgtacacagtacatgttttggtttactaaacattgatcaaaattgatcgaaatctctaagttttggttaccatgtacagagaacaattgctcagcatggcatttaaataaaacagtaatattttaaaaattcacaaatacaatgcacaatttattttaaaaaaataaaatttaaaaaccttgaggatggatgaggctttgggtaattaacctgaaaaacaaaactaacaaaaaactacaagaacagtatgttaccagatttatactttaaaacactattaaaagaggaactcactgacactgctagaaatatttctaaaattcagct

SEQ ID NO: 61811 - DNA, 821 bp, Homo Sapiens
  misc_feature (521)..(521): n is a, c, g, or t
tttgtatcaattaatttttttattcagaacctggatctttaagactggtataaacaaaaataaaatacaaacaacttgttattaacataatagctgcagttattaactgcaagaatacagtaaaaaggagtcatactaaatgttaatgttcttgcaacagaattttcccaatcaccttaaggtagcaaattctggcaagaaatgataattcatttcttattaaaaatacttaaagaatttccaagattgatcagttgtgccacaaataaaacagcagtttattcaaaagagcccttacctttctcttattttcctaaaagatctgccatttacaggtaactactaatttcagatcagttattcaaaccagggttcttcctgtaaatccacatcttagctttatatatagtaaacttacactcatattccctttccagtcttgaagctaaacacttttgtaaaaggaacaatctaatatcacttcatatgaatcttgttcttactttcttctatctcatttntattttcttctattatttgtcttcctcctcaccacccaaaagctgtttcttgcatgtggaaaaggagaagactagcagccacttctgcagcaaggcccagagtgaaggtaaaatctgtgacagctggaccgtgcagcctctgctaatggaggctgtatgagtccctggagtgaagggcaggcagaccactcctttggttgggtatctcactctaacattgtacacatcttcttctgctctttggggagattatttgagaatatttaatttactttttagagttcacaataaactagccta

SEQ ID NO: 61812 - DNA, 455 bp, Homo Sapiens
gtaagcttcaagtgctgaaaagcaaaaaatacaagatggtttctctaaaagaatcatttttgagaagtcacgggaggtgtcagtctcttaccaacatttagataaataaattgtacattataaaccattactgatgacgcttatgcaaggatataactatgtaaggattttaagcagtaaaaaataccgtaaatcaagacaatgttttaaccaaactgtttccaaccatgttaagttacagttgtacactaaaataataattattcatgtttgagaattagagatcttcacaaaaatacttcaaatatattcacagctggacaaaaaaatttcaccttacactgttaccatggagaaaaggttctacatttggtgtaactcctgtagcactgacaatgaaatcgcagccatatatcttttcattggtcaattccacatagacaggccacatctct

SEQ ID NO: 61813 - DNA, 475 bp, Homo Sapiens
tttctgcaaagaattattcaaaaaaaatctctttacttatggagggaatatgatagcacctcagagcttaggaggagaccagtccattaaaacatctttttaaccgtggcaaagcctatggttctcaaacttgagcatgcaccaaagacccctggagggcttgttgaagactgctgggccttgcgctgggagtttcggattcagtaggtctggtgagggcaagatgtgctgatgctgttggcctagggaccacacattgagaattcctgctctgggcatctccctttctctccccattgcttcccacttctccaccttgccaagattgcttctttgctgaatgtcttcatgacatgccccattcttcaacactgtactttaaaaattttttattccctaaatctggcaattttaccaagcatttatgatgtctactcgcagtgacagaaaaatttcttcttttggccatagtttg

SEQ ID NO: 61814 - DNA, 439 bp, Homo Sapiens
tttttttttttcatttacaaatttattttaacccctctccccaaattgcggggtgcacagaattctagctagcagaacacacgagcagtgaaccatcctctggcctcttgcattttgagaggacgttctttccacttccacacactctggccacccctgacgccgcagtgggggaagtagatggccctgctgcccacgatgactggctgcctgtcagggcagggcagggctgagtgcgaagtctctgagatgtgagagcagcactccatctgggtcaggacagcgctggggtcaggaattggagctcctgcctgtgttcacactcccacctctgttttttttttttgagttgagtctcactccgtcacccaggctggagtgcagggtgacggagctagactgtctccgaaagaaaagaaaagaaaaaagaagagaaaag

SEQ ID NO: 61815 - DNA, 884 bp, Homo Sapiens
cccacgcgtcgcggacgcgtgggtcgacccacgcgtccggaaagattctattttttcttttttgtacataatgggaatttcattccagattatattttatttacatattaatttcacagaatattaatatttcttaacttcttaaagcatgctagcgttttatgtatatgtacacatatattcagacagggtaattttatctgctgcctaacattgtactaaaatattgctttatctgtttttaattacaaaatgctaatgatttcttaaattatagtttaaagacaattggcccaggaagcaaatcccctgcctttagtatgaaccactataagtaaccttacaaatagagttaatccaagacaatattaacaaactgtgctttgtctttaataaaagggataggattaacaaacatattgatggcataacctattcagctatgtccttatttttgcaataatgtaacctcaaatatggattgttgaaccaacaatggctgtgttaaagaagattaaataaacgaaaaataaaaagcaaaaaaaaaaaaaaaaaaaataaaaaaaaaaaaaaaaaaaaaaaagaggggggaaaaaaaaaagaagaaaaaaaaaattaaagaggctgagccagcgtgagtcaacaaaaccaaagcgggccgcccgccacaaccaaccacggagcgacaccatacattaactcgaagaccaacacaccaggtgaaaaagagagaccgacaagacagccggcccgcaacacaagcttatcacaccacctacaggagcaggcgagatgacactaccacgagcgaaccagaagcaaaacaccagcccaatcgccaggcgggacagagtaaggaaagaccagcggaagcgcaaaacccc

SEQ ID NO: 61816 - DNA, 510 bp, Homo Sapiens
  misc_feature (20)..(20): n is a, c, g, or t
  misc_feature (25)..(25): n is a, c, g, or t
  misc_feature (27)..(27): n is a, c, g, or t
  misc_feature (31)..(31): n is a, c, g, or t
  misc_feature (38)..(38): n is a, c, g, or t
  misc_feature (52)..(52): n is a, c, g, or t
  misc_feature (55)..(55): n is a, c, g, or t
  misc_feature (65)..(65): n is a, c, g, or t
  misc_feature (67)..(67): n is a, c, g, or t
  misc_feature (78)..(78): n is a, c, g, or t
  misc_feature (96)..(96): n is a, c, g, or t
  misc_feature (117)..(117): n is a, c, g, or t
  misc_feature (139)..(139): n is a, c, g, or t
  misc_feature (145)..(145): n is a, c, g, or t
  misc_feature (492)..(492): n is a, c, g, or t
  misc_feature (506)..(506): n is a, c, g, or t
tttttttttttttttgaaantggangnattnatttttnattgcaggtaaaantgncctggcaagnanactaaaattgnataacttatggttttagncatgtagataagtacatgagnagtaaatcacatttctatatgnaatagnaaatatccactttattcatgttatagattataaaactatactaaacaaaaagtaatcatttactattacaaaaattattaagaaaccattacaaaaattctctggcctactaattttcaatcaccatagaaaatacagtatttaataatgctgctgctgtacttacataaaacatattaaggaatagatgttatatttctgtgtttgaatattgagcttaaacataaaacatgtttgaaatgtgtttgtgtgtgtctctcacacacacacataacatgtacatacctgaaactcatactgcaattgcaacacatcttagtttttccttttaacatccaaggtacatntaaatgagggtatntcta

SEQ ID NO: 61817 - DNA, 542 bp, Homo Sapiens
gttgttttcaatttaatttattctatgcagtttaaagtgaaagttaaaacatcatacaaaccacagaagcttcatagtactgaccagttttaaaacaaaaacagtgaatgatcatttacacacattcctcatctttaattttacatcttgttatatatacaaaggtactattaaaacacgtaattctaattatttataaacctattgtcaagcagcaagatggcaatgcatcatagcagaccacagaatatttccttcaaggaatcacagcagcagtatttggtgaatggttatgcatagaaccaacttggaggatcgtgttaaacattccccataaaacaggtagcacatgtacaccaacaaatgaaaaatgtaactttaattgacataagataaaatgttactctttacactttaagttaaaaactataggacactttagaagcagacaatacaaggtgctttagttctagacttcacaacagaacactattccattagtcgcttgagagtccataacctctgaggactgctcaatggct

SEQ ID NO: 61818 - DNA, 815 bp, Homo Sapiens
  misc_feature (329)..(329): n is a, c, g, or t
cagtatttagtaaaataaatgtatttttaaaatatttttaggaagctgcagaatggcgactgagtgcttcttgataagtctgcagtgttagttctatataggctcccttctgtgcttctgtttttgcaaagaccttgattaaatttattccctcagcagcctgatccttggccccttgagccgactggccatctggatggagcacgtgatacagctggaccaagttggttgcatcatcgattaaatctctctgaatctggtcaatcagcaaaccatcaatctttttattatttacaaaataccacaccattccaccaaagtatcttgtntgaacgtaaaaggtcatattttccacgtttatctatatcttcataggtcttgtgatgaaccttgatatactctgtggaatctggctcaaactgggcaaagcagagattgaggacatcaacatgcctgtcctggctatacatagtcctaagattttcttccttgaaaattattggtgtcaaaattttacgaccttcttttgggaaataaacttgtatcattcggtcccgttcttcccaagaggctttgcgtagtgtgccacttggttctctgacgacaataaaacgctcccggtgtggtatgctatatgatatatccgtaaacacatatttggttgtttctgttccttccaaattcttatcttcagctaacacatcatttattggtactcgctcttccagaactggtggcatttttaatcggaccttagctgcctcaactggccgtcttgtagcctcttccaatggtgcctgagtcattagcttata

SEQ ID NO: 61819 - DNA, 5351 bp, Homo Sapiens
ggaagagaaactggagtctcatttgcaaaacctgtccactcttatggcaccaacatataagaaacttgcacctgatgcatataataatcagattgaatatgaacacagagcaccagagtgccgtctgggtctgaaggaaggccgtccattctcaggggtcactgcatgtttggacttctgtgctcatgcccacagagacttgcacaacatgcagaatggcagcacattggtatgcactctcactagagaagacaatcgagaatttggaggaaaacctgaggatgagcagcttcacgttctgcctttatacaaagtctctgacgtggatgagtttgggagtgtggaagctcaggaggagaaaaaacggagtggtgccattcaggtactgagttcttttcggcgaaaagtcaggatgttagcagagccagtcaagacttgccgacaaaggaaactagaagccaagaaagctgcagctgaaaagctttcctccctggagaacagctcaaataaaaatgaaaaggaaaagtcagccccatcacgtacaaaacaaactgaaaacgcaagccaggctaaacagttggcagaacttttgcgactttcaggaccagtcatgcagcagtcccagcagccccagcctctacagaagcagccaccacagccccagcagcagcagagaccccagcagcagcagccacatcaccctcagacagagtctgtcaactcttattctgcttctggatccaccaatccatacatgagacggcccaatccagttagtccttatccaaactcttcacacacttcagatatctatggaagcaccagccctatgaacttctattccacctcatctcaagctgcaggttcatatttgaattcttctaatcccatgaacccttaccctgggcttttgaatcagaatacccaatatccatcatatcaatgcaatggaaacctatcagtggacaactgctccccatatctgggttcctattctccccagtctcagccgatggatctgtataggtatccaagccaagaccctctgtctaagctcagtctaccacccatccatacactttaccagccaaggtttggaaatagccagagttttacatctaaatacttaggttatggaaaccaaaatatgcagggagatggtttcagcagttgtaccattagaccaaatgtacatcatgtagggaaattgcctccttatcccactcatgagatggatggccacttcatgggagccacctctagattaccacccaatctgagcaatccaaacatggactataaaaatggtgaacatcattcaccttctcacataatccataactacagtgcagctccgggcatgttcaacagctctcttcatgccctgcatctccaaaacaaggagaatgacatgctttcccacacagctaatgggttatcaaagatgcttccagctcttaaccatgatagaactgcttgtgtccaaggaggcttacacaaattaagtgatgctaatggtcaggaaaagcagccattggcactagtccagggtgtggcttctggtgcagaggacaacgatgaggtctggtcagacagcgagcagagctttctggatcctgacattgggggagtggccgtggctccaactcatgggtcaattctcattgagtgtgcaaagcgtgagctgcatgccacaacccctttaaagaatcccaataggaatcaccccaccaggatctccctcgtcttttaccagcataagagcatgaatgagccaaaacatggcttggctctttgggaagccaaaatggctgaaaaagcccgtgagaaagaggaagagtgtgaaaagtatggcccagactatgtgcctcagaaatcccatggcaaaaaagtgaaacgggagcctgctgagccacatgaaacttcagagcccacttacctgcgtttcatcaagtctcttgccgaaaggaccatgtccgtgaccacagactccacagtaactacatctccatatgccttcactcgggtcacagggccttacaacagatatatatgatatcacccccttttgttggttacctcacttgaaaagaccacaaccaacctgtcagtagtatagttctcatgacgtgggcagtggggaaaggtcacagtattcatgacaaatgtggtgggaaaaacctcagctcaccagcaacaaaagaggttatcttaccatagcacttaattttcactggctcccaagtggtcacagatggcatctaggaaaagaccaaagcattctatgcaaaaagaaggtggggaagaaagtgttccgcaatttacatttttaaacactggttctattattggacgagatgatatgtaaatgtgatccccccccccccgcttacaactctacacatctgtgaccacttttaataatatcaagtttgcatagtcatggaacacaaatcaaacaagtactgtagtattacagtgacaggaatcttaaaataccatctggtgctgaatatatgatgtactgaaatactggaattatggctttttgaaatgcagtttttactgtaatcttaacttttatttatcaaaatagctacaggaaacatgaatagcaggaaaacactgaatttgtttggatgttctaagaaatggtgctaagaaaatggtgtctttaatagctaaaaatttaatgcctttatatcatcaagatgctatcagtgtactccagtgcccttgaataataggggtaccttttcattcaagtttttatcataattacctattcttacacaagcttagtttttaaaatgtggacattttaaaggcctctggattttgctcatccagtgaagtccttgtaggacaataaacgtatatatgtacatatatacacaaacatgtatatgtgcacacacatgtatatgtataaatattttaaatggtgttttagaagcactttgtctacctaagctttgacaacttgaacaatgctaaggtactgagatgtttaaaaaacaagtttactttcattttagaatgcaaagttgatttttttaaggaaacaaagaaagcttttaaaatatttttgcttttagccatgcatctgctgatgagcaattgtgtccatttttaacacagccagttaaatccaccatggggcttactggattcaagggaatacgttagtccacaaaacatgttttctggtgctcatctcacatgctatactgtaaaacagttttatacaaaattgtatgacaagttcattgctcaaaaatgtacagttttaagaattttctattaactgcaggtaataattagctgcatgctgcagactcaacaaagctagttcactgaagcctatgctattttatggatcataggctcttcagagaactgaatggcagtctgcctttgtgttgataattatgtacattgtgacgttgtcatttcttagcttaagtgtcctctttaacaagaggattgagcagactgatgcctgcataagatgaataaacagggttagttccatgtgaatctgtcagttaaaaagaaacaaaaacaggcagctggtttgctgtggtggttttaaatcattaatttgtataaagaagtgaaagagttgtatagtaaattaaattgtaaacaaaacttttttaatgcaatgctttagtattttagtactgtaaaaaaattaaatatatacatatatatatatatatatatatatatatatatatatatatatatgagtttgaagcagaattcacatcatgatggtgctactcagcctgctacaaatatatcatgatgtgagctaagaattcattaaatgtttgagtgatgttcctacttgtcatatacctcaacactagtttggcaataggatattgaactgagagtgaaagcattgtgtaccatcatttttttccaagtccttttttttattgttaaaaaaaaaagcataccttttttcaatacttgatttcttagcaagtataacttgaacttcaacctttttgttctaaaaattcagggatatttcagctcatgctctccctatgccaacatgtcacctgtgtttatgtaaaattgttgtaggttaataaatatattctttgtcagggatttaacccttttattttgaatcccttctattttacttgtacatgtgctgatgtaactaaaactaattttgtaaatctgttggctctttttattgtaaagaaaagcattttaaaagtttgaggaatcttttgactgtttcaagcaggaaaaaaaaattacatgaaaatagaatgcactgagttgataaagggaaaaattgtaaggcaggagtttggcaagtggctgttggccagagacttacttgtaactctctaaatgaagtttttttgatcctgtaatcactgaaggtacatactccatgtggacttcccttaaacaggcaaacacctacaggtatggtgtgcaacagattgtacaattacattttggcctaaatacatttttgcttactagtatttaaaataaattcttaatcagaggaggcctttgggttttattggtcaaatctttgtaagctggcttttgtctttttaaaaaatttcttgaatttgtggttgtgtccaatttgcaaacatttccaaaaatgtttgctttgcttacaaaccacatgattttaatgttttttgtataccataatatctagccccaaacatttgattactacatgtgcattggtgattttgatcatccattcttaatatttgatttctgtgtcacctactgtcatttgttaaactgctggccaacaagaacaggaagtatagtttggggggttggggagagtttacataaggaagagaagaaattgagtggcatattgtaaatatcagatctataattgtaaatataaaacctgcctcagttagaatgaatggaaagcagatctacaatttgctaatataggaatatcaggttgactatatagccatacttgaaaatgcttctgagtggtgtcaactttacttgaatgaatttttcatcttgattgacgcacagtgatgtacagttcacttctgaagctagtggttaacttgtgtaggaaacttttgcagtttgacactaagataacttctgtgtgcatttttctatgcttttttaaaaactagtttcatttcattttcatgagatgtttggtttataagatctgaggatggttataaatactgtaagtattgtaatgttatgaatgcaggttatttgaaagctgtttattattatatcattcctgataatgctatgtgagtgtttttaataaaatttatatttatttaatgcactct

SEQ ID NO: 61820 - DNA, 499 bp, Homo Sapiens
ttttcatttgtacagtttttattcttgcaacttttctgtagctttgaaatcatttccaagtaaaattaacttttttaaaagaggccatacaatatagcagtggtcctcaaccagggctgtgtcctggacacaccctaggagcaccttagatgctctgggacccaggcatctgtagttctcaaagtgccccggtgcttccaatgtgcagccacgggagtgaaacaccagcctagtgggtgagctcactcactaaatttcagacatgacgagcagtgcttttgctctctgaagaacaagcactgggtaatgccaacacctagcctcagctacacgggggaagggcagaaacaagatgttgaatttgcatggccctggccaacacagacaacatccccttctagtggttccaggcaagagaaaaaggcatttccaggacaactgtgccagtaattaaacacaagttaaaactggcaggagctgggaatggtttcccagactc

SEQ ID NO: 61821 - DNA, 554 bp, Homo Sapiens
tttttttttttacatataaaaaaatgtatatttatatccctaaaaggcaatacagaatttataaccaaaccatgtgtgagaactgttaaattacattccaaataccagcagtggaacaaacagaaacacagagatgttttaaaaaacatgcagcacgttacaaagaggccgtgtaataattcacaacttttgttagcagccgttaagtttgattagtattaagcagcaatggtttaagcaattttaaatcatgatatgataggcacatatatgcattttactgttccaattatagtttagtaataggtcaggggtttgagcaacattttaagcattataattttctcctaaattatttactatgggaaattggcttccacttaaggttttcatagaaactgatggttattttatgagggagatgtctggacgtatgtgtgtatgtgcatgtgtgtgtgtgtatatacacacacatagataaattagaatttgcagatattatgtgtatatatatacacacatatataatatatatattatatatatatataatt

SEQ ID NO: 61822 - DNA, 439 bp, Homo Sapiens
tttcctttacatttaactattaaaaaagttttttattaataaatgggctcctctgtggttcatatacaatcataagtgaactttaaattccattttatacaaacatctcaaaaaatattgggagtgaagtatggtaggaaatattgctcacattgctaattaacatgcgtatatgaaaggaggaaaatgttttgttagtgcatatacctccagagcagaaaacccacccaaaacaaaagatctaaaataaaacatacagtagctgattacaaaaaaaggtaatgtccacaaaattaagtttttcatgctattctactttccagtactatgcttcaggtaatcaatttgcatggctagatgttggatacttgaggtatataagaagggaaacctgcatgttgaggaaaatctgtcatcttaagggttgtttctttttgtt

SEQ ID NO: 61823 - DNA, 581 bp, Homo Sapiens
ttttctcttactttttcagattatttattaagagcaaaaggggggccattccatcgtgtgatattgcaacatgaaaagtcacatacatactaaggagaccccacagaattgagagcctttcaacagtacagagccatagattacaaagttaaaatacaaatgatcccccagatttggcaggaaacaagtacaatatgaggaggcctggaatggaagggcacttacttttcaataaggcagttacaaaatgggaaaaaaaaccccccaaaaccttgtaccccaaaatatactctgatgagcgtagcagacaatagaaatgtaaaagaaggatcctgtataaccctctgtcattggcaaatgtgtgcattaagtgaaagcaactgaagggtttgtgttttaagatgcaagctagatgaaacaactgactgtagacatttctacctcaagaacagttcatatcttgccctaggctgggttctacctcaaaacaccagacccactttaccatttctaaccataaacttggaaacagtctataatacaatgaaaggaataaaaaggcacccctagagcaccatgct

SEQ ID NO: 61824 - DNA, 595 bp, Homo Sapiens
tttggacttttttgaacgttgttgttccattctttctttctccaatttcttctgcttttcacgttccattttttcaagaccttcgcgaatccaagcgggaagagtcctgcgttttactgcgtctgtttcacgtgggaaaaatatacgcaagtcagttaagtaaaatatttctacaaacttgtgagtaaatttaaaaaatatcccattaaatatcatgcctttcttcaatgccatcacttttagtaacagcagggaccactgctctagtgcttacaatctgccaggacacaatgaaagcatgttaaaccatcatctaatttaatccttacaaaagccctcagagatcactactattactccacttttttccacaggtgaggaaactgagactcgaaaaaattaagtgatttgctagtaagttaaaaaaggagtaaagttagaatcttcctaaaatgtaaaaagtaaagatttattaacaaatgctcctgtccattaaatactgaacaatttagaactttccagatataaagtggcataaatatgtatttgtcacttgaaataggctggctctataatgttatttaaaaaattgaaa

SEQ ID NO: 61825 - DNA, 541 bp, Homo Sapiens
gaattcaagtcctaaagcctacagttttgaatactactgaaatgacaagttattccagaccaaaattgaaaaaatggttgacctcacccaggtaatggatgatgaagtattcatggcttttgcatcctatgcaacaattattctttcaaaaatgatgcttatgagtactgcaactgcattctatagattgacaagaaaggtttttgccaatccagaagactgtgtagcatttggcaaaggagaaaatgccaagaagtatcttcgaacagatgacagagtagaacgtgtacggagagcccacctgaatgaccttgaaaatattattccatttcttggaattggcctcctgtattccttgagtggtcccgacccctctacagccatcctgcacttcagactatttgtcggagcacggatctaccacaccattgcatatttgacaccccttccccagccaaatagagctttgagtttttttgttggatatggagttactctttccatggcttacaggttgctgaaaagtaaattgtacctgtaa

SEQ ID NO: 61826 - DNA, 2467 bp, Homo Sapiens
atctctgcaagacaaaagtcagaaatggcttccctggggactgagagcccatagttctcttcccactgctgcttctacccttttgttttgcttggctctctaaaattgtctcagctccagctcttctcacagacagttttatcatcttatcatttttggcacaaaacaaactatgttttattcagtttaccaagaagatggagtcttctgatgtaaacaaaagactggaaaaactctcagccttggattataagattttctattatgaaatacccggcccaataaacaagacaacagagcgacatctagctatcaactgtgttcatgatagagttgtttgctggtggccactggtcaacgatgatgcttggccttgggcccccatttcttctgagaaggacagagccaatctactcctcctgagttatgctcaaggaagactagaggttctgagttctgtccgcacagaatgggacccactggatgttcgctttggcaccaaacagccttatcaggtgttcacagtggagcactccgtaagtgtagacaaagagcccatggctgacagctgcatctatgaatgcattcggaataaaatccagtgtgtgtcagtcaccagaataccactaaagtcaaaggccatcagctgctgcaggaatgttactgaagacaaactgattctgggctgtgaagattcttcgctaattctttatgaaactcaccgtagagtgactctcttagcacagactgaacttttgccttcattaataagctgccacccaagtggtgccattctgctagttggcagcaaccaaggggagttgcaaatttttgatatggctctatcccctattaacatccaactgttggctgaagaccgcttacccagggagactctgcaattcagtaaattatttgatgcctccagcagtcttgttcaaatgcaatggatagctcctcaggttgtttctcagaagggtgaaggtagtgatatctatgatctcctcttcctcaggtttgaaagaggacctttgggtgtgctgttgtttaaactaggcgtcttcactcgaggacagctgggcctgatagacatcatcttccagtacattcactgtgatgagatctatgaggcaataaacatcctgagcagcatgaactgggacactctgggccaccagtgctttatcagcatgagcgccattgtaaaccatcttcttagacagaagctcactccagagagagaagcacagcttgagacaagccttggaaccttctatgctccaacaagaccacttctggattccactatattggaatatagagatcaaatcagcaaatatgcaaggagattcttccatcacttgctcaggtaccagaggtttgaaaaggcatttctcctagctgttgacgttggtgctcgtgacctctttatggatattcattaccttgcactagataaaggtgaattggcactagctgaagtggcaagaaaaagagctagtgacattgatgcagaatcaataacctctggggttgaactcctgggacccttggacagaggggatatgctaaatgaagcatttattggcctgtctttagcacctcaaggagaagactcatttccagataacctccctccctcttgcccaacccacagacatattttacaacaaagaatactgaatggctcttctaacagacaaataattgacagaaggaatgaacttgaaaaagacatctgttctggatttttgatgactaatacctgtaatgcagaagacggagaactgagagaagacggcagagaacaggaaatcagagatggtggttctctcaaaatgattcactttggtctggtgtaaacattaagaaaaaaaagaaaactgccttcttcatatctaaacttttcatggcctgatacagacttaaaatcccccgtgtggatttttaacaagagacagtatgaatcatataaattagttaagagttttgagttgagtgtttgttttcaaaataaagttttattatttcaaaaacatgcagcataacagcaaagtgatcgtaagtaaaagtcttcaacctacttattttcaataatgtaaaattttgaaagtgtcttaaattgtatgttaattaggtgctacaaaaatagaatatttaaactttgttctcccaggtactttaaaaaaggggcagtagggggcaggcatagtgctcatgcctgtagtcccagtgctttaggaggccaaggctgaaggatcacttgagcccaggagttcaagactagcctgtgcaacatagtgaaacgctgtctctagaaaaaattttaaaaattagccaggcatggtggtacatgcttgtgaagctgaggcagaagaattgcttgagcccaggagttcaaggctacagtgagctgtgatcgcgccactgcactctaacctgggcaacagagagtgaccctgtctcc

SEQ ID NO: 61827 - DNA, 1515 bp, Homo Sapiens
aattgcaccactgcacccggcctgggttaaagagtgagaccctgtcagaaaaaaaaaaaaaaaaaaagtcatttcataaaattgttggaaaatatgcatttctgaaggagaggcgtcagtgtgaagaacactcatctgaactaagaatcagaaaatggatctgaatttcagctttgctattcattcagtgtccttaaataaatcatgcaaccttgcacatcattttcttatttatacaatgaaagcattggattgatcattgctaacatttctctctgctctaaaactgtgatttttatcctttgctatttgcaagaaccagaagagataaaggttgccttttatgttagatttgattctaaatctaatgatataggacagcggtgcttaagctatttttgtgaagtgataaggaaaaaccctgggaaaggttcagtggtggtttgcacagctgattatttgttatgattaattgttccacttttattttcttttgtggcctgtaacctaatttttcacttagtattgggattattttagtacaaacaagtgatatatttgtaagaagggatccagagagtatggtaaaatgtctggatgccgatgttctctaagttaaaggagattctagggggtagtctataataaaggaaaaacacattttttaaggttttaatttttcagagtgcagggaggtgctaggtgctttcctcacattaagtataacatttccttttacagtatgtcagcatattgttgaagttttccaatatgaaaataatatctatttactagcatattaaagcttagcaagagaattttaatagcctcatttagcctcctaaacagtcagaggcagggaaatattattagagtaacaacactgtaggtgctctcttttgtctctagtagcaaaatgaattctggctaccatgtactgtaggagtgctgctggcttgaggctcctgagatctggcatggctgttatactgacttgttttctttcaaattcatgttagaaaaatctgtgcgtgtgtgtgtgtgtgtgtctgtgtacacaaatatttatattaccgtgtctcagtgctttgagactgtgtgaggcgggggaagagctgttgaggctttttatagataaagttgataatgcttttttgacttggttttctgttaccatcttttttgtctctattatgatatctattatataagtcagaaggagaaatgacacaaatgccagtataccagttcaagataggatcttggtttgatttagctaaaatttaccctacttattggtgcaatttttaataatagaaaaccattcctcattgcttggaatttttatctgcactttccattttgaatattattgttagttgttgaacaccaggtttactctgcaggacaccaagcaaagctttagaaatttctgccatcattaaaccctgaacagactgataagcagcaaaattgaatcagtttaaaaaaaaaaaaaaaaaaaaaaaaaaaaaa

SEQ ID NO: 61828 - DNA, 442 bp, Homo Sapiens
  misc_feature (382)..(382): n is a, c, g, or t
ttttccaaaattagaatttatttcagtttctaaggaatgaatccccgagtgtggcaggaaggacacagccggctcctgacgcacacctgatttgattcaacaccgagtcggcacagacacaaccagagatggcctggagcacaggaaggcacagtgaggtagggacagtggccattgtcccccgcctgccaccagggctgagagggcagcgcacgcctcggcccctcctataagcccctgccccctcggagctgggtgtcttgtccagaagccggggaacggcccctgcagtgtgggaggggaggggctgccgggaggcctgagctcagacagttaaataatcctttatttgggtgggctgggggaggggtgactggcccangagggcaggcgaggccgggcccatacccccatggggggtggcaggggcctctggcgggct

SEQ ID NO: 61829 - DNA, 425 bp, Homo Sapiens
  misc_feature (18)..(18): n is a, c, g, or t
gatcccctgtatccgggnagagacaacgtttaatgactcagtctccgcctgcacagagcctttgagtctagagggagacacagacttactgacaggctgggttgtgtacataagtgctacgggaggaaaagctgagagtgtctgagaatttatgagatgtgtgtctcatcagacttgggcatcaaaaaaaaaaaaaaaaaacccatcctgggaggaagggacctcatacgtcgaggtgacgggggggggccccattcgggttttaatagggagcaagttctttggtgggctgggctctagatctcccggccttggacttgggtcacaattatttatccaaccaccgttagtctcatcctctcttctctttcctgctctagccttttgctcctctcccaggttgtttctcatagctccccgatacg

SEQ ID NO: 61830 - DNA, 2420 bp, Homo Sapiens
accagtttctgcacccctctttcttgcagccccctctcccaacaactccgacacctgttccaagggaacctggccggaagcctctttctagctcccgactcggagaagtcactggtagcccctcccctccgccccggagtggcgcccccacaccaagctcgcgcgccccggctctgtctcccacccgggtgagctccttccttccttacctttcttcatgcccggcagaggtgcaggtgcagcccttgcttgctcagagcctggcgactcccactcccccgggtcccgctcgcacccatccaggccccagaatcttctcatccacaggcccctgagagccccccaatgccctgtccccctccccccagctcgcctgtcttcccacccctcccgcacccttccccatcccaggcttaccacctgcctgcacccgagtgaattgtctgcagactgcgggctcccatgctgggactgctagccaccaatgagggcagggacgatgaagtgactcgcccaaaagagctatttggtgactgggttgagcctattccaaacatcaggcgtgccagccagacccagtctcgctgccgcagagagtggtccatagttcatgcctcaagcgtaagtggatcaactcaagcaagagttgcccacaacttatgccaatcagaaacgatggacgcaggaaacagctagggaccccctgccatggagctcgccttcacatcctcatgctactcgttttactttacttcctccgttctctcctgctgaggttcgtggggtgagagttgatgcatgtttgcgtgtcaatgcgcgcgtgagtttttcatgccacacagcgtttccctcactttgctcagtgtgccttttccttcccttttccttcacatctgctctagactgatcgcataaatccagatgacatagatttagaaaatgagccctggtataaattcttttcagaactggagtttggacgcccggtaagtgaggctagactattaatataagaaaactaggagtatactgtttgatttctaaagtacaattatcagtagacgtgggtgtcattcagagaacaaaggccgaatgcataatgtatacacacacttggtacagcgtagtccagattcatttctgtaccaaatggtcaaatgtgctcagacatttcctatgtggtttgtaggtcattcattaagatttctttatatctaattcattacaagttcaaaatcttgaggtagtttctgtgatggaatattcagacaattattacagctgtatagaagatttgtatttgtttacagtctatttggtctagttcaagcagaagagcaccttgacattgagtcctgtttgctgagcaaacatcaggcacctggagagtgcgggcttctgtcttcattatctcctcgaggcctcctgatgtcccgccaagaagaagaaaatggggactggaggggttaagtaatgtgcacaaaatagtaaatggcagagtaagaagttaaacgcagagcctgttaaagaaaaatgaaaatctctgggcagttctcactataatatactgccagagtaatcccactacaaaatacagtcacgtgttgcttaaggatgtggacgggttctgagaaatgtgtcatcaggtggacttgccattgtgcaaacatcgcagagtacttacacaaacccagatgctagagcctgctacacgcccaggctgtgtgctatggcccgttgctcctgggctacaaacctgtacagcaggttcctgcactccatactgtaggcaactgtaatgcaatggtaggtatttgtgtacctaaacatatctaaacatagaaaaggcatggtaaaaatacagtcttataatcccataggaccaccatcatatataggtgcatcgttgacggaaacgtcattatgcaacacatgactgtacctagtttaccattagggatataaggaaagaaaaaaatcaggaagtcctgtggatcttaatttccagacttgctagtgaaagccatcacagcttctctaatccccagactcccgccagaggaagcccagaggttgggccttattgcttagcctgtttgggataaagagtcaacttgaggccgagcacggtggctcacacctgtaatcccagcactttgggaggccgaggcaggcggatcacgaaatcaacagattgagaccattctggccaacatggtggaaccccgtctctgctaaaaatacaaacattagttgggcatggtggcgggtgcctgtagtcccagctacttgggagaccgaggcaggagaatcgcttgaacctgggaggcggagattgcagtgagctgggatcacgccactgcactccagcctgggcgacagagtgagactccatctcaaaaaaaaaaaaaaaaaaaaaa

SEQ ID NO: 61831 - DNA, 560 bp, Homo Sapiens
  misc_feature (397)..(397): n is a, c, g, or t
  misc_feature (492)..(492): n is a, c, g, or t
  misc_feature (507)..(507): n is a, c, g, or t
  misc_feature (524)..(524): n is a, c, g, or t
  misc_feature (526)..(526): n is a, c, g, or t
  misc_feature (535)..(535): n is a, c, g, or t
  misc_feature (558)..(558): n is a, c, g, or t
aagagacaggatctccctgtgttacccaggctggtctcgaactcctggactcaagcaatcctcccgcctcagcctcatgagtaactgggactacaggtgtgaactaccatgcccagcaatgccgcaacttttaaagaaattcagtcacctgagggccactgaatttcctgggcctccatggacaggtgctgaagtgtccacatataccagcatcagcagaactctaacttttacacagtaggtgctcaataaagagagggcaagaccaccaactgggaaggacctccttcttagtaatgataattttcctttgcaggtgaaacagctcaacatgcaagtgactggcactcaccacaacttcttgacgatcttctcttcctcatgaagatatttttgnctctcttgctccactaggacgcgctgtcgctgcacgggatcccccagtctcttcattggttccatcactttgccactgatttcagctcgggcttnttcatcattggcctnagcaacttctggtttgnanctgggaacnccaaaaatcaaccttagggggtntg

SEQ ID NO: 61832 - DNA, 2407 bp, Homo Sapiens
tctgaaaatgtggtgagtttagtgactagcagaactgataattgaaaacctgctttgcattctatttgtcaaaaataaaaaccaacctctaaagtacattcctcacatttgtgaacagttatgtttctaattatatgatgttcaagttctgtagtctcatagacctggattcaaatcttggccctgctctggatagtactctgaccttgggcaaattagagtttctttgagtaccctcaaagatcatactgcaaacatagtagtactgtaggtactaaacacagaatgatgtttgtgaggtacttagcccagtaccaggccttatgtaaacacttaaccgattgaatggtgtcatatgaataaggtcatgacaaggtttttctttttatttaaaggtgaatcaggtctaggaaaatcgactctcataaacagcctattcctaactgatctgtacccagaaagagtcatacctggagcagcaggtaaaaacattcttatgttactgtaagtgtaattctacatgaaagatgctgaagactgcctaattaatattttatgtcttagctgtgtgttttgtttgttcttgttcagctttgaacacaaggaaaacacttttatggggtaggtgtgctgcaccgaggtccttggatttgggttgtagactttctttgacacgtatccatggatccatcctctcttgagtttgtctgtaaaatgtaataagtagtttctgcctatattaaatatttgatggaaggattaagtgagaatgttttacatcaaaaatgctgtgtaactagaagattactaggatagatgttcgaattcatctactgtcagaaagttccagcacaggacaccagcatccacaaatgactgttgaatgaaataggcacacatagtgagagcctaagacttgggctgctgcaagaatatgtagccctttcagaatatttttgaattcagtttttaaatgaattcgtaaattgctttctttttcccaggaacagaaattataatttttaacatttgtgtttttaaccttccccagtagcacaataatcttagctttaaccttcccctttctgacttctctgggatctttttttcttaatcaccatggtatctttggagaacctacctctgtagagaggcagtagactctgaagtcacctgtcgtaagaacgtgagctttcctcttcacatgctgcttatattccctattaagtttgtttcttttctagaaaaaattgaaagaactgtccagattgaggcttcaactgttgaaattgaagagcgaggggtcaagctacgcctgacagtggtagatacccctggctatggtgacgctatcaactgcagagattggtatgctcccccatgcccagggatctgcatttgtttacttaatatacttcataaatttatagatagtgttaatgagtgattattaagtttgggattgctgtatataataaaacacctagacaatttaaagcgtgttaaatgttgactttttaaataaggaattttatagagagtaatttttttctggtactctactgtaatttgagatcgcaaagccagtcatccatagactgctagtataaatgaaacacctggatttgagccgtggttggtgaccgagatactgtagtacatcctttctatgtggaaggaagtgaaacctgttagagagtgggttgagtcgtagtgtctgtaaatgactgctcattggcatcattttcacaaataaggaaatgaagaagtagaagatagagcagtctgtcacctgtactgtgcaaagaatgccacttttgttgtacaaactccctcctggttctattcctgtcaacataaagcatcaggtttccaccactagatgaaaaggggaaggttctgttatctttctcctacatttaggaatttctcctttcttacatgtgaaagtgctgtactgtttcccagctcagttaaatgctgtttcccagctcagataaacctgttcttgacccatgttctctaccaccctgttcctctgccccttttcacagtcacgttcctgaaaagaattggcagccctggctgggtgctgggattacaggcgtgggccaccgcgcccggctgtgcgtctgcacattgcaaattcacttatttgttcttgattttcccagaattgttttattctgtaagggacagggtctcactctgtcacctaggctgaagtgcagtggcatgatcatagcctgctgtaatctctaactcctgggctcaagcaatccttctgccccagccactcaggaggctgaagcaaaagaatcgcttcaacccaggaggcagaggttgtttgcagtccagcctgggtgacagagcaagactccgtctcaagaaaaaaaaaaaaaaaaaa

SEQ ID NO: 61833 - DNA, 1522 bp, Homo Sapiens
aaaagtttgatgctcattatgtttacaaaagcactgcattttttgaaaagtgtctcactgtgctattagctcatttcttgagatgtggttcttaggaaagagaagccttagtaacttagtttagagatggcttgggcactcgggagattttttcaatttcctgtggctatggagtgcaggagaatgatgccattaactaccagacccttgaggtcagcacagctctggcatcttcctgcaggcagaaccgtatactcctgaggatttgaatgctgtcctactgctgactcaaaggctaatcaatgcatgtgttaaactgcatggacatttagcagacatggtgatctgtatatagccatgccttatagtccacagtggagcatacatttcctgagagcgtaaatcagcattcgcctcctcctcctcctcttccttctcttctccctctctcctttctcgtcttcagtagttattgagcattcacctcagtgtcaggcaccatgagtactttcatgcatcatctcatttgatccctgcaacttcactagaatgtcagttccactgatgacagtgtattcagaattaattttctttaaggaaaaaaaaaggaatttcttgaggggctttctactgtccagtactcagtgaatatctgttgaattaatatactccaatcccatgagttagatatgattagtgatgagggacctgggattgagacattagtctaatgacactacattctagaccctgttgctaagcacttcttgtattgcatatcaactcatttactcctcacagcaatgtgagatacatactgtcctccctgttttataattgagggaactgaagcatagacaggttacatagctggtgactggcagatgaagtgacttatccgtggtcctgcaggtgatgagtggcagtactgtgctcttatcaccagctcttgagcgtgctgcatcctctcatttgtcgttggtctcccctagtgttcggtactgtgccttgcacgtgtttatactcagtagcttttgaatgaaagacagacttacattgcaaatacaacagatttccgtgtcttattagaaactgcttttcttgaattactacatgtaacttttaaatgaaagattggtgaatatttccagatgttgaaatacaaaaacaggtggctgaacttagaaaccaccaagtggcaggtgactttgcctgacatccgtgttcacagacctccacagcccctggtgaaaaccacttcttcatatcccatgtccgtctaattacatgtgttattttttgtcatttgcagagtcaatggttgcaggaaagtttgaagaaagtgaattacatcaaaatcttggtatagtatataatttcatctgttttcaaaatataactttttttgaacttcagcaacttagaatgattttagaactttagaatgattttctccacatttcagtggaattgtggcagctccagtaaaaaacaaaaaaaaaaaaaaaaaaaaaaaaaaaaa

SEQ ID NO: 61834 - DNA, 547 bp, Homo Sapiens
  misc_feature (481)..(481): n is a, c, g, or t
  misc_feature (490)..(490): n is a, c, g, or t
  misc_feature (519)..(519): n is a, c, g, or t
  misc_feature (521)..(521): n is a, c, g, or t
  misc_feature (527)..(527): n is a, c, g, or t
  misc_feature (539)..(539): n is a, c, g, or t
  misc_feature (544)..(544): n is a, c, g, or t
aatttcatctgtttctctttatattttttatattggatacaaacaaattaacaattacagactatcgccaacttataatgcttaaactttatgatcaatagtaataaattacacgagatattcacactttattataaaatagggtttgtgtaagatgatttttcccaactgtaggttaacatcagtgttctgagcacatttaaggtaggcttggctaagctatgatattcagtagggtatgtgtatttcatgcattttttacttacaatattttcaacttatggtggatttattgggacataaacccatcctaagtcaaggagcatctgtatacatgaagctaacattctattcctatcagacagtgctgctctaaagtatgtcactgcaaaacttaagccttcaagtaaaatgatcagatttgcattctagaaagattatatgccctggtgagactgggttaaagattgaaagccgatgnaagctattncagttgctggggcaaacaatggttagggncnggtttnaaacatgtgccntaaanggt

SEQ ID NO: 61835 - DNA, 3291 bp, Homo Sapiens
ttttaatagagacggggtttcatcatgttggccaggatggtcttgatctcttgaccttgtgatccgcccgcctcggcctcccaaagtgctgggattacaggcgtgagccaccgcgcctggccgatgtggttcatatttcaggggtcccggaagagttgtttgaggtttctatttggccaagtcaggccctggtggagtttggacagtccctagtggtcaactgcagcactacttgcccagacccaggacccagtggaattgagaccttcttaaagaaaactcaggtgggcaaagggcctcagtggaaagagtttcttctggaggatgtcacagagaattccatcctgcagtgcttcttctcttgtgcagggattcaaaaggacacaagccttggcatcactgtgtatcagccaccagagcaagtgatcctggagctgcagcctgcctgggtggccgtggacgaagccttcacagtgaagtgtcatgtacccagtgtagcacccttggagagtctcacccttgcccttctccagggtaaccaagaactgcatagaaagaactttacgagcttggctgtggcctcccaaagagctgaagtcatcatcagtgtcagagcccaaaaggagaatgacagatgcaattcttcctgccatgcagaactggacttgagtttgcaaggtgggaggctctttcaaggcagctcacccatcagaatagtccggatctttgaattctctcagagtccccacatctgggtctcttcccttttggaggctgggatggcggagactgtgagctgcgaggtggctagggtgtttccagccaaagaagttatgttccacatgttcctggaagaccaagagctgagctccttcctttcctgggagggggacacagcatgggccaatgctaccattcggaccatggaggctggtgatcaggaactgtcttgctttgcatctctgggtgcaatggaacagaagacaagaaagctagtgcatagctacaataagtggcctggctcttcctttttcatacgggttctctgctgctgaaaacacagagtaacgggttggtgattcggctgtagacatccctgctgccctttgctgggtatgctctcaagtgaacatgagtcttcatctttctctggcttccctccaccaatcctggagctaaaagaatcatacccattggcagggactgacattaatgtgacctgctcagggcatgtattaacatcacccagccctactcttcggcttcagggagccccagacctccctgctggggagcctgcctggcttctacttactgccagggaggaagatgatggctgaaatttctcctgcgaggcctctttggtggtgcagggtcagcggttgatgaaaaccactgtgatccagctccatatcctatgcaagccacagttagaggaatccagttgccctggcaaacagacctggctggaagggatggaacacacgctcgcctgcgtcccaaagggaaacccagctccagccttggtgtgtacctggaatggggtggtctttgaccttgaagtgccacagaaggcaacctagaaccacactggaacctaccgctacacagccactaaccagctgggctctgtcagcaaagacattgctgtcattgttcaaggactggatgaaggaatcagctctaccctctttgtcattattaccgttgcccttggagtgggtgtcatcaccatagcactgtatttgagctatcggccctgcaaagtggacaggaggaaattgctctataggcagaaagaggaggacaaagaggaggaaagccagtttgctgttcaggaagagaaaagtacaactcatataattgacagctatttgattgaatgagacttctgctactgtggtttcccagggagggaagaagggatagaggagaaaggaagaaacacaatggcaggctgcattcccctttgtgtacgtctgtcctgtaaaacggtgtttcaggcccccatgccccatgtcctgtgtgtccaatatgtccacaagctcacctttctctctctgtctctttttttttttttgagatggagtctcgctgttgtcgcctaggctggagtgcaatgatgcgatctcggctcactgcaacttcagcttcccgggttcaggtgattctcctgcctcagcctccctggcagctgggattacaggtgcacaccacaactcctgtctaatttttgtatttttcgtagagatggggtttcaccatgttgaccaggctggtctcaaactcctgacctcaagtgatccgcccaccttggcctcccaaaatgctgggattacaggtgtgagccactgcacccagccacctttctctttagagctcactctagtcattaagaatctcagtctcaatgtttgatttgtaagaaggcctcttgctccttgccaggtgcttcatcagtccactcttagatacaaaaaaaagatcctgctgtttctttatggtttccactgcccttttctcttaaacatcatactaaagtcaggcacatcttagaaatgcaactcatatttcatggttttctgattactaactgggaactaaatttgtagtccagggacaggactttgaagggagtaagtatcaaatatggggctaggaatcagagctctgttcccatctccactttcccttgctcccctgacctgggcttctggagtgccagctcccagagctgagcttgttgacatcattaaggatcagtggcaagcttcaactcagtaaccatctgttgtgggtcttgggggagtatacagatggtaagaaattccactttgggccagacaagcatcctatctagcccagtgttctgtctctgaagtagaaggtagagttcttccatgaaattggcctcataggttaagagctccaaacatctctgaattccttttcatagagtgatcaactgtgagttcgcatttgtcagttttttttttttacccatgtgggtgtctaggttagagttgcaatgtttactctcccttttcatcaataaggacatattttcttctgtctgtaagcaatttccttgaagcttcaagaagaatcctcttgtgaaaatgttcatatgattttatgattctgcttccttccctgtccttgggaaagagtatattcaccctcagagaaggcgtgaggaatcaccaaaccagatcttttctcccaaatcagtcaagaaatgttcactggaatgttgctatggtaaaaataaaagtggttttatgatgtcca

SEQ ID NO: 61836 - DNA, 3046 bp, Homo Sapiens
tttttttttttttttttcaaatatccagttttaccttctgtggtctgtgaacatggcgtctataattttcttttaatatttgtttacatttccttgtgttttaatatttgatcaatttttgtgactgtttcttgtatactgaatgtttatctctacatatcaattacattaagctcattaactgctcatgttacataaatatatgtatttatttttttctactttgttctgtcaacttctgaaagatgtgtgctaaaatctcccactatgatcttggtttttatcacattaaaaaaattattagatttcttctctttatgtcaaagctatattgctaagtgaattcatatctataaaacaatttaccaagatgataatgaaatatctcttcgtttcttttaattgaatgagtttttgctttgaattctcttgctatgcctactactttttatttgcctgattaatctttttctcaaccttctagtctatgttttatgtgctccttgtaaacagcaaacatttttcaaactgatttgagaggctaccctttaataagtgaatgcaaccattctacattgtatttctatttctcatgttttcttatagcttctgtattttcttttccagctatatgctgcctttactgaattttctatgttccatttttctttctccctaatggttttgaacgaaaatattgtttcttttcgtctagtaattatgcttatcatgagtactgcatgtctaaaaaatgtcagttttataatttgggcaggtattgaactcttaagtacaaaattattttcccaaagaattttaaaatatactatcccactatctttttgcatccagcattagtaattataggattattgctggttgctactctttctgtctatcctcagtgtctctcaactcgccttttttttcttcctgtttgtcctttcttttgaattgctaacttcaaaaagctctaaagttttcttttttgatgaatgcagtgtcatcctgcatgtctctgaggacagtaattatatttattctaaaactcttgttttgctttctttattaactcttatcccttgggcattagttcttccatttatatagtttggtactctccttcatgatattagttttcttcaaatattttgtgattctgggttgtgaccctatcttttttggactttagagatatcctattagtctgtgatggctgtatgtgattacagtagcatgagtcgggggagaaagatgtgccaccgggtagttaaaatggatagttagtgttctaggggtttcctatctgttctggatattgacagcattgggagtactcccttggcttttaaatcacccaaatttcttgtttttgcatgtcaaacaccaagaaaaaactgtgaaggtagggagaggtagttctacatgtctccttgtccaggaggctagacataaagaatccccaaatagccattcataccttttgcagtattccagtcctacacatattttagattatagttcttatctgcattctaatgccatttatcaagggctctccatggtttttgggagttttgctgtttcctatcacagttgtatttaattggtactatatattctatagagagggagaggaggattatttttaggaatgtgtagtagcaaggagaggttgcagcatgttctcaatgtaccatcttgtactgaagtttcaaatagatatgttttggcagagataaatggacaatattgtacatacttttaagggaaaatgtgcttttttactatacattcccttctactaaaatatgatctcataatagtaagaaaggggtgtttatccagtagtttctaactctagatgcacattactcaaatatcaaagtgtaaccccagaaattctattttaattgaacaagggtaagaaacactggtacagtagcagaaaaactgcaggttagggatcagactaatttgagttcaatcaccacttactaaattatatgactttaggcaaaaacaacattttgagccttagtttcttcagctgtaaattgggtttacaaaattgtggtgaggactagagataatataagaagagagactagtatcatgcatggcaaacagcatatgcttattaaatgttagctcttctaatgctatgtataagtaagtagatgaaaaacatggcataaaggaagatcaagtgaaataggatgtcccttcatacgtcaaaatcttacaatgactaaaatttaattccagatgtcacaggagctgacaatcattaccagatttacaaactgagcaagattatgggatttacagagtattcctgtcacatattacatacctcctgggctcttttaacattcttctttcaatgcatctttcaaagaccactctctaggaaatcacacaactgctcaattccacatttccaaatttgagagagtaaaatctgtcaataataatggcaacctaattatatgtttctgtttgtattttttaaaatactatgacaaatagatgagcacttttaagttgcaggaaataagaataactagaaagctgtggatcccagaaattaaagaaactttagtgtcttccaggcaggaaattatccaaacctaattacaaccagctggagacagctccattttcaggaatgcttagatactagcaaaacacagtgatgcccatttgctgacaagtaaatgctcatatctttatcatctgtgtcattcagaaacattcatatgccacttggcaaaacaacttcttaataggtaatattcattgaattcttataaaagttttaattcatttccaaatacaactataatacttcactatttcaacattagagaaaaattattttctcttgtttctttacaaatgttttgtttggctgggtgtagtggctcacacctgtaatccaagccctgtgggaggccaaggtgggaggatcatttgagcccaggagttcaagacaagcctgggcaacacaggaagtccgtctctacaaaaaaaaaaaaaaaaa

SEQ ID NO: 61837 - DNA, 2582 bp, Homo Sapiens
aggagaagctgatgaagagctagttgatgatggagaagatcagaatgatccctctcgatgggatgaatcaggagaagtttgtatgtctctagatgattaactgacctactatactcctcaaggatgctgcatttggacctaatatgaatcgacaatttggattgttgaacttgaaggcttgcaaaatatggtacatgctggatagtagttatgttgctgtgaaaactgtagggtcaaagccttatagcaaaaaaaatttttttttatatttgcacaggactatacagcaaacaaccatgtggttggattacatggagtccccacatactcagtcagttatcaaagtaaaatattttttatttataggatatacagtaactatttgggtcctatgaaaatagtccttaaagagcttacattcatgtgctactttaacatgaatggagaaaatccgtttatggaagtacagtgacaattgacccaatcactctgtccatcaaaccactcaggctagtttgtactagtagagttttgtttctatttttatttttattaattttattttttttaatacagattttcagtgaggggctttttcaatcccattggttctattttcttgtatttttccatttaatttgcttcataacttaaaccaagtctcttctagtcttaggtattatttctcgattttgtgctgatgggcatgtttataagaactggactttttgacatgaattttactacttcacaaatgaagaatgatgttatgaagttaccgtggcgaagttgacaaataccactaaaatgattatgatttagaagtaactttcttctgctgctctaatctgataaatggttactatatgatattttctgacatggtatttggttttgggtatctgttactttggcactattcttgtttgcctctttatttttgccagtgtactatacctcagtcctatttgaaagacctaattgaaagaaaaatcatagaaataagtaaaatgatttgttttataatttatccaccatgtccagtttggttagcttgttatgcaatataagtgaaatatcaggtttttacccgtgtcccttttatcatgaaaattaacacaaaatgtgcattctcttttgtttcatacttagcgggatattgattgttttgaaattatgatcaatacttaattcatttttttctgtccttgaagtcactacaccttgatacagtctttctagtagtcaccatgattcaacagtctcaaaaatcttacaaataaaattctgagaagctttattattctataaattcttcagggtacaaagggtgacatattgaggtgaaattgtcagatttacttagcctggtgacatgaattagctgattgtggaactctcagcagcatttcacgtattgttaacatgtatggcatttattagcatattgtatattatataagattgagggatgtcatattttcagctttcttttaaataaaaattgagtatattttcctattttatatcaggtaactaaattatgctagttatgtggaaaaaattgcaaagatgctttgacagatataatccctttggtgctccatctgatcaaagttgaaaagttgatgttttttaagagacaagctttatcattgtctctgatttcagtagaataatggtttattgttagacaatgatgtttctgcttggataaatcaaagataaattacagttacatggttagatgcatcttttgtcatctatattgtagtttctacataactgtaaacctgacagataagaatagtttcggtttgatttttgtttaaaacagatgagtacttcttaatgttctagacaaatgagtaaaatgtatttctggtagaaattagttgggcaaagatactatgaatgaaaaagtattttaaacgtaaaatgttctttgtgaatatgtaagtatagtataaagatttctttcatcccatttatccccttcctttaaataaactagtttacaattggtagatctgtctatatataaatatatattaaagaacaaagatatatatctaaaaatcacctaaatctgctttattagactacagttcacttattgcatagaaactggacttggctttacattcttaatgtacttttacttttcctcaagatatgaacttactctcttgaagctgaattttcttttactacttaaatcatttatgtatatctggtaaattatgaccaaatttttgttagattgcatacagtaaattgaaatacacacttggtacactacgggattgttgtgcttttgtttggttttagttggaaataaggtttgatgtagatggcttgttactgttaatttaaaatattctataattgtccattactttatgttgtgttgtgacagatttggctatatttttagtcaattgaaatatgatactttaaaagtttgtttttaggtaatccaaaggaaaagtgtttatactcttgaatatattagcctcagcctatataaaaatttctttgaagtaaacattttaccggaaacagaattgacagatttttct

SEQ ID NO: 61838 - DNA, 1850 bp, Homo Sapiens
aaaataatttctaggttaagttggaaacatgtgataacattaaaaaatttaaaatgtctttgggcctgaaagattatgcctttacattcaacatgaaatccatggatggagtttatataaataaccatgtaggcttaccaatccttaaccctcttgtattagtccatactcacatggatatttccatatccacttttactcttgtgtcaaaagacaaaattaaaactcatttagttatgtatctaattggcttttattctcgattcatgaatcggtgcagcctccattctaatagaatcacagcttctactgggcaatggcagactattgggttttgtgaggtgggaatgaggaaacataacaatggggaaaataagctgattagttaacaatagattacttcagtttactttttttttataagggttaaagcagaggggactttcttgttctgactcaggtaggctagaatctcctgtttttaggaaaaactcgtctgttttgggatctatctgctttcttacagttgcagtttgattatatgacatttggcatgagtgactccactttgttaacacttgaaaggttattattcccatatggagtattcacatggatgtagccattgtcagttatacaagatcgtgtttcttttctttgcccccctgcccccgtcacctaagaacttgttagatattccatttctttttttaaaaaaagatacagtgagtaaaggtgatagagagcatatggataaatagtgaagaagcttgatgaggggagtggttaggttagaaacacaagggaatttactcaggttaaaacactgtcattttatattcaagccaatatatatttgttttgttagcgttgacgtaatttttttctgggaaggctttcctgacctctggtttgagtaagcagctcctcctatgtgttttagtcagcactcttggcttaatccatagtaacttttgcttgtttgcattgtagttggttatatctgtctcctatagcttgtgggctcactttgacggggagaggccttgttctattcatcattaatcctcagggtctagcacctagtaaatactcagtaaatatttattaaatgtaattgctttatctgatttcttattgatattttttggagcagcagtgttgcgggaggtcatgttaatttaatcaaagtaaaaagaatttgggggttagtactggaaggtggttgggaagtgtatgtatatatatttccaaactctttagattttcaaactttgttctcctgaggactttgccacttccagaactgtttcaggagctgctgtgggagaaggaggtcagtgcacgtccactgatgtggtttgaatgtgttctccaaagtttgtgtgttagaaacttaatccctggtgcaatagtgtcgggagttggggcctattaggtgattcggtcatgacgggtctgcccctgtgaatggattactgtctttatttgggagtgggttagttataaaggagtgtgcaccgtctcttgctcttctgccctctgacctgggatgatgtaaaatgaagtcccttatcagatgcagacctcatggtcttgtacttctcagccagaactataagaaatacgtttattttcttcataaattaccgagtctcagatattctgttatagcagcataaaataaattaagacatctactttgcccatttatactggaggctttagccagaattctgtttataaagtttgcaggccaggcacggtggctcacgcctataatctcagcacattgggaggctgaggcaggaggatcacttgaacccaggggtttgagaccctgtctctac

SEQ ID NO: 61839 - DNA, 2750 bp, Homo Sapiens
atttattttgatgtcggcggggtgtgcagatgaccctttcctcacgccgtctccgatattggtgttcaccaaaacatctttatccagtagtgcaaaatgtcatgctaaccttgtcttagtttcacgtctttaattctgaaacttgaaacaaaaacaatgcatcagtgggccatggagacttcttcttctgtgtatgggatactgtgtcttttattcttctattctggtatgtcctccctgatttctagtcatttttgaattatttatagacagtaaacattgcccaatatattatgaaaatgtgtttccactttattgttgcctctgaaaacattttgaacagaagcttttataagcaaggcttgaatttttcttttttatgttgtcttaggtttgtgtgagtttccacctttgtgtaacacatttttccttttaacagaaccattttatcactgtctctcttccttcttgggaaaaagaaaaccatctttttcttttcatttgcattacttacaactatgaattgatttatagagtgctaaaatatttgtaaaatcgagcagattcttctgtgtgcctttttctcctggtgatttatttaaatggatttctaaggtgttttcccgtcagtattgatttgttttggtgagtacgattttatgtgcgctatttgtctctctgtttctgaactatagcaacatttttgtgcattctctcttactctccactgaatgatgaacccttgtgaacttccaattgttttctcttcatttcttaatgtttctgagaagaccgacatattatttgtaagtgattttaaaatttgtctccttttctatgttttttcgttgtcttcagagtgtcttcagagtgcattcgtatttttgttgaattggctttgctagagaacacatgatggctttaagtatgagtgaagagagtagacattttttattcctgatttcaaggtaaaaacctaaagaggttcacctgtaaataaaataaattgtctttacaaaaccagatactcattccaagaagatctctctattctagtatacttttttttctaaacatacaatagtataggttctcatactgtgagacttcttatttctttatacacaatatatttgaaaagtcattggttttttagtgattactaatgtactgttacatggttttgaaaagtgttggattcaaagtttccttcatttaagcctcttttttctcccttccccatataaaaagttgatgatggccaggaatagaggttcacacatataatcccagcactttgggaggctgagatgggagcatcttttgagcccaggagttcaagaccagcctgggcaacatagcaaaaccccctctctacaatgaaatgaaaaattagccaggcttgttggcacatacctgctgtcccacctgcttgggaggctgaggcaggaggattgcttgaggccaggaggcggagcctgcagtgagccgtggtcacaccactgcactccagcctgggtgacagaggaagaccctgtctcaaaacaaaacaaaaatggttcctcgactttagttaggatttgaaaagcttagaactggaaggcagcctctgaaattatcaagaatgtcacagcagtttgtggaacacacctgggtgggtagacccactttttagacactctctagcccaaatctgatcacagtcattcttcctcacctcttagggtctccctcacagaaggtgttgggggccttggacgagatgttgatgggatgggaataaacaggagcaaataatgtgcaggcgaagttggagttcctgctcagtctgggaggagaattgatttatgaatttctttctttctctctttgtatctatctcttctttctctctctctctctctctccccccagccaccttctgatctctaatccattcatgtgagagaagagtgatgtgaaaatggtcagcaatttgctttttctgatgagatcctggtgagagtcatgttcaataaagtatttagtcacgtggggctccagtgatttctctgtttacaagctcattccttcctcattttctcagaactttggtgttaacagcctgtttcctatttgtaggggctgactttgacttagcagatgcctttcgtgatggaggaaataacgacccagcacctcttaattcacccaagctgaagccaaatgcgaaccctgagcagcctggattcattggggatgactttgacttagcagatgccttacatgacaaaggaaactacgagccagcaccactgaacccacccaaaccaaagccaaatccaaaccccaagcagcctgattccaccggggatgactttgatttcacagatgtttcttcatggtgaacgaaacagggagttgcctcgattctgatgtgtttgcttcggtgctctgtgtattgtattcatcccactcttcaattcataaactctggagattcttcaattcactgggcaaaccatatgcctaagtctatcctctgatggaggctcgtacatgcaaaatccaatagcaacctgggaagatttcagtcaagacccaagaggaggctggcatcaggctctcggtcaccgatcttcacattcaggtttcctgatgcactttgcgactctttgggcaacctctggactccttgttcccagggtccacatttagttttatctttactgcattgcttttatgaaaaagaataaaattggatgaaacag

SEQ ID NO: 61840 - DNA, 611 bp, Homo Sapiens
  misc_feature (511)..(511): n is a, c, g, or t
cttaaatatgtgactgggatactaacagaaaatgcagtttaatgtaattaaatagaaaagcattacagagtgggcacaatgaattgaataaggactttgtattctatttagcagtcatgcacattggtgaccaagaaaggatttacaattcattgtcaaaaaatccttttaaacggtcagtcttttaaggatggctgcagcagaacaaggcaaactgaatactggaatgagatgggaaaatcaacaccacctaaagactagttttgtgttttctcttgggagtcctctagaacagaattcagggtctactttcatattttctgctatagtgctctatcaagagcaggctggggtggagaacatcaccagaccatgcccacagccagggaagagctgctccctaccaattaccagggttgggccagggcaatttctggggcagagggaggattgccatatggaaaggaatataggacacatggatgactcaaactgtgatctgtcatgaganaggcatagacgtggctactacttatgagaaaaaaatgaggattactaagtgaaaaatgtctactctgtttactgcacagtgcacgcgatgacaccatgtg

SEQ ID NO: 61841 - DNA, 2832 bp, Homo Sapiens
tttttgtctgcctttcttttctcctagctctgcaatactgctcggaagccccaccggccctttcagtgctaccttcttcctcctagtgcctccccactccccactcccagtcctggtaacacttaatggtcagggaggatttcatcactgacctgagtaataaggctatgactgctctgtgccagagaaacatgggtaggggagaagacattaggaagtttaccttcttggtaaaggacctaggcttcccaaggtcccagccctcagcttatgcatgactatcagcacctttactttcttctggctcaccacaaggaaaggtaatctattcctggactaaatcagtgccttgggacagctatagtgctggtgtagggatcagagcacaaggcaaggttttcctgggaggataagtataaccatgtttttcacagtgatcgggcttatagatactattgtctctgacttctagatcatcatccttcttctctggagtagcacaataggcatgtctctctttggacatatacaatgttcaagaataggggtggtgatgggggcttctctgttgatctgtgtgtttgtgtgtattgtcaaataactgttatctagcatttgctatatggtgtggagcactaagtgtgagatctatgtcacacacatacatatataattatatatgtaaaatttcaattctcacaatctgtgaagtactgaggtagatagtaatattgtctgtatcttttaggtgaagaaactgagtctttttccaaagtcacacagctagtaagtgatgggaactaggattcaacacaggaagactggctacagagtctgtgcttgtaagcactatgctatattgctgtgtgtgtgtgtgtgtgtatttcactgatctagttgctgaagcccttatcactgctccaagaagtaatttacttcattttaatttaaagcaaagatgaaaacaacttatcctactgtccaaaacattcttccccttgcataggagaggggtgcttcctgaaaggagtgagaccaagagagttgctctgagccaaaagctgccttgcagtttagctgaggcaggatttagaaatggcgtgaacagtgcctgcattagccgatggcatggagtgctgagtgccagcagaggagataaaatcagacatatgtttggatataaatgttcctctctctcttctaattttaagcccctgctgctttgttgcagtgaaatgatggagccttaattataggccctggccccctgaggtagaagcctgggttgagtaaggcccacttagccctctcccagactctacccattaccacggaaggaagccagagaccatggactctgaccctcttctcagacaacaataggaattgtcttgcagggactctctgctggttgttccacggcactcagcaagttgctggcctcaatacatgttaaatagccatgataaagctaatgtctctaggccttagaaactagcctatctacctttacctccattgacgataggatgcagctgaagggtgtcaaaaagtcctggagcacattgtagaagtggcagctacagcatggcacttaaagagttagagctggggtagatatagtggagaagaggagcaaaagaccctcccagtattctcattgttgagccgggtaagcaaaaaccactccattatggggaacctctgtggtccagtaggtgttttaagacctcctccacactgcagagtttccaaggctgggaggaggccaagccaccttttctaactataaaacaccaagtcttacctacttcactccttccccttagctgtcaccctctgtgggatcctgcagtttctgtctgccattgggcctaagaatcaggaaatggttatgtagagtcctgatagtctaaccccttagcacatgtggagcccctgtagtcaggccttagagggcagtatagccagttctaaagagagtgaacagctctaagggataagagaacacagacgtatcttaggaaggtctcattttaactgttttgctagttaagtatgttcttgatagccaatagcagcctgggtgagaaagcacattgactcaggagtcaaaagacctgggcttttagtcccacctcctccactagcagtgtgaccttggatatgtcttttaatttctctggggctcagtttctttgactgtaaaatgtgaagggattagactaaatgatttttcacggccttcagttctgtaatgaaaattctctaactccgtatcatcagcaagagtctttacatccaacgtgttgctataactaccccctaaagagctaccaacccgtgttccattcctaggtaacaaaccttggcctggccaaggatgagtcacagcattcacggctgcatttttggtactcacgggatgcctctctgaaaagctgtcccaagtgcctgctacagaggaggatataccatgatagcaaaggaaggttactgctgtaaaagtggaaactgcatggatcaaagggcaggcctactggggtaaggaactctccctgcagctctgaggatacttaaatctaggatcctagtcttagtctcccccaactcctttgaggttcctttcaaaagtccttctcccacagattgaagctgaatatagtcttccttgggacaaatgcatttgtccataggactctttcccgagattgttttaggcccatttctgtacctctcccctcagactgttagccacagacccttagtcattgcaaagttactgcataattccctgtctgctcaaatagctgtcaaaaaaaaaaaaaaaaa

SEQ ID NO: 61842 - DNA, 566 bp, Homo Sapiens
  misc_feature (428)..(428): n is a, c, g, or t
  misc_feature (455)..(455): n is a, c, g, or t
  misc_feature (549)..(549): n is a, c, g, or t
  misc_feature (564)..(564): n is a, c, g, or t
gagatgcatattttcctttattgctgaattaatgaggcaccaataatctcaaaaacacaagtcagactttattctgaaaataccataaagagacaaaaagagttagtcaagtattcttgcctgctggagacacagaatttcaatagcaccttttttaaaaaaagacatgaacatttataaaattgcagaacatatcttacatattcacatataaaatcatgaaccaataataatccggatggaaaaactgatctgtttcatcaacatcaataaacattttgttgagagtttgttccacatattatacttccctcagtatattagaagtacttcagctttctatttgaagtggttttcctaaaaataaccttttcccctgctcaggataaccagctattattatagtatacatattataataacaaggnatatgtctttgacctcatatatgactncccagttgctcaggaatagattactttcatacacaaatgggaaaagatgtcaatattgatgatagtatcgaaaaagtggagctactttaactgngtaaattaacgatgnca

SEQ ID NO: 61843 - DNA, 556 bp, Homo Sapiens
  misc_feature (503)..(503): n is a, c, g, or t
agatggagtctcactctgtcacccaggctggagtgcaatggcacgatcttggctcactgtaacctccacctaccaggttcaagcaattctcctgcctcgcctcctgagtagctgggactacacgcgtgtgccaccaagcccagctaatttttgtatttttagtagagatggggtttcaccatattggtcaggcttgtctcgaactcctgaccttgtgatccgcctgccttgacctcccaaagtgctgggattacaggtgtgagccaccgcgcccggcccattcttcctaaagataagaaacgcctgtagcacaaaagcaaaggcctctttttatttggaaatattggggccaaataaacataataaaatactccatgactcagaaatatccttctttatgctgtggcaaatgcaaatgtcttgttcacatggccagccaccagccatgttggatgcccctttatgcatttcacctctaacgcacgtacacgctatactgactnttccagtagatgacgggccactattcatgccaacgtcttaaggcctggcatgt

SEQ ID NO: 61844 - DNA, 160241 bp, Homo Sapiens
gatcatttcacaatgtatacatagatgacaacatcacattgtacacagtcaatagatacaaatatttttgccatgggcgtctcactctgttgcccaggctggagtgcagtggcgaagtcatagctcactgtagcctcaaactcctgggctcaaacaatcctcccatctcagcctcccaagtagctggcactataggcgtatgccagcatgcctggatgattttttttagtttttgtagagatggggtctcactgtgttgcccagactggtctcaaactcctggcctcaagggatcttcctgcctcagtctcccaaaatactgtgattacaggaatgagccacggtacctggccaatagatacaatttttatttgtcaattatccctcaataaagctgggggaaaaggttaaaaatatatacatttaaatttaaaacttccatgatttcttatagtaatgttacggtttttggttttaggttttaatcttcttaccatgtggaatttttttggggtaagatctctatgagttagggtactaactccaggaactaagtcaaattgtcttatcccttaagaaaaggaatatttatttcactcaagacacactgaaagtccaagaataatagctgcaggcgcagcttgacccaggagcacaaacaatgtcatggggtgccccgcttcaccggtgctggctttattcttaggcaggtcttctctaaaaggtaggaaaacggcactgacggccacggatgcatttcctgctcagtgagcccaggcaaagctggtgtctagcaaaggtttggggctggccctcatcagacaaatgtgactgatgcaaatgtttggctgacctgtccaatgagggcctacccaggccttttgggatgtgttgattggccaggtctgggccacatgccagtgggatggagggtgcacggctccccaggggaaggaggcgggtgggacaggggccctgaggacccagcttcctgtggtccaggccgtcagctgtccagcgccatgcctgggtggccagtcttctccccgatgatctggatgctgtctccatcacagatggagcttctgtctgatctggcactgtcgatgccaaattctcctcattaaggtcactctcagtgacactcaggtacatcccagtggctggcaaggctgacgctcccttgtcctagcgacctgcctttcaagagcctttctggccattctgagactatttcccacttgaactgtagagtccatgtgtctatgcacaacagctctcgtgttttatagggactggatgcacagacgtgatctcaacgggtccttctgtccaggaaggggcctgtccttcccctcgctcagtcctcccctcacctcccctcacccccagcagcatcgcaggctttcctccgagtccccgcgctgccgatggacgtgctccctttgcttgttgtggaggtggggggcagctccttacccagagcgggagagattacaggaaaggacggcgcaagccaaagcccctgcttccagctgtgcgtctgggaagagaaggccggccccaggagtcggggtgcattcccctcaccccccaatcctactcggcttcagtctccagggtgggcaggtgggggaggcgggggagggccagacttcctctgcaaggccccgcctctgtccccacacgtggccctgcggcagactctgttccctccctctggaaacggcaggatcctccaacgggggcagccagggggccggggccagaccctacaacccaccagcccccagaggtagctatttttgcagccagccgtgttggtgaggttggtattttaaatgttttgacatttaaaatctgtgttggatacattggtgctgtttaaactatccccgggctgcggtgactcacagggaatgggtttatctcctgaggctgggcctggcctcccctgtccccgctcccagcagccggagtgggaagagggagtttttacctgcccccagtctcaccagcaccttgttgtcctgcagaaggtggacttcggccagagcaggagaacaggagggacgcgggacggcctcagatccggacgcccaagcaggggagggcagaacagacccgccacccagccagggtcagcagcggtggtggtggctctcaggagcccacacaggtggcacgagcaaggggcgctgggctggcaggtgcaggatgctgcctcccgggggtttgagtgccccctctccatgcatgtcctctgatctgttagcagaactctgctcaaatggaatgtgagggtaaactcaggccgcctccttcctgaaggcctctgagtgcttctgagtggagccgggagcttcgatgggagcaggaaggacctccagaggtgcctcagccggtgcccagagggggccagggagaaaacctgccgacattcccacgaccccagcacctctcagtggctgccctgtcccatggccaccgccgccttcattagcgagacacggcgaggattgtcctcaccgggaccatcctgacttggactgttgaggccatgtggctctgccctcccttgtggcaggaggttgggagggaggtggcccctgcagcccagcccagggaatcccacggcagatacccctggactttctaccgcaatcacagccaccagccacagagctagtacaggccgcttctccaagacacccaaaagcttcttggaatcagaaattcagcatgaggatcccgggcagcttggcagagagggggcagcctccgtccccggcacaggatcgaacccgcaagtgtggcagccaaagacgccaagatctggcttgcagagaagagcatcttacaaagaaccgaaggccaaggaagattttaaagccattgatggctgttattccactgccccagggaggggtgccggtttctccattggaagccgggccatggccgtcctggctggttctgctgctgccagtccgcagacatgtccccttcctgttctgagcagcagctctggttgaggaggaggctaggccactgcccatctggggaagtcacagccaccctgccagtgcctacagagtcacgtctcagccaggagtcgcagaaggagcgggactcagctcaggccaggctcaaatccaggcacagccccccttgcgctggagtctttgggcaggacctctaccctgtccaggactcggatcaggtgcagggtagctatgatgacccagccttgtgggttgatgtggaagctagaggtggggagtgggggctccaggtgctgataacaggggccctatacctttcaatgctctgagaggtagctggggtgggagggaggaaggggcctctattagtgtgagctgtcaggacctaggagaactgtctgcacacagctacaaggccagggcttgactctcccacaggacgggccttggggtggggcagccacgtgcttgtgggcctcagccatgcacacaacatgtccagacctgggaacctagagcctagggcctttgccacagctgggacaccccagtggttgtgttccttgctgtgtacaggcgggaccctcgggagggactcatgaaagtaggggagtctgcaaacttcttcccagtcagaggcagggtcgggggcaggctgagggccagcttacaacagcagccaggggtggccatgtcttccgggcagccgggatagggccggacctcctgaacttgtgttgactgagcacctcacactgagcaggcctgacaccccaatcagcacggcaggcatcccagctgagggtgcatgagtcccgctgctggctctgacagcctcgcccttcctctcctgcaggtcaacaccttcatgtccttcatattccccatggtggtcatctcggtcctgaacaccatcatcgccaacaagctgaccgtcatggtacgccaggcggccgagcagggccaagtgtgcacggtcgggggcgagcacagcacattcagcatggccatcgagcctggcagggtccaggccctgcggcacggcgtgcgcgtcctacgtacgtaacctctgggccctccaggggcgggaggcaggccagggctagcaaaggcagcgagcgctgaaccaccccaagcctgggcaaggtttaaagacatagggatggagctgtcaggccaagacccaagggtgccagctcccccgaggggtgagtgccattctgcactccatccctccctccatccttccatctatccttccctccctccatccatccatccttccctccctccctccatccatccttccttccctccatccatccatcccttcctccttctatccctccacccctccctcctcccttcatccctccctccatccatccatccttctctccctccttccctccattcactcctctacctctccctccatccatccctctctccctccttccctccattcattcctctacctctccctcccttccttcctccctccctccatccatccatccctctctcccttcctcccttcatccctccatccaccctccctccctccatccatcattccatccatcatccctccatccatccctccatccatccatccatcctccctccatccctccctccctccatccatcctccctccctccatccctccctccatccatcctccctccgtccatcactccctccctccatgcattctccctccctccgtccatccctccctccatccatcctccctccctccatcatccctccctccctccatccctcattccatccctccctccctccctccatccctgccttcatccatcctccctccctccatccatcctccctccctccatcatccctctctccctccatccctcattccatccctccctccctccctccctccagccatcctccctccctccagccatcatctctccctccctccctccatccctcccttcagccatcctccctccctccatccatccctccctccctccatccatcctccctccctccacccatcatccctccctccctccatccctcattccatccatccatccctccttccatccctccttccctcccttgttccattcctccctccctccatctatccatctctctgtccatctgtccacttgctcacgtgctcacttattcatttgctcagcagttggctgagtgcccaccctgggtctcgcctattcttgctcacaggcatggaggcagcagaggcaggggcatccctgcactctgggggaacaggggctccaccaaggacacaaacacaggcaccaggcaccttcagccagtgatgagcatgaagaaaaaaataccaccaccaccacccctgactacatctggcagctgggaggggctctcagagcaggtggcatcctgcaagtcccaaggaccaggagcccatctgggcaacagagctgcaggcgaggggatggctggagcaaaggccctgtggtgggaggtgcttggcaagaaggcggggcaggggcagggcagacgctgccaacaacacagggcttggagagtgtgatgggaactggagagaatgaagccctttcatgcctgagacccaggtcttcagtttggtttgcctgaagcatttggcttgagctcctccctggtgctggcccattttcagggcttgtttgagggtgtggccagtcacaggagaggcccatagccaagcacattaccctaagagagcctggctctgggctcagccttccctgctcatgggaaccagccagggctttggacacggagctctcagggctggcgaagcccacagcagggcaacgcccatcctatcggaaccctgaggaccagccccagctcaggacggctggcttgccaacatccaaggtgtgtcctggtcccagtgtgtgcctgttgttttaatagtagccatcctaatagatttgaggtggcatctcgttgtggttttgatttgcatttctccagtgatttaagattaatgattaataacatctttcatgtgcttgttgaccatttgtatcttctttggagaaatgtctgagtcctttgcccatttgtgaattggattgtttgttttcatgttgagttttaggagttatactctcaaggttaactcattatcagatgtgatttgcaaatattttctccttttttgtgagctgacttccactctcctgatggcatcctttgatacacagaaattcagtgtttatgttgttcaatttatctacttttttcttttgtggcctgtgcttttggtgtcatacccaagaaatcattgccaaaatcaatgttgtaaagtaattatgttttctcctaggagttttatggttttagttcttatgttcaggtctttaatccacttcaagtccatttttgtatatggtgtgaggggaggatccaccttcatacaagtggatgtcccgttttcctaacaccctttgttgaatagactgtcctttccccactgaatggtcttggtgaagatcacttgaccataaaggtaagggttcgtttctgagatttctagtctattcccttggtctacgtgtctatctttatgccagcaccacactgtaactttgtagtaagttttgaaatcaagaagtgtaagacctccaactttattttcttacaagattgttttggctgtccgggatcctttgagatttcatatgaattttagcacagatttttctatttctgccaaaagcattcttgaaatttgatacggattgcattgaatctgtagagtgctttgggtagtactgacaccttaacaatattaaatcttccaatccatgaacatgggatgtctccctgcatctccctcagaccacgtgtctccttctctgaggccatatctctgtgtctctaagcccatgtctctgagccagtgtctacctccctcagcccatgtctctccctctctgagcctgtgtcctgtctctgagcctgtgtcctgtctctgagcttatgctccctccccaagcccacgtctctccctctctgagcttgtgtctggtctctgagcccatgtctcccccactgagcccacgcctctgtgcctcaggtgcagtgggtctctgagcccacgcctctgtgcctcaggtgcagtgggtctctgagcccacgtctctgtgcctcaggtgcagtgggtctctgagcccatgtcctgtctctgagcccacgtctctgtgcctcaggtgcagtgggtctctgagcccatgtctctgtgcctcaggtgcagtgggtctctgagcccacgtctctgtgcctcaggtgcagtgggtctctgagcccacatctgtgtgcctcaggtgcagtgggtctctgagcccacgcctctgtgcctcaggtgcagtgggtctctgagcccacgtctctgtgcctcaggtgcagtggtcatcgcctttgtggtctgctggctgccctaccacgtgcggcgcctcatgttctgctacatctcggatgagcagtggactccgtgagtaccgggaaccaggaagttgggtgctggacaagtaagtgctcccaaaacagatggtgggtgtggcaggcactgctgaggggatccactcagggcaggggtgtggtgagtcccccggcgaccccctgggcagggttgtgctgtgactggggccgggagaaggccatggagggacaggttcaaggcaggggctattcaggccagactggtgcagagaaagaaagttggtcctaagagagatggcccaggcagtttcccgaaggtgaaagagagacatccctggctctgctggggacatggtgggggtgtcacctcctcatatggcagctgtcagagccccaaggccacccaggttggacccacagggctcagcctggagttatactcagggctgtgacttatcgcagcaagagcaccaatactgacaaagctttgcttatacagcaaagtcagcaaagggaaaagacacatggagtggggtcagcggaagaccagatgcagcttccagggccccctcccagaggagcctcacaggacgatatgggggccgatcacaggggcacccactgcctggcaaaacccctactgtttgcaccaacagttcaggggcagggagcccttctcacccaaaaatggcagagccttcccaaaatccaaggccccaggcaccagccagaggccagccttgccagctggccatcctgagatggcagcttggggcccacttgtgaacccttttctgtgcagtggggctgccagatcccagaataaaaggttccttccagtgacaaccaccagggagggcgcacctacgaccaatgaggaggagaaggcacggggaacagagtgtggcccctgcaaaagcttctgaaactcagggctgactggtagtaattgagctgcctggtgagggagtgagatcactgtggggggaggcaacaagctgagggcaaggtgtgtggctgctggggaggtgtggagggggttactgccctggctgtttggttaggccgggaccagccaagccctggacccttggatgcacagagctgcgaagggcaatgcaggcagctgcaaggagaggcagggatggacaagcagagcccacgctccacctaaagaagcccaggctgggtgggacacggtggctcacgcctgtaatcccagcactttgggaggctgaggtgggtggatcacgaggtcaggagatcgagaccatcctggctaacacggtgaaaccccgtctctaccaaaaatacaaaaaattagccgggcgtggtgggggggtccctgtagtcccagctactcgggaggctgaggcaggagaatggtgtgaacccgggaggtggagcttgcagtgagccgagatcgcgccactgtactccagcctgggagacagagcgagactccgtctcaaaaaaaaaaaaaaagcagcagcagcccaggctgggcgggagcacgacgagaacttgcagctgctcaggagaagccagaccctggagcttgttatgaaatgtccccaaacaaccattctcaaggggtgttttaattagcgtctgagccaccacgtccctcagccgctgtggccccggctgtcaccctgccttggggccctcaagagttctctctgggatctgagcgcctctctctccccgcaggttcctctatgacttctaccactacttctacatggtgaccaacgcactcttctacgtcagctccaccatcaaccccatcctgtacaacctcgtctctgccaacttccgccacatcttcctggccacactggcctgcctctgcccggtgtggcggcgcaggaggaagaggccagccttctcgaggaaggccgacagcgtgtccagcaaccacaccctctccagcaatgccacccgcgagacgctgtactaggctgtgcgccccggaacgtgtccaggaggagcctggccatgggtccttgcccccgacagacagagcagcccccacccgggagccttgatgggggtcaggcagaggccagcctgcactggagtctgaggcctgggacccccccctcccaccccctaacccatgtttctcattagtgtctcccgggcctgtccccaactcctccccacccctcccccatctcctctttgaaagccagaacaagagagcgctcctctcccagataggaaaagggcctctaacaaggagaaattagtgtgcggcaaaaggcagttttctttgttctcagactaatggatggttccagagaaggaaatgaaaggtgctgggtggggccgggcctccggcggcccggctgctgttcccatgtccacatctctgaggcctgcaccccctctgtctagctcggggagtccagccccagtcccgcaggctccgtggctttgggcctcacgtgcagaccctgccatgcagacccatgcccccctcccccaggcagctccaagaaagctccctgactcgccccttcaggcctggcaagctgggggcccatcgccgtggggagtccctcccaccaccctcgccgcaggcagctgcagcccccagaggggaccacaagcccaaaaaggacaaaaatgggctggcctggaatggcccagaccccagcctcccctcctccctcccatcctcacccaggccaaggcccaggggctctgccaggacaccacatgggagggggctcaggcctcagcctcaagatcttcagctgtggcctctcgggctcggcagaagggacgccggatcaggggcctggtctccagcacctgcccgagtggccgtggccaggatggggtgcgcattccgtgtgctttgcttgtggctgtgcaggctgaggtctggagccaggcccagagctggcttcagggtggggccttgagaaggggaatgtgggacaggggcgatggtgcctggtctctgagtaagatgccaggtcccaggaactcaggcttcaggtgagaaggagcggtgtgtccaggcaccgctggccggcagccctgggctgaggcacagactcatttgtcaccttctggcggcggcagccctggccccggcctccaagcagttgaaaaagctggcgcctccttggtctctaggatccaggctccacagagcacatgactagccaggcccctggcttaagaaggtcgcctaagcctaagagaagacagtcccaggagaagctggccgggaccagccaggagctgggagccacaggaagcaaaagtcagccttttcttcaagggatttccctgtctcagagcagcctttgccccagggaaatgggctctgggctggctgcctgcaccggccatgtcgacccaggacccggacacctggtcttgggctgtgttcagccactttgccttctctggactcagtttccccgtctgagaaatgagagtcgaatgctacagtatctgcagtcgcttggatctggctgttgagttgacgggttccttgaaccccacaaaatccctctccaaccacaggacccttcggctcaccaagaacagggcccaggggagtcaggcctattcgctgcacttcctgccaaactttgcccccacaagcctggtcatcagccaggcagccctcccagtgcccaagggccaccaaccccagggaaacagggccagcacagaggggccttcctcccccacagagcccccatgacatagtctgctctgggcggaagagctttgctgccagccagggatgtccagaggtcagtgcagcccctacccctgctcaggagtgggctcagagtctagcaaatgctaaggcccctcaggctgggctctgaacgaggacctggactcagagccagacagggcagcctcagacccttctctggggctcctggaccttgggccataatttctgagcctcggtttccccatctaaggaacagatgtggtcgttccgccctctcagctggatgagactgtcctggaggatccaccccggaacagacagaatggtgtctctcaggatggtgctctgagagagggcagagtggatgccccactgccctagaccctcggtagacgtggggtctctggggcggggtctgtggctgtgactgaagtcggcttttcccgttgatgtcttgatgctcctatctgtgcacttaccgtaggtagggacacgtgtccacgcaccacagacacacccacgacacctgatctcgtatcactagcttgcggccaggtcatgatgtggccccggaagctggccctgcgtgccatgagtgcgtcggtcatggagtccggagcccctgagccggcccctggtgacggcacagccctcacagctcaaacgcccacccccactcccaccatctgcaggtggtgaaaacaaaccccgtgtatctctcaataaaggtggccgaagggcctcgatgtggacttgagtgttgagggcctgcatgtgcccacccacccactcattcattcactccttcattcagacacgcaccgacgcagcagccagcctgcactgggcctcttaccaaagtctacagggctctggtcccagaagctggcgggtggggggcgccgggatccctctgctcacagcccacccaccctccctagtgcttcaaggagcagtgggccccctgcagggcctagtgaccaccgaggggcctgtgtgggcaaaagtcctcaccgtctcctgagcttcagtctcctgatctgtgagctgaacacagaggacgctcagtgaagcggggagcccggggtcccatgaccgctcagctcagatctccatggccccctctagccagcccaggggtcctgtggttgtgggggagggggccatggccccatcgaggccttagcagtggacagataggcccgggtgcagtactgagcctctggcctgggcccagccccgtgcaggctactgaggagacagaagatgcagctgaaccctcacccccagggcttctgctctgaaaatgagggttcccaggcacctcccagacccaccgtttccaattctcccccgccaaggcccgggtcattctccatccctggttgggcggctctggctctctgctgtgctcctttttagggcaccaaaagcttttctccggcttgcctgagcctgagccacaagaggccggtgacagcagagtctgcagggtggtgccctggggtctttctcataagcctcctgggcctcaggattaggagtgctgggctcaccctgtggagctcagcaaaagaagcatttgcttgggcttgaacagtccaggaaggctgcctggaggaggaggcaggtgggccagtgggaggcagagcctgagcaagggagagtgcaggagtgaggggtctccccagggacatgaggggctcagagtggctggagaggagaagggcaggtgctaggggagcaataggggagggagaaggcgggttgagagcttgagggatttgagcgcccatggaggggctgagtaggggcctagggggagaggggaggagccttggggccctcgtggtcaggagcctgccatggttcctgggtcctgatggcagggagcaccccttcctgagggggtcctcttggccgtcctcagcagctctggccctgcctccacctccctgcagcacttagagattctctaagtgttgttttcctgtgcctgggggctcaggactccttcctttgggggcagccaggtggcagcagggctgggaggggtctgggtgagggtggggagataaactataaccctgatcatctaaagggatcttggcacacgctgccaggcccctccctcccagcacccagcactcaccttcgcctgccctcccaagcggcgctgccccagatccccaccaggctcagcctgtccttatctgtgctaaagcgttagtggccacagcatctcctggtaacaaagatccccacaccttaacccaaaggacagcagaaacacaggacaaccccacccaccctaagggcatggtcccccaccttcccctccgagccgcacctgcccagctcagaggtggggatggcttgagtgaggactcctgggcccctgattcagaagaggctgcagggtctccgggaagaccctctcacccaacagctgctctctctaggaagccttaaacccccgacagagggaagccagagccaggaggaggccggatggggacgaggagagcctgctgcctcggggtcccgcttcccctcggctgtgcgtggccacaaggtgggcacagggagagggcacccaccatgtggagcccttggggggcctgtgttgtgcacccagaggctgcgtggcgagcactgggtgaagaggggatgccagctcttcccccggcagcacagcacagccatgagcgcacaggtggtgacgcacagggtcctgggctggactccagctctgccactgtgagctgggacgtgggataaggtggaagttagcactcagggcccggcccgcaggaccaaggttggccgcgtcaggggagctgggagggaggcggaggctgccttccttggcatctggccttggcggccaggccagtgtccctcctggcccagagcggtacccgggccctcgactgctgccctccacgggctccctgcctgaacctgtccacaccccgattcgtccccagagttggacactccgtgatgtttaaggttaaggaattggtgtcaatcatgagcttcatgcctggctgcccggctccttctctgccccggcctagtctgagccccctccaccaacagtggagcctggtgccacccgctcctgtcactctggaggtggcccagggtatagcactgcctgcaaccaggtccctgctctcctctccactctagagcctctctccccttcaagcctctccctggtctgaggctccctcccctctgagcctccctccgagcctctcttccctctcctctcttctccctgctcctccctctccctgcttcctccctggagctgggggctgtctctctgactgcatctctggaggaggaggaagaggattgggagacaggactttaagcgcagattctgccaggcatcacctaggagccctggctgaacccagctgtgtgtagggagcctccggccgccctggggctcagcatccttaggtcattgttcccatttgactggccaaggaagccaaggctctggtaatctgccaaggacccacagcctccctaagcttgaagaccatggtcctatcagccctcatgtgctcccggtgacccaccctgcaggcccacaggccgaaggcgagctccacctgtttcacagctggggacgccagggagggggagagctgcacggagctggtgttggttctgccctcgccattgtgggaccttcagaagaccccacctcccaaggaccgtgaccccctcctggggagggcacgcctccccaggagctgccaggtgagaaaagcacccagcctccagcacaccaagacccaggagcagtgagagggcagagccaagctgctgccccagggactggtagggaccactgatggcagtggcaggaggaagctccaggctgcggggctcagagagggatgaaggacagggtacgggttgctttgcccccaaatcagagatgctcacccggcaggagaccctgcatgcccaggctctcccacctcagcctcagacgccgagctgtgtagacactgtccaggctacacccagagcctcctggggtctgcttcagcctctgggaaccatttggctcctctcttccccctggggggcatggggaaagcatgccagggaggaacgctggttgggcagccaggcagaggtggatgtggcgggctctcaccccaggcaagttgaccaaaagggtgaccgcagcaaggtgggctctgcaggggaccccaggacgctggtcaggctcaggggcagggctggggcgcaggttgggagggcagaggtgaaggagcaaacacaaggcatgggtggtctcggatgacgggcaccctcccccacccacccattcaggtcctcgccctcattccccacggcaaattttcacacgggctgttagccaatagctattttttaactctggctacatttttaaagtaaaattattggattcagacaacatagttctccttaaagtaagaaagtctgtgcctaaagccgggaggaataagtaccatttggtggtgagtttcagtatcaccccaataaatcatggggtgccacatggcatggaggcaaacccagatcaacaaccgagagaacagtcactgcccctcctcctgcccgccctcctccttccactccgtgcttccctctgagccccccactctccctcccagaagaccgcctagccccacagccctttcctttctctggggtctttgttacattgaccaccatcccgactggcttccacttggtttctcccggcttttcgcacacccacggctcttcatgactgagacccagcaagcgggagcagcctgaggtccctgtggtctttccagttctgcctctctctagggatccctgggctctgtgccaaggaggaaggagctggagcagcgaggcaacaaggtcagcctcctcccgggtgggcaggtgggagcagcagtaagatgcgtggggaccaaggacacaccaagcgtccttcataaacaccccgtaggatccacagccacacacacgccagcgtttaaagaactgaaaaaggctgggcgcggtggctcacgcctgtaatcccagcactttgggaggccaaagcgggcggatcacttgaggtcaggagtttgagaccagcctggccaacatggtgaaaccccgtctctactaaaaatacaaaatagctgagcgtggtggtgggcacctgtaatcccagctacttgggaggctgaggcaggagaatcacttgaacccaggaggcgtaggctgcagtgagctgaggttgcaccactgccctctagcctgggtgacaagagcaagaactccatgtcaaagacagagagaaagagagatagagaagaaagaaagaaaagaagaaagagaaagaaagaaagagaagaaagaagaaagaaaagaagaaaagagagagagagagaaggaaggaaggagaaagagagagagaaagagaaaaagagagggagggagggaaggaaggaaggaaggagaaagagaaagaaagaaaaagaaaagaaagaaagaaagaaagaaagagagagagagagaaagaagaaagaaagaaagaaagaaagaaagaaagaaagaaagaaagaaagaaagaaagaaagaaggttgaaggaaggaaggaaggaaggaaggaaggaaggaaggaaggaaggaaggaagaacccagccaccatctgcttctgagctgatgaggccctccctcccatccccacgggaggacacccccacaggaggacgagaagacacccccatggcaggacccccctgagggctgacagccccacagaagtgccttctgcgccgggtgtgtccctgcctcatcccccttcccacctccctgcctctgcctccatctcacatagcagaggggtcccccaaacccccctgcccagccccaagccactagggcagaggcagggccttgttgacagccaaacgctgtcctctgggggacaaagaagaaagcccctttcccaaccacaggcctccagtgctcctgctgcccctgttccctgtgtctcctgggcaggcagatgggcgggctcacgtcagaaccaccagggagcctgttccagaccagtttcccaggccccagctgagccccaggcgatcagaaggtagggtggcctgggaatctgcatgttaacgacttatccaggagagtcagatgcgccctggggtgggagagccacctccctataccttcccatccatccatccatccatccatccattcattcattcatctgctcagtgctcctcgggacctggctgactcggcacccccctggctggcacagaacggagggtgtggggctctgctgccccagcccctgcaaggaattctcacaacccccgttcactccagggcataggagatcactgcaccccaaccggaggaacactgacattgacgacaacatcataggaatggaaatacaaccatggaattccagctcagtcatggagcgggagatctggggacactggccgggcagcctgccccaggcacccctgaactccagtcccctgaagccagagcccgggtcaagcccctccccacccagcaggtctgccgagctccgccctgttccagcacagagacagaagcccatcggctaggaggcccacccaggaggacagtgccggcccgtcgccatcgcgaggcaacaggggagctcttgagagagaattctatacactctaaatacctctgaaggaagaaaaaccagccacagccattgagacctgagcttcctgtatagaaaatgttccctcctgcctccaccctctctcccagctccccaactccctgcaattatgactggaattccagtttttatcagagcaccatggaaaccatggccaggctgaatttatgaaaggaatgacgccaagcagagagagaaccggtgaggggaaggcagggagccaaggcagggcaggagagcaaggcagacgaggaggggctggcacccgcagggcgcccgcagcacgtggtgagtgggccctccccagcacacgtgcacgtatacacaggcaccccatgcacatgcacacagcatgcacatgtgccagcgcatgcatacacacacagacacacgtgtacacacaggcacacttgtgcacatacatgaacccatgggcacacacccatgtacatgtgccagcacatgcatatacacacagacacacatgtgtacacacaggcacacttgtgcacatacatgcacccacatgcacacatttacactcaactcacacacacacaggcaaatgcatatacacatgcctgcacgcacacacaggcatggcatgtgaacatgagtgcacacacacaagtgctcacacccgggcacattcagcctgcatagggcctcccatctcaccaggaagggctcgttccttgggtctgtgagaccagccgcttctcatcctgccaggccaactaaccaggtgactagcagagccactggggacacccccagccaggcccagaccccagccaattacccagggcctggagcaaggccctgtcagctcaacccccatcatctgacctggttcaaggcccatggccaccgagagccagtctgcagctgggcaaaagggcaggtgccggagccctcagggtcagcagctgtgtctagagctcgctggacaaaggctaggccaggcacacttcagaaagcacctgcctcccacccactctggtcggtcccccaccccagtcactatgtggcactgaggtctcatctcgggccccagtgccaggctcttggccagccctgtcaggatggggcagaaccctgggggtagggagggcctgtgactgggccaccacgctgcaagtacagcagtgagaatgaccgctaggaaaggacactggcggcaatagggggctctgcccagggctctctgcctgggctggggcaggccggctatcaggcagtcgcacccccagagcggcctcgtttgttacccccacaggcaggagttggataaatactcagcctcctccccgctccaggggagtcactggagggtgctcagcaggggcactaagccatcagcccttacaggtgcatccccttccctactccctgtcttcctgggtcacctcccaaagaaatgaacagcttccacatcaaccctggcctcattctgcttccagggagagtcagccaaaaacatcaggagacagccatggtgtagggagcatgaggaccgggacccaggcactggcacgccagcctgaggaccgggatccagacaccggcactccagcctgaggactgggacccaaatgccggcactccagcctgaggaccgggacccagacccagacgctggcactccagcctggacgcccgctcaccggcatgcgcacgggtgaatatggagggaggtgggggaactaggaaaggaagaggaggtcccctggagggaaaggcgtggaagctgaggcctggagggggcagatgggaggaatgttctgggcaaaggggcaagctcctggacctgttgttaccatggccaggactcccctcacccagctgacagcacagccccacagagcccccaggtgagggcctcatccccatcctcacacagtccccagggagggtcccccctcacagagtccccaggtgagggcctcatccccacagagtccccagggagggccccgcctcacagagcctcatgcctgcagacagggccaggtgaggtggacgtctcttgcacctacacatcctcgcgacaggaggatgcacgtcgtacagatggggaaacaggctgggaaagggagtgtgacctgcccgtgatcccagaggtgtggctaccagagctggaactaaaaccggagcccttcaccaaatccaggtgtgactcgaagtcctgagtgcacaaagatcacacgaggacagaggctcctgggcctgcacaaaccacagttccgggcaccccagctccagccggcccgcacgctccaccagggcctgtccccacacctgccctgggacagaggctctcaccccatgcagccacgcagagaaagaccacccccgattcgcacctgcagaggtgcccaggggggtcccgcctccccagggacagcgagtcacacctgccacctcccagggcagtcacaatgccagcccacaggagccgcaggagctttgccctcctaaagatcatgttgttggaagaccagagccttcgggggcttagttatgctctgagggtcctaaagccacgtgagggtagctaaggccaccacagtcccccactcggcgggggagggagggcaagaatgacattgaaggtggcaaacaaggaaaaacaaggaacggggtctctgccctctctctcgggggcccctgacctctctggggtctctggcctctcacggggtctctgctcttttgggggtcactggcctcagagttctctgccctctgaggagtctctgccctcctggggtctctgccctctccgggtctctgctctcttgggattgctgccctctgggggtctctgctgtctcggggtctctgccctctcgggggtctctgttctgggggtggtctcttctgtctcagtgccatgtccctgccttgcctttctcctctctggtcgtcctagctcccaggacctaagctggccttggatgaacccagtacggtgcctctcctgcctgtatcggggcatccgggcactgccagcgtcccattactggactctggtcaaggagcttggtgtggataacgggaagttttggaaacttcccacccttcccagagggcttaaagggactggggcgaacgcccaacccagccacagccgtccagggctttgtttctgacatgccttaaaaggggacagagtggccgccgaggggacggagcctgccgtgtcccgtgtgcagcggcggaccaccaggcagagcgccaaggggagtgtccggagatccagcatgggaagagccccctgccacttccagcaaggagcacacaggtgcatccgttctttctgccccacactttctagggacagcaggccgagcccatggtgtgcgccgtcagcatgggctctgcagcctccgacccatgtgcggcctgcccggaccctcgctcctccgtgtgcggctcgcctggaccctcgctcctttgggccgtcactctccctactttgtagacctggaatgccatccctgccccagctccactgcccatgggtggccatccagcagccacggtggagtacacgctgcactgtggtgcccaggggccctctatcacggcaggactccccaacgcgatgtccccggggttcactgccccagccctcagtggcctgcctctctaggcattgcactggcagaagaaaatgttctcgtccaagctcacagccaccaaggtcacaggctaccaaggtcatggccacccacaccgggcagctgacctccaggatcatcctcgggagatgcccgcctggccccacctggccgccctgccccatttgccccatcaccccacaccactgcactccagcctgggcgacagagcaagactccgtctcaaaaaaacaaaagaaaagaaaagagaaaaagaactctatgtcctcatttcaaatgcagggagagtctctcggtttaaaccgtaagtgcccttcccaactcggcagacccgccccagtgaagagcattttcatgacttgggaacaggacactcaccttgccactaggcaggactgtactcactggctcggggggcgcccaggcaggagacaaagcattttcccatggcatatggatggcttccgtgtgctgcatgactgggcagtgtgagaaaaacgcaacccccagtgactgctgtagaggacaattcagccaaaaatcaaactgccaccgtcatctgctgagaccttgatttcccagggcctggtggtgctgaaatactcagaacatcctgaatgaatgaatgtccacttccttcaccagctctgtgctggggagggggcagggcctgcgtctgatcaggagctcctcccccggggaccagcctggaaccccttatagcgatcaggagacacaggagacaccctgaatgacgacactgagctctttccaatctcttgcttgtcccagcgagtacagtgagcacatctttccctgtgctctgggcaaacccctgcggcagcagctcctaccgtgaaattggtgtttctgggtcacagggtttgtgcctttgtgattttgttgctattgccaaataccctctgcagaattgtgccaaggcacctccccaccagcctgagcatttgcagtgaaacgctttagcaatcctgacatttctgccagcatattccacagcatgctctctttgccacattaatcaacaggagctcagaggaaaacttgaacttcaggctgagccatttcctgcaatctgaaaaatgaacgtggccttcggacacagggtggtcccttgccagggactggatggaactggttcaattccccgctcctgggcttcctggtgtgcaacgtgagccatgctcaccccagggtggctgggaaaaaacgccggtccgctctgagcattcgtttcagtgatggctgttcttgttcacgtgagatgtgccaactctacaatactaaaccgttgggagaagcttcaaggggacagcacctggggaggggcagtggcgggctccaggttgcccaaggctgtcatggagaggaggagaccccagtccagcccagccttgtgcctgcagtggaggttccagttgtgaaggggctccaagtgccttgttcatcctttgcttgataatgaaccacctctgccaggtgccagctgtactgtgcacctgcagctccacaccctctaggcaccagcccctccactctttggcctcttcgacagggaaccccgaggggacagtggagcaggcctggggctgttccaggcagcaggggggcgcctgggtcagcgtccccacccgctgccctccccggccttccaacttgctgtgtgcacattaacaacatggacggtctttttcttttattataaaagtgattcattctcttgtgaagatttaaatatgaaagagtggatctccgctaatcccacccggtgatgatagcagccgacagatgggcgagcatagagctcagacattgccagcagcgtcagatccttatatatccagagcacggctcacacgccaccgccctgctggctctgtcagccgcatggtcctccgcgacacctggggctctccctccttcctttgtgtgcacaacctcaaagccattttttccagacttggcgtgaagatgattttctgacacgttgatgcttctgaagcacaaggagggccctgtctccacggtgtccaagcagaggctgacatcctttcaggagggaggtgattcgggcgcagctgggctggcgggaggcatggaggctgagtccccttcctcactgctctctacctggagaagaaaccaccagaccatgaggccgagctggggaaagttccggggggctgcttgggctctgtgctccctccactggggcaggcggagggccctgcgtgctccttccaggcaggggctgaggggactgtggaagccacgacaggggtctgtgtgaacagaagacccaaggacaaggtgccccagcactcccagccactagcaaggacaggcaattttcaaaacttctccccaaactacaacctcaggaaaaggggtggagaaaactcctttgacagagatttggttttcaccaccatgacaggacaatgatgatggatggaagctgtggctgggcgtgggaaggctgagtgtgcaaatgtgggtggagttctggggccccgcccccgccagtcttccacttggtccctgtgaggacccacatgagggaagtgttgcttctggcctcagaacccaaggcagagcaggctggagtcccaccccatggatcacgagcccacgctgtgaccctgagtcctggacatgcgcagagggagggtgtgcacgagcccgggagctcctgtctctgtcttaagagtggagcatgtcttaagagctggcatgaggatcagagggtcccttcagtgcggccttctagaagaactacagcaaccaggccctcgcaggggggagatgcacctgctggggctaaggagcgagtgaagccagcccctgagacacatgctcccaaccccatcctcacctcccaagagagggggagcctcctgttaagcatccaagtcccaagtcaccggccggcatcggctgcagctctctgtgtgtggagacatctcattctggtgtcttctttacacaggtcagcgctcacaggctcggctgtgtctcaagacccaattccttcgagtcactgagatgcccaaggacaagggcaacagagagtgtgaaaagctggagtagacaggacagaaaacagggtgcagcgtcccccaggttggcagatagcccagccccagggaccccacagccatggcaacctgtgtgaatgagccccaggagcagggcagtacacgatctgcgcgactgtgcggggcagccctgggtctctgcctcaggggagagattgtgtcctcgccttttgtggtttctagaggttcctgccctccttggctgcacggcatctcccagcctctctctcccttccgtcgtcccctctcctcctctgaccctgaccctcccagtccctcttagaggggctgtgattaaactgtgcccaccctgaccatccagaataatctcccatctcaaggtccttaacagcatgtggaactgcactagccgccccaaggcccccaaaaggcaaccctggattgggccccccaagttgcctgggattcatggccaccacccggctcgacggctccagaccgaaatgcacccagttatagaaacagacagttgcctcttgaatgtgcacatgtgtgaggagagtgtcacacccgtcgaattaaggtggacccgccatgagtgggggcaatgctggccaatgcccacctgcccagcacccacagctctcggcctggggctccctctgtctctggagcccgcactaaagtgtgcgtctccatccacgactggcagggcttggggcatagacatcccgctgccttgcctggaggcgccccaggcctccactcccacactgtctcagggctccccggggctcggctctccttgctcacagtggtccgggctggggttccttcttggttgcatttccagctgtgttctttccttcactttctcactctcccttgcctcagggtctgcatctgggggtccactggggaggactcagcctctcccgcgtcctccatcccacacacctgtccctgggcagccacggggaacaggagcacaggggacagcaggcagagggcagcgcccgggcgaaggggactttcgcccttgcttcatgcagccctggcacccgcagcagggtaagacgagatcccagaggaggagtcttggccgcagaactgcagggccaaggcaccagccgctcgggggcctggagagctcaggtcacaaacttgaagtcagctgcccaggaagcagcctcagctgggggtcacaggccaactgggcagtgcccttggccacacctgtggaaggaggacagaggagggcagggcggaggagggaggtgctgggctgcaatgtcacctctacagacctcggctgatcccaagggggtccacagtggatatggtccttcaggggtgcccttgaaggcaggaaggggacaggactttatactgttcctcccaccccttcgagcagtcaccaactgcagcccagatgaggtcaacaggtacagaaaggagggggtgggacaggaaggaggggcgggacaggaaggagggggcgggacaggaaggaggggcaggacaggaaggagagggtgggacaggaaggaggggcgggacaggaaggagggggcgggacaggaggaggagatgggaacagggaggtggaacgggaaggaggaaatgggacaggaaggaagagatgggagcaggaaggagataggactggaaggaggagatgggactggaaggaggaaatgggacaggaaggaggagatgaggcaggaaggaggagatgaggcaggaaggagatgaggcaggaaggaggagatgaggcaggaaggaggagatgaggcagaaaggaggagatgggacggaaaggaggggataggacagaaacgagggatcagggtcctattctaatctcctgggggcatgattgcagggggtgacatgattacttccagccagccctacatgagccacctcgtccatggagtcagccccgccagggcagcagagccctgggttcgcacagggagccagggtggcgtggggcctgcattgcagactccatttgtccacatcaatcacttctctacggcccaaatcacccttagttgcccagttcctgctccgcggcagtctggctcctgctggcgccccagccatctgtctgcattagagaatgatgcttgccagggcctcagggaggtggcacggatgggcaacactgtgctcccggaccaggtgacagacaccacctcatgccccatggcatggacctccacctgtctgatggctttgccccagcctatctgatggcatggtccctggccagtctatctaatggcgtggtccccagcatgtctgatggcgtggtccccagcctgcctgatggcgtggtccccagcctgtctgatggcatggtccccggcctgtctgatggcgtggtccccagtctgtctgatggcgtggtccccggcctgtctgatggcgtggtccccggcctgtctgatggcatggtccccggtctgtctgatggtgtggtccccagcctgtctgatggtgtggtccccggcctgtctgatggcttggtccctggtctatttgatggtgtggtccccagcctgtctgaaggtgtggtccccagcctgtctgatggcgtggtccccggcctgtctgatggcttggtccctggtctatttgatggtgtggtccccagcctatctgaaggtgtggtccccgacctatctatctgatggtttggtccccagcctgtctgatggcgtcgtccccggcttgtctgatggcatggtccccggcttgtctgatggcatggtccccagcctgtctgatggcatggtcctcagcctatctgatggtgtggttggtgtggtccccagcctatctatctgatggtgtggttccctggcctattcgatggtgtggtccccagcctgtctgatggggtggtcctctgttggctggtgtgatcctgcctcttgtctcacatcgtgaaccctggcctgcaggaggtgacccaaggctgatgactccttctccggggcccttgcaccacacagcctggccctgattacagcccctgggctcctgtacctgtcctcgcagcccccactctgccactttgcatttgtctgtttcactcaacacacatttaatgagcacctactgtgtgtaccaagcccagtggggaacagcacatcaatgaggctggtgcgggaggccttgggtaccctccgtctggctccccgccccagcgcatgaggctgcctctctgggtctcggacgcccacaccgcagtgtctgggagaaggcctggaagcctgcatttgggcagtggctctggggcccggccttgctggcttccggtggccccaggcaatgactcctccctgtctccatttacagatggggagaggagctgaggatggtgggcccgtgaccctgagtggccagttcattccccaggccctgactggtgcagcaagaaagagaatccgccttgggttgggggatgtggcatgaactttaagatccacccttttccaccctgggatcctggcccccgtcccgcatcccagccccagccaggacagcccctggccacaccttctcggcacatcaagagtcatgagaggcagcgtctgccaccaggaggcctcgtcccaccgggccacctggccagggcagctgcgacaggaggcagagctgaggccctgagccctcctctgcccattcccagctcaccctcagggttctagccctgtgtcgctgcccctctgatccaaaaacttgccacaggtcccctccctgccatgctgccctctgagtgacacccaccccctgcagcccccacagcccccaccttcccttcagaaagcaggagctgttggccccggggccccgcccacaggccacggtgtcagtggtggctgaagtccgccgtgctcaccaatcctctgcagtctcgcccctgcaacaacagcacttgaggaaggaactggccacgcagcctttcatgaggtgggaaactgaggctcaagggtgtctgtactttgaactggaccaccccgctgtgagaaggagcagggcagagactgggagcacccaccctcccgcaccctgtgtgctgacatgagctcatccctgctgctgcagggccagagagacagacggacagtttgacggtggtccctggaagggtcgacacaaatgaaaaaattttttaaattaatcttctttcctgcaaaagggaaaacagaccccttttctttcggcttttagttagaaagctcttcgttgtggattctttgaatgtgggtaaatctttttttttttttttcttttttttgtgatggagtcttgctctgtcgccaggctggattgcaatggcacgatcttggctcactgcaacctctgcctcccgggttcaagcgattctcctgcctcagccttctgagtagctgcgactacaggcgcccgccaccagcccagctaattttttgtattttagtagagacagtgtttcatcatgttggccaggatggtctcgaactccctacctcgtgatctgcccacctcagcctcccagtgttgggattacaggcatgagccaccatgcccagccaaatgtgggtaaatctttttaaaagctgaataagccccctgcctgggcacaagccagggatgtctttcccaggggcaggatgcaccatctttgaaacgtggacatcaaggaaggcggcacctgcctccccgctccctgcccaagcccaggagcccgactttggcgggcgcagtgcttcagaaccacctcccgtcgtagagacacgaggagtttgtttttcctttggataaagccaattagctggcacagatggtcaccccagtccccaggtggatgtgtggtggcgtctgtgtgacaaatggtgccgccaagccgtcccacgggaagacgagctcctgtttgtctttcaaggagagatgcacgtagcggactgcatccgcccggctgtgtgcaggctgagatttctctctgtctttgcaaactctcagcagcttgcacgtcgtgcacctggcatcctggtttgatgctcaatcaatggcaaaacgggtttctttcttttctgccttagtggagaggtctgggggttagcaagagattttgtttttaattgtatttctccaacaccccatgagatgctccaactccatgtgactaggaaggggcaagggaggaaacctgtggagtcccctgcacaggacgctgtctccgccctgctacgacgctgtctccgccctgctaccatgcttattcctggctgctgctttgctgttgactctcacaggcagatgaggtgtctgctcagagaagagcccaggtgccaccgagggaatgcaacgtgccacaccccaagacatgacacttgtgagaacagtgtggcccagcccccactccgggcacagcctcggacaccctgcccgcctccgcccatggaggtgcggcctgcaaagcgtacctgccgccgccttcccatccctcgggaaagccagcctcatgtccagtctaaggagaattctaagggatgctgccagccacctgcaggctccgggctgagctcaagggaggggccaagggcggctttaaaaggccttcactgatcacttgccaagaagcccaaaatagcttcccaatctaccagcctccatgtgcgccgtgaccgggacatgttctgagtcttgtcttttcattttttgtgtttttcaaaagtatacaacttataaataagagtataaagcctggcgtggtggttcacgcctgtaatcccaacactttaggaggccgaggcaggtggatcacgaggtcaggagttcaagaccagcatggccaagatggtgaaaccctctctaccaaaacacaaaaaaatagccgggagtgatggcgggagtctgtaatcccagctactcgggaggctgaggcagagaattgcttaaaccttggaggcggaggttgcagtgagccaagatcacgccactgcactccagcttgggtgacagagtgagattccgtctcaaaaaaagtataatttccagtaggtaacacgtgcacgtggagccacacacaggaggcaaaagcaaagtccacgtcctcccagccccaggcctcttcctcaaggcagccctgggaggcgtttacatgctcctagagggatgggacaacctggtccctcctctcccacctacggacaatttgtccctttgaatcaggagaattgggtctggtcagggaacctaaggctgtttcacactgacttattagaactaaattctaaattgaaaggaaaactctaactttccaggcctaagtaacaaaaggaccagaggctactccctttgcaaacccggcagatggaaaattaaaagtatctctgattggttgctttttgcaaccaattagatgtttgcataggagtgtaactttgttttttgtttgtttgtttgttttttggctttttgtttgttttcattttgttttgctttttgagatagagtctcgctctgttgcccttgctgaagtgcagtgggacagtctcagctcactgcaacctctgcctcctgggttcaagcaattctcattcctcagcctcctgagtagctgggattacaggtgcacgccaccacacccagctaatttttgtatttttagtagagactaaagcagggtttcaccgtgttggccatgctggtcttgaactcctgacctcaggtgatccgcctgcctgggcctcccgaagtgccgggattacaggcataagtcacagtgcctggccaggagtgtaactttgtaacttcacttcagcctctgattggttgctctctgcagccaatcagactggttgcagtcaccacttcatttacataaggtgagcaccaagtgccaatgggaaacctctagggggtatttggacccgagaagattctgtatccagggcccttgcacactcccgctcccacactgtggggcgtactttattttcaataaatccctgctttcgttgcttcattctttccttgctttgctgtgcattttgtccaattctttgtttaaatgccaagaacctggacaacttgcagtccagaccctccaccggtaacaccttctccctgcccagcaccggcgccgaggtctcttcatctcactgcagcacagagctctttccccatgagactcagcaccgcctcctgccgagagaggcagcttagtgtctgtgggaagcagaatgccagcatcccaatcccttcatgtgctaccatgacgtgtggcgggggaaggagacttggcagctgtggttaaggtgaaggtgggggacaatcctggattccccagtgagcccagcgtatgaacccttaaaagagagcgcattggccagcttctccctggaggccgagccataaggcaggaggcggaggcagagagagtcgaggtaaggacatgacctggttttgctctgaagatggaggatggagccgtgagccagagaacggagcagcctccagaagctgggagcagcctttggccaacagccagcaaggatgtgggacccaggtcctgcaactgtagggcctggattctgacaacagcttgtcagagcaggaagccagttcttcctggagcctcccagcaagaaccctgctggctgaaacctcaatttcagcctcatgagaccttgaacagaaaaaccagaagaacccgcgagaacctctgacctccagagcatgagatgaaaaatggacgttggtttacgctgctacatttgttataatttgtcccagcagcagtgggaaacacacagtatcccccttgcctgctctgctgatagaaaggtacattgttttcaaccttctgctatgaagaaagctttgcattaactctccttgctcatatgcacatggagtggaggacaaatctgctgtcaagccctgaattgggtttttgagacactgtccgtccaaacacccacagtgtgcccctgtgcagaggctatgcgtacacaaggccccaccatccacaggacgacagaggctggcttggccagcccaagaccatccggcccctcaggagctgcctgactccaggagctcgtaggccatgccccggctccccctgggcaggctgcctcctgggtctgagtggggaacaggaaggcctcagcctctcaggtcaacagaaagtttgtgctcagatgggctgaatgttccgggtccatttcctcctcaagcccagaagggtttgctttgcaggaacctgttccaagtgatttcgaagtactcaaaggctctttggtggatgtgtcaggatcccaattcctgaaataagaaagttgtgtcaaaaatcacaaaagacgctgggcgcggtggctcacatttgtaatcccagcactttgggagaccgaggtgggcagatcacttgagtttaggagttcaagaccagcctggccagtatggtgaaaccctgtctctattaaaaatacaacaattagctcggtgtggtggcaggtgtctgtaatcccagctacttgggaggctgaggcaggagaatcacttgaacccaggaggtggaggttgcagtgagccgagatcatcgcgcccctgcactccagcctgggcgacagagtgagactgcatctcaaaaataaataaaatcaaaaggaactggcctggcccaacatcctggccgctgcgtcctcctcgctgcaaagtcagattcctcgctcccgctgtggggtttcctggacccctgcccacagtctgctaagtgcctaacctggccactattggagcccccgatcccacagaggtggctgttcagagagaagcggtgggcccagtgttccccaggccacactccacaagtaggtgcaggaagaagagaggtgacacttggggctgctggggctcagcccctccagggccctcaagaggggtgtataagcctcccacccaggggtgacgagctgggtgctccccaccaacacccgctggcatcagcagcagctgatcctagggcatcacctgcccgaaagccaaggaagccccttgcagagggcagcgtatctggcagtggccactcgggtggggccgccttcctcaagctcccaacccagcaaggactcccttgcctcaggctctcccctgcctctctctcagccgcgtgagcacggctctgggcaccgcacctgcacccagcagaactgtgctaaccgggccagatctccaggggccaacacagcctggcctctaggacgggccacgctgcgagggagggaggcaagtgtggggaggccggattccacctgtttggtttttgattagggaatggcagaaacccaggcctcccggggcagggattcagctctcctaacggaggcagccttggtgggggatacttttcagcagggactcttttatcccagagtgtttttgctgtgtgcgcgatgactggctcagtttttgtaataatcgtttccatcagcatagagacagctgtttatattcttcaactttgtattatgaaaaacgtcagacagaaaagtcgagagactagtatcgcatgcacctgtgtgcacagcatccagattcaacagttacgaagggaaaattccacattttattttaaatttactaaagactgaaacacaccaagtaccgcaggaaggataacctgggtggaggagggatggggctggagagtcggggcacaagggtgaggggaatggggtgggtgggacagaggtgggggatggagggtggggtagcatggggtggagtgggggatggaaggtgggatggggctgggtgggaccgggtggggagatggagggtggggtgaggcagaggtgggggaattgatgggcgggtggaggtgggtgagggtagggtgggatgggtgagacatgggagggatggagcatggggtgaggcagaggtgaggggatgaagggcggggtgggccaggggcagcccccagtgcccacagctggagcaggcgaggggcaggagggagcggctgcctgcccctgcgctgggtgggccctggggcgccccctggcctgctgccaggtctcctgaaggaggggtttgttcccgcctcccgagcccacagtctggtctgtgtgtgcctgtgtctgttgacaactccatgagtgaactgtgatacgtcaaggcttgggggaagtgtgggaaatgcttgtgattttctttctctgtagaagtggagcagagagaaagcagctcccacagcgtgagcgcctgatacagaggagacccggggcttggaggccttaggcattcactccaaagacctgagaattaagggaacgcggcggggcctcttgcccagacctggaagaacagcaagtgctgcgagggcctctgcaccccctgaggacccctacgccccccgaggacccctgtgccctgtgagggcccctgcacccctgggcctgggtggagacccacacacaaccccactattccaggggaagagaaaggggccctgtggggcttgtcaaccatcacagacccagagactctgggcagaagcttctgcctgtcacgctcagcctgcgacggccccaccaggagagcgcagccgtgagtcccagaggaagcggcttaaaaggcccctttccaccagccgccaagcccctccaggctttgctgaggccctgaggtagccaagcaaaaaccagcctcacttcccaggagctcaatcaccagaaacttcagggaaacaaaaacccaccggaagacgttttccctaattacccagacaagtcagacaaaggccatgtagagcctttcccggagtttcccagcaagcaccgcagcatctgggttctcacgtggccgtcaagcctgtgcacctccacacggagctcgggacccacccccagggctcctggagtcagctcagcctccgccagcaggcaggccccagtgcccacaggcatttctgggcttgcagggcacagagcctgatgctttgctccagctcccagcgaataggagaggagcccacgtggctgcagcgtgggcagaggcacaagccccccaccctgctgggagcccaggtggcccaggagtgctcctagcctggtcagctgcccacgcctctggcttgcactgtctgaggccctgagagggaagcctagcctccagctgcttagccccaagaggaaggtagggctcacaggctggatggggggtcagacgcagcaaggacaagaggccacttgactgtagccagcacctgcctgtgtcccaaggctgcagtgtgtccaggagggcccaacaatacccatctgtcttgccttggccgccgccacagccagcctgaccacccagacctgagagatttgctcaccaggacactcaacacagcaggccgcagagctgcccaagagccttaaatctgctcccaccttttcattcttgatctcggtgtagacgtgctctggaagatgatccatttggggcatcgacactccttcctctcgccactgtttttcttagttactgcattattttcagatggccggtggatacttcatacctgtaagcaatgcactggagctgtgcttcttggctggtgacttctgactactcccacggagggaaagcctgggtcccctcccacccgcattcccaccctcatcttttccttatgtccccttcacgttgttaagatcttggacatttgccttcgttcaatcatacatttgagacctcctttttcgtctataggatgattctaactaggttatatggtttggctgtgtccccacccaaatctcatcttgaattgtatctcccataatcctcacgtgtcatgggagggacccagggggaggtcactgaatcacgggagcggttacccaggttgctgtccttgtgacagtgagtgagctctcacaagatctgatggttttataaggggttgtcccccttttgctgggcacttctccttcctgccaccgcgtgaagaaggacgtgtttgcttccccttctgccatgattgtaagtttcctgaggcctcttcagccctgtggaactgtgagtcacttaaacctctttcctttataaatcacccagtctcagttatatctttatcagcagtgtgagaacagactaatacaccaggccatcctgataaacagcacttaagtattatgacgatttaaatatcatcttttgagaagccaagtgctacgtttgtgtccaagggcaggaaatacaatgccattctaaacccttccgtgtaaaccagactctgcggagcactggctctctgtgccctgtttgtttccactctcagctttcaccttttctccatgtccttgcgtccccgtggcctcctccttcccagctgctgtggctcaggtgcttcaggtgcactgagcaccccaggtcttggcagacacgttgtcctcacatgagaagatgtgggctgcaattgaggttcttggttccttgtgaactttgtcttcaagcatccagcgtcattgatccaagcagctgtcactctggctctgagtcctatgggcactcagttcctctccagaagctctcaggccttccctccttccctccagattctgaaatgttgccagaaggggaagcaacaccctttgcctcaagcccgcttggtactcgggagcctggctcacatctctctgttcccttccatgttgtcctcatggagctgcagttgacacccactgggttggcccttgaaaccctagcatctccctcctaacagtcaacagaaaacgcatccaaagcccaggtgctgcagagcccaggttaggggacatgctggggcagagggacttacttcagaaggacttttcttgcctatgaaaagaattgctccttttacaaagaggacattggctgttttctgtgttgacccaaagaataatttccctttgttgcacaaaaaaaaaaaagcagagctggactttagaagctgaatgaatggggaaagtttccatctttttaaaaaataaattctgccccttgtgaacccacaggaacccgactggagagctgaaacctctgggaagccaggccagcctccgtggcatttttcaagtgtaatgtctccatcctgggtgtttttaaagtcgtgattgtcccagggttttgagggatccgcggagatgagaatagcggtgtgaaatgatgcgtgacactcaccacagacggccatgtcagagccttgtctggaacatgcaagcagaggctggcttcatggaccacagatggccgtgtcagagccttatctggaacatgcaagcagaggctggctccatgggcagaggcgctgctggcgccaggctccccgtcagcctgggcaggaagctccacggccaacatcagtgagactccagcctcttgggatcaagggcccaggccggctaggaacctgagaagccttgtccttgctgccggacgtcatcgcctctgagagctggtctcttgctctaggcagggtccctggggtgaccccccagcctgcaccccaactgtctaccaccctcagctatctgacacctctcctgaagaagatgattcctgccatgcctgcagaaaactcccagggggccacgggaaggggagcaagatggacaagactggcccttcccaggcaggagaaaggacagctgcccctcaaacccaccattcagggaaggtgaggccaggtgatgggccctggggtagcgcgggctcagcacatgcctggttccgcctggttcctccacctgatgtaggaaacacattacccagtgctcctgcgcctcagtttccccatctgcaatggaggtagcagtggctctaccgggaggttactatgatgcataagtgatgttgcgccgtgaagagctggcacagcacgggcagagagtgaccaggaacacgctcccacatcccgacagcttggtccttgttgtctgggctccggctgaacaggtcaggacgaaggtgcggccccttggctctcgaagtcaccatttgccggctggacaaaggtccttccagctcagcctgtttttttgtttgtttgtttgttttagacaaggtctcactcatgttgcctaggctggagtgcagcggtacaatcacagctcactgcagcctcgacttcccagggtcaagccatcctcccttctcagcttcctgagtagctgtgactacaagtgtgtgccaccacactcaggaaattttttttttttttttttggtagagatggagggctccctaggttgtccaggctgacatcaaactgctggactcaagcagtcttcccacctcgggcttccagagtgctgggattactgtccctggctgagcttggttcttggtgacaatggggcggtgactgagaactcaaaggaccacacaccccatggcaggcaggaaacatgaggctcctctcccccagcagattggaaaaagacaatgagaagcagctcagcccgcaccccccagcccatgtgagccaacttaaaaacagctcgagtggcaattgcgtggcctctcccactgtggtgctcgcacccaccagccctggagaagtgctgggccccgccccaaagcgtctgatgccgcagagctgtgtgttgggtgtgctgcccatgtgcacgtgtacacgagtgtgtgtgtgtatatatgtgtcatacacatgcatgtgtgtgcacctgggtgtgcatgtgtgtgtccatgtacgtgtgttgtgtacatgtgtgcacgtgtgtgtgcatgtgtcgtacctgtgttgtacatgtgttgtaccatggcaggcagtacaggtgtgtgtgtatatgtatacacacatgtgcacatgtgggaagaatacctatttctgacaagtctccgggtgaggctgagtctgccgttgcagggcccgcattctgagcaccctgggtctatcagaactcaagccctcctcctcctcctactgtcccatcccacagaggataagaggtgtgcatgtggacgggggttccaggacagcatggcttctcacagcagaaacacgcagcagaatctgtccatcaaggcaggcgtggtgaaatcagttaggcacccttacctaggaatcctctgcgcccacaaaagcagtacctggagagccaggtcctgggtctcccctgggctatcatggcctgcctctctccctccctctacagaccctaaggagcacccggcagggagagcaccgcccaccctgcccctcagtcatgcagctcacatcgggcagaggtgacgctgtggacctgggtgggccccacgtttcaagtcaaatcaagctgctgaccaggaggtaattcaggcaaaaggagcagaatcatcagataaaaggtaggatgcccagttatatttgaatttcagataattcaaatttgattcaaatttgataattaaaatgtgaatgattttatagtataagtatgtcccgaatatatacatggattatattacattatgctatgttatatcatattattttattaggaaggtggtgaccactgctaaccagaaggtgcctgtctcccagcctcatgggaacacgtggttcttggtcatgagagctgggtacagtggaagggatgtttagaaggctttggtcaaacatatatatatatatatatatatatatatatatatatatatttggggcatacttacactacaaaattattcaatgtttttctgaaattcaaatttacctgggcatcctgtatttttatgttaaatctggcaacccctgaaaagagccaaaaccccctcaggcggtcgagagtgcggcagccaagccagcacgctgcagctccctccttctcggggccgtggcctggccctgcaggggacatcgtgggaacaataattgtccaagtctagtgctgggggcatcatgggcgctgccccagagccacaaccagcccgcctttcagtcagcatggtgagtcttccgatgccccatgtgaagaattgaacttcttttctgaaagctgagagtggccccctcgtggtgggcaggttcccagggaacggaaacgccttcccttggttccctccagcagagttcagacaggagccaagatctgggtccaaacagtgggtggaaaacgccccctagaggtgtgatgtgttggctgcaagcctggtggctgggcctggggacaccctcaccaggttgccttcaatggggggttcccctgaagcccaacttttaattttctgcaaccacaggctactttggtcagaagggaaataattagatcagaaccttaatagcgttaatttcccccaaataggaagaaagcaaagggaggggacatgagagctgttaattaggtgacgacctctcctacctgctgtgttggaaaagcggctctatggaagacatagcatccagggcaggaagaggcaggctcggtggtgttgggttggaaagcccccgcctcgtccggcggccatgcagtccccagcacctctgagtccactcagcccagggaagaggacaacagagctgtgctcagtgtccagctgtctggatgaggcccagggagatggcctgtggtggagcaggaggacctggggaaacaaaacccacagtggctgcccagctgcaaaggctgcgttctttctacagtgtctggggtctcaggtatgagtggcagagggagcagtcccatcagccatgtcagcctcgttgcaatggaattccacttctgtcccagacactcagccagacaggaggaaactgtgaccacaggcatgtggacacgcaagggtatgtttgagcaaagccttctaaacatcccttccattgcacccgactctcatgaccaagaaccaggtgtccccatggggctgggagatgggcaccctctggttagcagtggtcacccccttccagagatgacatcagctccccaggcaagaaactccacttagaacccagagccgatctgaggaatgattcatgcagctagacttatacaagactgatctataagctggaaggcttgtatgttcactgaccatgggaaagcctttccagggcctgagcgtttcccacttgggatccaagtcctctgttcctgggatcaagatatttgggaagccacatccatcttttgaaggaaatttgagcaacagggatcaaagagtgaggatcattcattccatccccgtaagggagggaatgggtcagtaggttgtgtagccagtccacaaatggtcactgtccacctgctgtgtgttggccttgcctgagaggtgggggacagtggtgccacgccattcccagccctggccccctggagccagctgatagcctggcaggggaggcacacgttgaacaaattatcatccgtgattcacaatgacaagtgtgcaaagtgtatcccacaaagcacttattgagtgagaaacacaggtgtgtggccacagagaccaaatgggaccctcacagctggggcggtgaccttggagctgagagtgaaggctgcgcaggagagagacaggcaaaggggtgggggcaggcatttgcaccccagggggctgcagggtgatttgcaaggggagcccaggtgagggtccacagggactagagcaggccaagaagggaggttggtcaggggtcggctggagccaggcttctgagggttgattcccggctctgccctcaacccaggcagttccccactctactcatctctgactcctcccctcaaagcaggcgtgacagcggcacctgcctcagaaaggagggggcgtgtggggaaagcaggtatttcatgacgaccgcccagcatagagccctggagacagtacccctgcccaggttcccactggagcaggcagacagccccggctgggatgagccaagcgtgtgtctccatgtggacccggcccaatgtggggctcagcaccctcgggtctcctggtccgggctcctgtctcacgcttttatgccatcttttctcaataggcacaggggacccccaagggaggaggcgctccagactgaaggaggagagtacctggcagggacgggtggagaggcgcagggaccccaaggtgtccagggaacagtaaggagatgagtaacggtgagggtcccgtctcccgagcgtatctgtgctaaggggctgtgggctgggcttcattcctctttagagcaaggctgaggccagggccacctaggggccagggtagaagacgtaccacgtgacagcagtggcctagacccctcacgaagtctcactgggccatatctccaccagggcatggcagggaccggtatcaccagcggccccctgcacagatggggaagctgaggcccaggtcccagtcagccaagccagctcttggaccactcagcggtcccagcaggtgaggctgaccagagcctgcctgggctaagaggctgcgttcaccagtgccagctgtggttggtcaccaggatgcctgagcgcgctggcacaggcccagggcaccctgcagagcaaccaaccctcaccgagatccccagggaaggggctgttgttggcccattgtacggaggagggcactgaaccctcaagaggctcagggcctcgcccggtcacacagctggaaggcgccagagccaggaaagggacccggaagcccgacccggagcctacacccgcagaggcgaaaacatctgcgtagcggctccctggccagtgggccgtggtgggcgtggccgagagggaatggggcggagagaagcccgtgagggcagggcggaggcggaggcggaggcagaggcggagcgggcggagccggaggccgcggcggccttgattggaggccgccttaagctcgtcatggatgcgttttgacctggcggccccgcccctgacccgcccccgagccgccctcccgagcgcttccccgcccggccccagcctaggccccgccctgatctcgccccctcttcaccgtccggccccggccccgccccgcggtggggcctccgcagcgacccgcggttaacgcttccccagagcttgggctgcgcggcggccgggagtcggaggcaggcggtcaaggccggcagggccggaccccctacttgccctttctcccagcaggcgctggactctgggggcgggcgtgagcccctccgtcccgcacccagacccgggcagcgagccctatgcctgcagtaattgtggggtttctggttttgttttttccttaacatctttattgagaccgttaagttcacccgcttaaagcgcacgattcggtggggttttgttgcgagcaaccgtggccactatctaattccagagcatttcacctccttaaaatgaagctgggcccggccgggcgcggtggctcaagcctgtaatcccagcactttgagaggccgaggaggaaggatcacctgaggtcaagagttcgagaccagcctggccaacatagtgaaaccgcgtctctactaaaaatacaaaaattagccggccgtggtgagcgcctgtagtcccagctacccgggagtctgaggcagtagaatcgcttgaacccaagaggcagaggttgcagtgaggcgagatcgtgccattgcaccccagcccgggcaacagagcgagactctgcctcaaaaacaaacaaaaaagaagccggtccccatccgcagtgactcgcgtttccctccccctcccccgtccccggcaaccgtgcatctactttctattcctatggagttgccagttctggctcttcctgtgaatggattcccatgctgtgtattttcgtgtctgaattctctgactttcgtctcagcccgcacccacgctgccgcagtccgcgctcgctgcttttaggctgaacgcggctgcgccgtgcgggtgcccgcgctccgggcgcccctcgcaggttcagccccgggttgggggcggcgcttgcctcgcggctgcgggtcccagcctgaacctgtgtcttgttccactgccgcgggcgcccgccacggagctgctgcttcctagggagacggttccatcgttgaaggaacggccagactgtctttcgcagcagcggcccatctgaccgcacagcacgaccgcacgagggtcccgagccctgaccctcgcagcactcgtcaccccggccgcgtggttgtggcggtctcggcggggcagggggtccccacgcgggctgattctagtttcgcgtgaccgatggtgctcattagccatatctgtacatctttttttttttttcgagtcggagtttcgctcttgttgcccaggctggattgcaatggcgcgatctcggctcactgcctcccgggttcaagcgattctcctgcctcagcctcccgagtaactgggattacaggcgcccgccactacgcccggctactttttttgtatttttagtagagacggggttatacgatgttggccaggcttgtctcgaactcctgacctcaggtgatccgcccgcctcggccccccaaagtgctgggattacaggcgtgagccaccgcgcccggcccatctgtacatcttctttggaaaaatgtgtatccaaatccttagccgttttatagttagattgtctttttattatcgagttataagaattatttataccttctacaaggaagttcattatcagatataggatttgcaaatattttctctcatctgtgggtcgtcttttcacttttctgatggtttcctttgaagcacagacttttttgtttgggtgcagtgtatttcttactgtgctttaaagaggaacacgttttaagaacccccgcgcggggcggagcagggcggagtccccggcgggaagggacccgagacctcggctgcgcctgcgccgacgccggcgcgtgagcccgagcgcgtacccggcggagcgcgcgcccgcccccgagtgcgcctgcgcggagctcgtggccgcgcctgctcccgccgggggctccttgctcggccgggccgcggccatgggagaggccgaggtgggcggcgggggcgccgcaggcgacaagggcccgggggaggcggccaccagcccggcggaggagacagtggtgtggagccccgaggtggaggtgtgcctcttccacgccatgctgggccacaagcccgtcggtgagcgcccaggctgcggacgcgcgtgggggcggggcgggcaaccggcggggcggggcggggcctgcgctcgcgacaccctcgcccccacgctccccgccgagcccgggccgtgacaccgccgccacacccgtcccgggacccccgccccctcccacgcgcccttcggaccccgccccggaccccgcccacgacccctacccccgtgagaccgcgaggtcccagcccgcagtgccccacccccacccccgccccgggacagcccaccccctcccacacacaccacccagccctgcccccccacagcccctccacaccctggccctccccatctctccgcagccacccttgcccctccagtccccagggcagcccgtcccctccatcccctttctcctcaccgctcaccggttatcccgccgcccctcctcccctcaggtgtgaaccgacacttccacatgatttgtattcgggacaagttcagccagaacatcgggcggcaggtcccatccaaggtcatctgggaccatctgagcaccatgtacgacatgcaggcgctggtgagcccaaccgccctccctgtgccgcccgatgggggcacgaacccgcacaccgctctctgagagtcagcctgagctgggcagaggcccctccatgtctgctggggtctgctgggcagagtagaggcccctccatgcctgctggggtctgcagtgagctctcagggtcagcctgagctgggcagaggcccctccgtgcctgctggggtcccctgggcagagacccctgcagtgaggctcgtccttaaggaggacatcccggggctccagagcctgtcatggaaagcacaaacacagtgctagcagctggctagcttttcaggggctctgctttagactgggtgctgggccagagtctccagctgagaccctggggagggagggaaggatgcagagtcccgggcccttaggccattgtcagcctcctgggaggcccccgaagtgctttaggcagagggtgaccctatctgagtcacaccaaggtgaatttggtgacttctgtgggagtcagacaagtagagttccagtcctcgcagagcttggagctggcactgtgtgacgggcgagcgggttaactaggtaagcagggtggccagaagagacaggtgggtgttccaggccctgtggcagcaggaggtggtgggtccaggagctcaaagaaggtggtgtacttggagagtggggtgggggtcaggggtcaggtgaccaggaggagtggggacctgtgctggtggagagtctgtgccagccacgttggactcagggccacaccggccatcagtatgacataggtctctccctctggtctgtgcgacctcaggagggcagtgcctggcaagcactctcttcttctttgcctggttctgtgcctgtggcgctcccaaccgacaccctcggtgtccatgggctcctgccacgtggatgagaactcgaggtgcctgcggcctttccccagggctgtcactgtgccctctgcatgccgccttggggaacgcagtctcatggtgagactgcaggccgtgctgggcaggcggagcccacaggtgtgtgtcaccagggctgcccggtcctcagggcccgccttagtgatgctggccccggtgggtcttcctgactcctgcatctgctgccgctggttctgccctccctgggtctgtctggaaagcccagctgtggcaggcgctgttcacaaaaagaagaaatgccctttgcccttgccccgcccgccgcagcctccaacacagtgatgtgtgctcattggcctctccccaagtggctcttacacggctctagtgacttcttgaaactgcatcttcacccttgtttcttaaacaaaactctctatttgatatcagcatgagtctgagattcttccattcccgaatccagagaggaacttcgtccttccagaagagatcattcaggaggtccgagaaggtgaggctcgggaaaggttgggcttgggattcagaaaaggccagaccctggccaagggcagggaggtgagggtgaggaccccgggcctccagggaggtgtgagggtccagcgcagaccccgccctacctgtgcttgggtggtcttggaacctccgggattggagaggactttgtttgagagcagtggctggacggaagctgaggcctgtgtgggcagcaagcgtcggagcagtccctggcctgaccatcccccagcgtcggccaccaccgtgggttttcggtgagcgtcagctgtctcctccacaggaaaagtgatgatagaagaggagatgaaagaggagatgaaggaagacgtggacccccacaatggggctgacgatggtgagtgtggagctcaccctgccctgatgccctttggggctcagcaccccaagactgccttcaggcagggcacagtcaggtgggcgtagagcctgcggtgcagaggccccaggcaggtcatctaggcacaggatggatcctgcagtgccccctccccaggagctgagtgcctgctccatgttgtaggccagggtctgagcggcggtccctgcagtgcccgccgcaggcaggtcctcaggaggaccaggcccctctgtgggcccaaatgcaaggggctcccagctcaggaggaagctttgggttcagagggtcacgtgtcagtatgcagatttttttaactgaacaggaagacaaaaataagattctggatattctgttttcagccaagtgatttttcgtttctcagttttttcatcttcagggagtttggggaaagcatcagaaaaatccagcaaagacaaagagaagaactcctcagacttggggtgcaaagaaggcgcagacaagcggaagcgcagccgggtcaccgacaaagtcctgaccgcaaacagcaacccttccagtcccagtgctgccaagcggcgccgcacgtagaccctcagccctggtggcggcagagaagcgggcgaggcactgtggtcgctgagggggttggctgggtctgagtgccaccccccaggccacagtgataccatcccagtgccatgagcccacactgcccgccctcaggctctcaggtgaacgtggccgtcagcggggaaacgtgtgtgtcagttggaccatgtgggaccctgatggacctgaaagaccaggatcggtccagctcagatattgagggctctgaagcctagttctgtcttctctggagcagctgtggcttccccgtggctgcttggtgacatggattagcgctacgtgggctgcagcatttgggatccaggctacctagaggggcatcgggccagggaaaacctcggattagcaagcaataaaaacatgacctcactcttcctcaaaggagcccctggtcttccctgtgtgactcagttctttccatctgtttgtcccgctgcaagcctctttctgcgctgactgtgacattggaacgtggccttcctgtcaccccctccgtgccacgcactgaaggccacccccacccacctgggaaactaagaactggatattttgcctcattcacttgtactgtaacaatgtatataatttggttggtatttcactatttaatttttaagaagcctattttactagtgttttatatgaacaaagtactgcagaagttaaacctgtgttgtattttttctgagatgttttgctttaagagatactttttgctcagtttttatatgccagatacagagaatttgtagcggttatttttgtatgatctagtaacttgcaaacagaccaaatggatgagaggcggggaccgtgcagctgtcggctgatgaggaggcggccgccccagtgctgatggagatgccactttcgtgtgactgcgaacattaaagcacaaaaaaatccaacctggagttgtgtgattttgataccaaagtaagttcacttttcctccaaaaggaagtttttatttttccaagatttataactaaagcatacacttagatgacttattaacattcacttgatacaacatataaacaaaatagtaacagattctgagtggttattttgtggactgtgacaagcacttcaaatacaaaatgttaggagggcaaaacggtgcgggccctcgtaggtcaggcaggcaccagtgggctccttcctgctgaaagctgcggctgtgagatgagaccgctggctgggtcacagagtgaaatccagcgttccgtgtgcggacgaggagacaagctgtcctggccagccatcgcaccccaatgtcttcagcttgacgttgcttctctgccagtggagcctcctccaccacctgggaacatccctggccatctgtccctgaagtcctcctcaccatgacgcagatcacaaggcacccactaaaggggcaaagccaggaatcccgtgccatgtgatcgccccgtgtggcacctgccactcgtctgcaccaaacgcactgccagttctggggaagaacagcccagggaagctgctggtctacggcctgcctgagctgtattccaagggtagagcagctgcctggggggaccctgtgggtcccttttctatagagccgggacaaatccacagccctgcagtaacagcctgccacaaagagcaggcatctggagggccccacacacatagaccaaaggactgagcccgcctggcattcctccactcacagcacaaatactcagccctgcagccagggaagggtggggtctccctttgctgcccaagtgtgcccccttgcccgtctgatctctcctgttaggtcagcctcattcagggctttgtgccaggtcctgtcctggagtctcagtccgggacagcagcctggctcttaggcagtccagaagcagcagggcaaaggggggcaaatactaacacggggtgtcacgggatggccaggaggagtcctgctcgccacccaggctcactgtcctaaacctccatctgaaaccgcatctcgggtgacctcagattgtgctaggaaagcctagttaataaatctgcctcatctcgattactgtaacattttgctgcacttccaggagaaagctagagcccacaggttaagcccactgggcaggtgagcagcgtgcccccgccccgggcctcccttctggaccagaggctgactggttgaagtcaggagccacgcagcccttatggactcacaggggcttctgggcttccctgtggggaggcccagttcatgctctgctggcaggtgggatgaccaggtcaaattcacaagtgtcagggcaagggcgatgtggcctcaagtcctggtaagcgctgtacttaccctctcctggccccaggggtcctgtctgtaacctgggggctttatgtaatgcacactccaccatgtcatgtagaaggtgccgactgaaccccaatctgaaaaggaaaacagctggcatgaggctggcccgtgcacggacgctcacgcgcctgctgctgtagaggcgagacgtggtacactgtgcactcgggacaagatctgaacgggtcagaagccgccgctgatgttgagcctggaagcctcagcagcggctctacacctggaacacgcagggcccaagagcacctgctgccgcagagacattttctctatggctggcagctgcgggtggggactcagtgaaggctgagagtgggagtgatctgaactcccccgcctgcccacccagggcgacccaggggtgactgggaaaggcaattgggctccactgctccccaaatagcagcgaataaatactgagcggcagggcactggcagcgaggctccctgcttggctggttgattgaggacagggcatgcttgggccaaatcaggaggctgccactggtcttgcctggagaagatatgaaggctgtaatccaagctcccagccacacaaaattctgctgggctccttagctgtgagcattgcctgctccaggcacatcacccactgcgtgtgcagagaccattgcccttcctgggtgcctgggagctgtgtgtgtgtgtgtgtgtgtgtgtgtgtgtgtgtgtgtgtgtgtgtgagtatgtgacagagaaagagagcccctttccccagcctcaacagcaaacccttctggaatgccgtgccacacggggcgtcactggactgcagaggatgctctgaagaagcaattctgttgcacagtcccctgcagcagctcctgcacttcttggattagcacgcccccgagatgagctctgcacacacacacacacacacacaacacaaaagcaactaaagaagcaatttggtgtggtgatatttgtaaaacagaagttgggcaatgtctctaatactctttttagggaagtggttctatagtcctgccgacagtaggtagcagcgggaatgctgtccccgtagaacaatgttgtcagcacccagtatgcttgtctttctgttttctggggcagtggagggggcagcctgaccacccaagtctcagatcacccaaaccctatacaaccacccagcacccatcaatgtccccatcagagccccccgactccacctcacagtctattctgatgctgcaaccagatcccacctgtaaatcatctaacaaggaggtcaggcagctcactcaggctccctgggaaacctgccctggccactgcactaagttgatttacagaaatgtccagcgccccagaacttcggggcatcaccactgtcgtttcaagaaagtgtgatgcatgtccacaggttccagccaggtgagactgcacctgctaacagtggtcaacaggtcagcaaagattagggcccagcacccagagggtccttaacctgtacttgtggccaggattggaagacttgcgttcacggctgtccctggcacacagtacaaggaatgtcaccagttcccaggcccagcaggcctgcagggctaggagatggcagtgtcccctaggggctgggctggggccttctccacctttccaccaccatcattacagggacaactctgcgaggagctatcctcatggccaagtccaaaatccagatttagttttacctaaatgttttgaaatgaattggtatagcagttacagaagaaatttatctggagtggccactcctgatttttatttcaagaggtcaccaaccttgccatgtatctgccagcagatgtcaaaggtggatgagcaagggacccgcggtgctgggaaatggcaggtgaaagtgactttgtgttgccccatatctgccagtgcttagagagagggccctgaggaggcgctgaactggcatcagctgtgttgaacagtccccagggtgaccctcccggtggcccaggcttcgtgtggtcctctcccctaagtgccttcttacaactgagagatggcggcaaaggtgaaggaagccacggcttgcccatgtcatcctggttatataagactcggcaccctagagagaaagactcccctggtggctttgaaaagaaaacggccgtgctttgcactgcctatggagggacaggggtccgccagcagcttccaggagctgagtaaggcccccagcccgcagcagaaggacagagacccctacacacccagcttagggagagaggcccctgtggacacgtggcccctccgggggttatcctccaagggacattcttctgatggggacatcctctggggggatttctcttgggggacagaaatattcctggaagaggggattctctgcggggcaggcatcctccggggagagaatcctgctgggaggacatcgtcgggaagacatccttcctaggtacccggctcatcttccggggagaccgtcctctggggggcgggcaggctttggggacattttcgggagggaggatctcctagggcgggcatccttgcgagacggggtggggcgaatcctcccgggtgggcatcgtggggtgggggtgggcgttccgcgaggggcatcctcccgggcggacgttgggggattctcgggggagggaggggcgcggggcgggcgtcccggggagggaggggcgttgcgcgcggacgcgggcggggcctgggccgctccgtcccctccccccgcccgccccccgcgcttcctctgctttcggtttcgcttccgcctccagcgcgagccccgccgccgccgagcatggacgaccccgactgcgactccacctgggaggaggacgaggaggatgcggaggacgcggaggacgaggactgcgaggacggcgaggccgccggcgcgagggacgcggacgcaggggacgaggacgaggagtcggaggagccgcgggcggcgcggcccagctcgttccaggtgcggccccgcggcgcggaagaggcctggggtccccggcgccccccgcccggctgcgtggacgggagacccccccatcccgggcggagacacctggagcctcctggagctcccgcagccccggggacccccccccagaccggccgacccccagccccagggcccggcggggaagtgcgggggccgcgcgtgggtgacagcggagctgagcctcccgggccccatcgtgtgtgggcgccgttccccccgggggtgcctcgggcgcgtcccgcccccagccgccgtggccgcccctgatggaacccctcccgcctcgggcccgcgcctcggcctcctggcggcccctgcgcaggccccgcggcctggggctggggctggggctggggctggggctggggcccgggccgggtctggcctgggaggcttcgcgtctgcacctgcgggagcccggggcgggccgacggggcctccgcttgttacttttgttaccgccgggcgcctgtcatcgccggggttacttttgttgccgcgctgggaacgccacactgtcgcagtccggcccccctgtcggggagctgggattgatctgggagcggccttccagctgagctgcccgggttgcggagggccgggaagtgcatggaactcgacggctccgcatggattctccccttggcacccagcactgtttgcgtttgcgcctggccatggtggagcgggcagtgagagagcacggaggggctccgccctgtcgccgggagggcagcggccaggcaggctgggcaggggggtggggtctggctctgtcccacaggacggtgtgacccctgggtgggctcttgacgggctttcctcactggagttcctcaggccgctctcctgaagcggtgctcagaggccctgaccatcctgccaggcgcccgtgacccctgacctcttccctctgcctcctgctgtggcttctgtccacaagcccctccccttcccctttggacccctcaggcctccccagctgcctgcgctggaccctggcggggctgtttcactttttcctgggcagtgtcatgtatgcacctgtgggctgactgtgtggccacatccagtcaggacccagcctccagaactgacccagggaggctcccgctggccccaggaaggagaagtagaaactgatgatcaggcggggcgagagaaccacaccagcggccctgttgagaaatcaggccgagaggtcggtggcggtggctcaggcctgtaatcccagcactttcggaggcctgggcagtcggatcaccagaggtcaggagtccaagattagcctggccaacatggtgaaactgttgtctctactaaaaatacaacattagccaggcgtgatgggcacctgtaatcccagttcctccagagattgaagcaggagaatcgcttaaacctgggaggtggaggttgcagtgagtggagattgcctgggaggtggaggttgcagtgagtggagattgcctgggaggtggagattgcatgaagctccatctcgaggggaaaaaaataagaaagaaaaatcaggcagagaggcaacgccaggtcccagctggagctcagcggggagccaggggatacagtggctgaccgggcctcctaaccccccttctagcactcccccaggatcctgggtcccaattgttgccctggacaaatacgcccattcctgccctacccaccgagtgaggctcagccccaggccccccaccctcatcacaaggtcagggctgtgtcccaccatcctcatcactaggtacttccggccctttgctcagccccatgatgcttggcctgcagagatgggggctgaagggcttggggcatcaaggggacctgacatcttgctgagaagccatcactagacagggctggaggctggagactcagggcctgccctcaccgtggccagtgaggcgtggggttgggcagggaaggggcattcattcattagaccctgccagaagcacctgggtccccttctggggctacaggtggtgaggccactgcccccaagaacacagcctggtgactttagtgtacaaagcagggggagtctccaggggcacagaacagaggctaaagccagggtggaggtggccagcaggcctaggaggaggagagggtcagggccacaccccaggggaggtgcatgtcagccaggggccaccctaaggtggaagccaggagtcccaaaggggcctagagaaggagcagccccccacctggctaccgcagccctctctggttctgtgcagggtattgggatgcgttactgaggcccaaatctgccccactgggaacccccaaaaaagagccagggcaggagaatgagagggaggagccatgaaacccccgccctttaaagacagctctgtggcagctggcccaggccctgcagccctcaccacgttgggactcacttgggggtctcccatgggggtcctaatcccatctcttttcttcccagtccagaatgacagggtccagaaactggcgagccacgagggacatgtgtaggtatcggcacaactatccggtacgtacctgcccctgccccgggacacagaaccctcccgccagctgctcttctcaggcagaatgtcccaggttctactggaaggctggcctggcttgctgtgccagggccacagttctgggcaggaccctgcctggggcacagcctggtatagattcagagccctgcccttcccctctcgcgggagaccgggggcatccccctacttttctgagcttcagcacaccgtcgccttgcaaacatggccatagtgccagcctcgtgatgcacacgtgtggggtccgtgataccgcccacacagcaccccacccccatgccagccctgtctcctgcaggttgtcctcagccattaccctccacacccctgaatcacggaaacccctgtgctgccttcagggtgctgaggaggggacctgccaggcctggcctggctggcgaaatggggaaggggggtccctggggcttggaggcagctgctgtcctctgaatggcccccacctgcagagtgaggagccaggcgggctcttggggtattgggccagcctggaggtttgcagatgcgcctccccgaaagacacggagggccccagggcagcttgtgtctgatggatccctgctgtcccctttctctggctcttcaggatctggtggaacgagactgcaatggggacacgccaaacctgagtttctacagaaatgagatccgcttcctgcccaacggtaggtgcctcacaaccactggcagccggcgcttccatccttgcctggcaggggtggtccactgggccctggtttgggatgtacccggcgattaccagggccacggctttcaaatagccccacagtgccccctggaggcggccagagggactccaggatccccggcttgggatctccgcagtggtgtttgggtcggggtgggctatctctgtaaagagccagagactgaatatctgcagcttttcaggccacacagtctctatcaaaactactgaactcctgcacgacctcatgaaagccacatgtaaaccaacgagctaaggatagcttttatatttttaaatggttgcaaaaaattaaagtagaggccgggcctggtggctcacgcttgtaatcccagcactttgggaggccaaggcgggtggatcacaaagtcatgagttcgagaccagcctggccaatatggtgaaaccctgtctctactaaaaatacaaaaaaaattagccaggtgtggtagcgtgcgcctgtagtcccagctactcaggaggctgaggcaggagaatcgcttgaacttgggaggtggaggttgcagtgagccgagatctcgccactgccctccagcctgggcaacagaatgagactctgtctcaaaaaaaaaaaaaaaaaaaaaaaaaaaaagaacagtgttctattactttgatattataagaaattaaaatttcagtgtcaataaagcttcacgggcacgtgcccacacctgtttatgcacgtgccgggctgcaacgtgaaacagagactgggtggctgcacaaaacactgtcaggcccccatctcaggagactgtgcctgccacatcatgggactgggttcagctgggggctgtgtttgaggacagatttctgtggctgacgggccacgcttttgcaggaggcactgaggccccctcctgtacagacaggtcctggtcgaggaccagtggttcccccagagggaccttccgggctctcagtggggtttgccgccagccagcaacaagggtccaggtcacagatggcagcagggcaagggctgtgcatcggaggagggatgggcagccccactgagcctagcaccctgaagagcctcaggagatgagggcgaggaatagcttggggaagctgctggcagcactctctccttatgtcccccacccacaccccgtcctcctgagcacgggcagggtggctgccacagctgacttgtccccatggggctcccaggctgtttcattgaggacattcttcagaactggacggacaactatgacctccttgaggacaatcactcctacatccagtggtgagttggggaggatggggggatggggggttggcgaggccacagggggagggccctcccaggcaggagccctcccgacgctgcttcctggcacggactgagcactccctgcccttcctggaagctggtgtccacattacacggatggacattactggacatgcaagggccgctgagggaaggctcaggtctgtccccaatctgtgggctcttggtgaccagggagacaggaagggctgcacacaagctccctgaaacaggagagggggcaggcactgcctgccagaggggcagccttagtgccaggaggcctcagtgagcctcaaggggcggcccccgtctcggactcagctggggcagggtcctggcgtagtgctgggatgagacttgtggcaggcgtcttggggacccacaatgtggccccggaaacagcatgccctgctttggggacagctcgctgggcgtccacagggagcctctgctggtgtgtgacgtgtcatgagtgacaacacaagagagggaagagtgaggagtagaaaggaaggccctgtccgcccgggctggatggctgcagggcccctcgctgcctgagtcacctccccagtcctgctgagcatgcaggctgtgacttacgcaccacacacctcctgtcctgggcccttgcacgctcacctgagctctcccaccctcgctcctccacctagccactccctcctagagttgagcctgggaacccagaggggattggaactgccccgggctacacagcgagcacctgcccaaggtctggaagcggctctcctaatcccttgcctgagcatctcttctcctgcaggctgtttcctctgcgagaaccaggagtgaactggcatgccaagcccctcacgctcagggaggtcgaggtgagccaggccttggctgtgactggaggggaagatggggaggcctgggcaagccacgccgctgcagagacggggtcgcctctggcagtaggcatttggtgccccctcaggggtcccttggaaggcagaagggccgaaagagcctccagtatgatgaccttccctccccagtggtcctcaccccaccaggcatctagagaaactcaatttccgaggctgtttgtccccatgcgggagtctggggctgagcccctgagagacccggagtggcgggacctgcctttctcaccactggtttaggctggagtggggtcacccaagtgtggaagctgcccctgagggatgcagggacttagagagccgaggggcccctcctggcactttcccatggccagcgacttcctctcaggggagggcggcagcctcaggccctggtgagagctcggagcagctcagaggagagatggaggcatgagtgtgtctcttgtcactttaccctaaaagtctgagtccaggctaggtgccgtggctcacgtttgtaatcccagcactttgagaggctgaggcgggtggatcacctgaggtcaggagtttgagaccagcctggccaacgtgacaaaaccccgtttctactaaaaatagaaaaaaattagccaggtgtggtggcaggcaactgtaatcccagctactcgggaggcagaggttgcagtgacttgaggtcacaccattgcactccagcctgggcaacagagcaagactctgtctctaaataaatgtctgtctgtctgtctgtctagtccaggcctctgagtgagtcgggacccacggccacccccacactcaggaaccggggcttcagggatggtgcctgagctctccaagggggtcttttccaggtgtttaaaagctcccaggagatccaggagcggcttgtccgggcctacgagctcatgctgggcttctacgggatccggctggaggaccgaggcacgggcacggtgggccgagcacagaactaccagaagcgcttccagaacctgaactggtgaggcccggctgctcccgcccacccccaccccggcgcagaacagggccacgtcaggtttcgggcaggtcacagagcgctgctgcagacggagaactccagggctgtttgggcaatggaccaaggccctgagtcccctccttgctgcctgtagagccgggcggtccctccccgatagggttggtgagaaggtaaagaatgctcttcctgcacccaggaggtggcagtccacatagagaagcaagcaggggtgatggagaacctgcaggcggtacagccagttctcacagggtgttcgaggcgcctgtaccctgcaggggccccttgtggctctcatccagccagctcctccccaccagggggactcggggtacagccaccctctaggtgatgcgtcagcatccccctaacccccgtgtgtctagggcccacaggccattttcacagggatggcatgagtcctcccctgggcccagagaggtaaatggagagagagactgaatcgtgggccagggtggggagacctcgtggagccgggtgggagggcaggccagggcggggtgcggcccagcaggaggggccccagccattgacctctcctgacccggatctctcgcaggcgcagccacaacaacctccgcatcacacgcatcctcaagtcgctgggtgagctgggcctcgagcacttccaggcgccgctggtccgcttcttcctggaggagacgctggtgcggcgggagctgccgggggtgcggcagagtgccctggactacttcatgttcgccgtgcgctgccgacaccagcgccgccagctggtgcacttcgcctgggagcacttccggccccgctgcaagttcgtctgggggccccaagacaagctgcggaggttcaagcccagctctctgccccatccgctcgagggctccaggaaggtggaggaggaaggaagccccggggaccccgaccacgaggccagcacccagggtcggacctgtgggccagagcatagcaagggtgggggcagggtggacgaggggccccagccacggagcgtggagccccaggatgcgggacccctggagaggagccagggggatgaggcagggggccacggggaagataggccggagcccttaagccccaaagagagcaagaagaggaagctggagctgagccggcgggagcagccgcccacagagccaggccctcagagtgcctcagaggtggagaagatcgctctgaatttggaggggtgtgccctcagccagggcagcctcaggacggggacccaggaagtgggcggtcaggaccctggggaggcagtgcagccctgccgccaacccctgggagccagggtggccgacaaggtgaggaagcggaggaaggtggatgagggtgctggggacagtgctgcggtggccagtggtggtgcccagaccttggcccttgccgggtcccctgccccatcggggcaccccaaggctggacacagtgagaacggggttgaggaggacacagaaggtcgaacggggcccaaagaaggtacccctgggagcccatcggagaccccaggccccagcccagcaggacctgcaggggacgagccagccgagagcccatcggagaccccaggcccccgcccagcaggacctgcaggggacgagccagccgagagcccatcggagaccccaggcccccgcccggcaggacctgcaggggacgagccagccgagagcccatcggagaccccaggccccagcccggcaggacctacaagggatgagccagccgagagcccatcggagaccccaggcccccgcccggcaggacctgcaggggacgagccagccgagagcccatcggagaccccaggcccccgcccggcaggacctgcaggggacgagccagccgagagcccatcggagaccccaggccccagcccggcaggacctacaagggatgagccagccaaggcgggggaggcagcagagttgcaggacgcagaggtggagtcttctgccaagtctgggaagccttaaggaaaggagtgcccgtcggcgtcttggtcctcctgtccctgctgcaggggctggggcctccggagctgctgcgggctcccctcaggctctgcttcgtgacccgtgacccatgacccacagtgctggcctcctgtggggccactatagcagccaccagaagccgcgaggccctcagggaagcccaaggcctgcagaagcctcctggcctggctgtgtcttccccacccagctctcccctgcgcccctgtctttgtaaattgacccttctggagtggggggcggcgggcagggctgcttttcttagtctgataccaagcaaggccttttctgaataaattcatttgactttgagtctttggtatggaccggggtcctgttgggtggctggtagggctggtgtcacagctgatgtccctccaggctccagtggcctggcccggcgaccgcctcacattgctccaccaggtgcctgtgggggcagagtggtggcccagccctccccacacacccacttggccacacagtccccaggcatgaacaggtgggcaggctgcagcctcccagagcctctgaaggtggaaccgaggtccctcagcaggcttttgccacctgttcaagatgagtctggggcttcccttggggttggccggggcagtgcttgtgcatggtggggtctggaccaggcctttctgcctgctgtgatctgggatgcgctgctgtgcctcgggcaggcttggcagtactctctggcgggccccttggctccctcaggtctggtggagccaggtgtgcccccagggcagtccctccctgcagtctgcccttgtcaccctgggccaggaccccccgcttcccggttcccctacatttctacatcagcagggtaaggggctttttgtggggcctcagaggaggggccggacacttgtctttgctcagtgaaggacagggcagacctggggcacccctgggtgggagggttaaagctgtagaccctggtaccacttcaggtaaaatgcccagctcccatctggtggcacaggatacacgagccggaagtcactgggaggagacacccgaggttcaataatcccccagagctgcgtggggaagctgtgggacccctggtgcctcaagtgtggctcaggggattcctgccatggagggaaactgaggcagtgagctggacatagggctagaagtgcagtcactggggcagcgcccggcagatccagcgtccccagtccaggccgttgtggggctggagtcggtgaaaatcagcgcctgaagtgaggagcctgttggagcagccctgggggccgatgcctggcggtgggcacctggggacagcaggcagtgctggccagccaacccgggcttcagggagagtgatgacccacaacaggcgggcagcaggaggctctgccccactcaaaagtgagccgggggaggctgagctctgacagtgcccaccctctgcctaggatctgcctggagctgggggtggttttttgaggggcttgaaggtggttcgggggggacaccaagcaggtgtcccaggcatgaggtggctcccctggcctgaggtgaaggccagctgtgttttgtctgatttgggtcagatagcagtccttgctgactgcatgctgggcatcatggggataggcaaagtggggtgtggggccagggaccaggggagagccactgaggagggggctggccacagggtcatcttgccaggtggaactggtagggaggacttatcctgtcccccagaccctgggcttggggtggggctggtgctgggagcccctaaggccccctgctgtctgggctgacctgctccacccacctctccccgtaatcaaaagtcctctgttaggaagctctgtgccaggatgacttggactcctcaggagggtgggccttttcagctcctcccacctcgcctgatggaattcgcacacacccctcccagcccagccaccgcgctcacccagcagtgaagggagaatctccctccactcacttcaccgcgggagagattagagcgacactattattttgagacagggtctcactctcttgcccaggcaggagtgcagtggcgccgtcttggctcactgcagccccgaccttacaggctcaagcgatcctcttgcctcagcctcccgtgtagcgtggactacaggcgagcaccaccatgcccagccgatgttttaatttttggtagacatgaggcctccctctgtctccaagctggccacgcccggccgatgtttcaatttttggtagagatgaggcctccctctgtcgccaggctgactgcgcccggccagagtgcggtgctcctgctgagcagttttgcgcccactcccctctcatcccctcccgcccttgctaactcacagcattgcaacagtcatgagtccccacctgccgaaaggaagctcctgcagccccctacaacccccagggcagcctttctcgggaattttcaagattcctgggggaggggctggcatctgcgccttcactgagcctacaggcaactggaagctttgagtcccctagggcagcgactgccctggcagcctgaggcagagcttggccggacctggcgacccctgagcttctgggaaatggacatggccagcaccgccttcaggttcctgcccagggcacggttccttcaggccggggatcccggggaggggttcttcccctcggccagggtcatcgttttgcgatctctcctgggagtctgggtttggagtctggtcttagccggtagcaactgacgtggcctgaccacccggcccgtccaggtccacgggtgaggggccgcggtgggggtgctcccagcccagcaggcagcgctggacagtgaccccggagcgggaaccagggctgcgctgggcactgaccgggccctggtaccggggattcaccctccccggggtgttcctgggccttgggtcgcctgggtccgctccggcgcctggggaggggtctgcggcttcggaaactcgcgggtctcccctgcccctccctgaaggcggcccttcagcgccgcgcgcttccgcccccacactcgggttgaggagcaaggagagaaaagagcgtctttctctcttgctcaaagctgcgtgtgtgcaacgcgccagtcccaggataattttaactcgcggccggagagaacgcgccgcccgcccggcgtcttttttgttttcgcccaggcgggctgggcggcggcgcggggcgggtggaagcccccccgcccaggtgggcccggctgaatggggggcttgtgcaggcgggggcgggaaggggaaggggaaggggccgcccacctcccgccccgcccgcccgcgcgccgcccgccccgacgccgcagctcagactccgctcagccatggccgggccgcgcgcgtgcgccccgctcctgctcctgctcctgctcggggagcttctggcggccgccggggcgcaggtgagcgcgagctccgggctctgaggctggacgtggagccgcgaccgccccagccccgaacccgccactccggggtgcccggcgcagcctcgacgcccccagcccgtgtcgccgtcggggcgcggagtcgccagcgcctcgggatgagccccgtccggccgcgtcctcgatgggtcctcgctggcccgggtcggccggcgccgccgcctcctctgggagcacaagggggcctttgttcccgccgccggagggaggcgggggacacactgcgcgggggcgccgggctccgcccgaggctttgggtctcaccgaggagagcggcggtcgtcgcaggccccggagccgctcgggacccgggaggaggggacgccgggtcaggcccacgggggcacctgcgctccttaatgagttttctccgtttcagagagtgggactccccggcccccccggccccccagggccgcccgggaagcccggccaggacggcattgacgtgagtttgggggtggggagggccccgagcgctctggggttctggctctggcccccacctccctgagctccccggcctgatggagagaaaaccaggccccacctcccagagccggggtgacatcaggggacagccagtgccttcacgggatgggggtggccctgcggggactgctggtgggtaggggtggagggtgtcatgtggtggtcctccacccagaatgccggcactgaggtgtgtgtctctgggtcccctgaggggcccgtgcccctgtgttcggggttctggcctctggctgaagtggggagaggcacgtcctttgggtggttgggggccgggggtcttgttggaggctgctgggctctggagccagccatggagggggcttaggagccgactcagtcctgagatgatgtcccctatgggtatctcaggactggtgtgggccaagcagcaggaggaggcggctgaaattctacaattgtgcctccctcggagggaccgtctggggtgaacctccccatgtgaccaccaccagggcaggagtcccctcagggcctgtccacgctgtgtggtccccgtggagggctgtggagggctgcaccaagagccccccatgacccaccctctgcccccctgcccagctcggcctcaatggccacagcctccttccagtctgtccagttcacccctttgcccagtgctgccccacacatgggagggtgccctctaggtagggatcgggggctcaggggccccttttgtctgctggggctgggcctctggggctgatttggaggccagcgctgctcttttccccgaggcggggttcttgagggacccctgattttcagggttacatgtgggtgtctttcctcacagggagaagctggtcctccaggtctgcctgggcccccggtgagtgtccctggctggggagacagcctttttccagtctggagagaaagggggaactcagaacagaggggtcattgatatcctgtctcatcctgccggagcccgggttgcctgaggggaggcctcagagggcttggagcaggcctggagccagcggggcgggaggggagtgtgtgggctcagcctctgcatgttcagggcagggcctggctttgaagctttctttggaccagcgccaggcaggccgggaccggggctggtacagcccttcaggtcccccaggcctgaggtcacctggagccctcccaccttcttcagttccaggggttgagggtcctggggctcagagccctgtctgggcccactgggggtccgacagagatgcctgctggcccttagccagggaggccgaggtgaccagacgaaggtcttacagatgccactgagggatggggcgggcagccttcctgggccagcaaggtgtgggcaagcaggacacacgtgccccagctgagccgggtctgccagacagtaggggggacccaggagaggggcccatcccgtatggttgggctggggggaagtggaaagcattttgcttcattgctgaaggcctgggctccaggccagaccccgccttcacatctctgccctttcctcctgcacagggaccaaagggggccccaggaaagccggggaaaccaggagaggctgggctgccgggactgccgggtgtggatgtgagtgcgcctgcccctccccgccatgccccactccccgctccgggtccctggaggagtccggccctaattgctgttgtccagctgggcctgctcaggcgggaagcccagtcctgagagaagtctccagaagtccccaacaggggtcctttggccttcatcccagacgccaccagcatctggcaggggacagagccagcccagtggagtcggaagtcccgccagccctccttgcttgtccaggaatgagtgcccattgtcaggaccttctgcccactgctggcctcacttagtcatcttgggctccaggcctggccccagggccacggagttttgttcggaggaagccgggcctgagaagtgagctgtccagtcctgctgggttggtccccgaggcctgactacagcaggtgcctccgttgctggcttcccgctggctgccccctccctcctcccagagcctctggctacagcaggcagacagtggacagggccaagagaggaggctgccaccctaagggtcttctatgcctctctggactcaccaagggaagggtccgtgcttccatttttgcctggggggtggcatgtgcttcccatgtggcccctcgagctcgccctctgcctctccccagggtctgactggacgagatggaccccctggacccaagggtgcccctggggaacgggtaagtgcctgcgccgaacccagtggcttgggttcagaggtgaggtcccctggccacctctggctgctctgtgtccacaaggccaaggagctggtagttccaaggacagctgccctgcccgtgcctggggtggaggggcagaagggcagggtgccaagtggccagtcccctgtgcctgcctccctgcctcacctccacgtatggtcagagttgtcctggtatccagaccatggcagggagaagggggatggtttgggggaacccaccccaggtgcctcctcagaatgtccctgaagcccccagggccctgggcagaccaccaccagggacccccgggcacgcagcctgcagagtcccctgtgcctgcctgttggacactgaatcctttaccctgacggagcggcaccaccacccaagggtgcctttctccccttgtggcttctgagtacaaacccgaagccagcattctctctttggcttcataagacgtggctgtcagccaaccgggtgccactggccccaggcgcaaagcatcacagagggcaggaaggctgggctggggacacgaggacacagccctgcccttgggacccttgggagctcgtcaggcatgaggcggattctgagctgaaaacaggagggaaacagtagctgctggcagccgagtccgtggtgcccaggggtgtggggtgggctggtccccaggctttcaggaggggcctccagcctcagcacagggcccgtgcgtgccgtccagggaatgaggcatttcaggcagcaggggccagacagggcccagagggtgtggagggcagacagggcctggctgcccaaggctctggggctcgctgacgtgggcgggggctgaggactcagcaggctccgtgggtgggttatcgggagggcttcctggtggagacaggcaccccgggtcacttcggtgcctctcagccctgcctcaggttgcaccttcttgcagcgagcgctgggactctggtgccatctgtctccagcagctccccaggacggcaaagaccctccaggtcaagagggctcagaggccctgcccctctgtgaagtggggacttggaccctgttgtcctgggagttggagttgtgacgtcacacttcagagggaggggattgggtttgcaaatagaggcccagcccaacctagacgcctgctttcctcccacagggaagtctgggacccccggggccgcccgggctgggggtgagtatggagtgtggtcctctcctctccatgggagtttggggagctggagagtctggtctaaatggggtggcctccaggaatcccagggaccatccctggccctctcatctgcagcctctccggaggctggtgcctggatggggtcctggtgccctctctgggctgggaccagacacccatccctggaaccgccctttccccaggacccacctgagccatcttagggaggggtgaggcgcagcccttcttgtgcctggcaggctctgaccccatgtttggctttgcagggcaaaggcctccctggaccccccgtgagtactgacaacccttggggccctgagcaagcacgcaagtcccgagagcctgccaggctgggatgtcccaaaccgtgcctgggggtggggcttctcaggggcagccatctgaccaccccatacttggagcccctctcccttcggaggcggcacaccaaccctgggtggggatcctcggggcttccgggtgcagacctccccacctctctttacttccctccagggagaggcaggagtgagcggccccccaggtgggatcggcctccgcggccccccggtgagtggctgtcccagagcccctcagagtgtgctcacctgtggcctccacccccagactcaacagccaggggctcccttcccctctcccttttccctttctcccccaaccccaccttggtgggtgttggtagaagccctggccaatgatccagacccgacctcaggacgcagacaccagcacagtccgtgggagtgggggctggtgggagctgggcgtgtccacctccctgggagaagccgggcacctcactcaggtgggggctggtcccactctgtctaagtcataccccctccccagggaccttctggactccccggcctccctggtcccccaggacctcccggaccccctgtaagtactgggcagaggctctaagaagtgctgggcatggactaggacactgggttggaccctccccattccccctccccaggctccatgcccctccgagatctcctaaccctaacttggccactcccaggaacagtcaatggtgggggcagtggctgtggctaggccagccaacttggggatggtcaggactcaggtccccatggccatcctgccccaaggacaggtggattctgtcgttgtcacatgccctgtgggtgggccagcagctcccagcactggccacttgggggacaggatgaagggtctccaagtcccctggtggatggggaaggttgtggtccgtcagagagtgggtgggtgggttgggtggctgcaggtggctggggagggcgggagaatgtcagctgtctctttttgtcttagggacacccaggagtcctccctgaaggcgctactgaccttcaggtaggcacttgaagccatttgttaagggtgctggggggtgcctaccttggggggaggggttctggcctggagaggggcttgtccatactggcaagaaggcagggcccgagccctccctggggacaggagctcagagcagacagctcgggcacaacctggcagagaggctggctgggacctccccctcccccttcccaccctcctcaccaccgtctagacctgcactgtccctcatgaagccaccaggcgcatggagctgtacaaatgtaatgaatcacaatcatgtcacagagccatccagctcccctgcgtcatccgcagagggcgcccttggccacagatggcgacagaactggagtctgggacccacctttatcttgatctttgagccttgtcatttgcctgaaaagaaaacaggctcaggtcaggcgcagtggctcaggcctgtaatcccagcactttgggaggcccagacaggaggatcgcttaagctcaggagtttgagaccagcctgggcaacatagtgagatctttgtctctacaaaaaattgttaaagtagccagacgtggtggcgtgcctgttgtcctagctacttggatggctgtggtgggaggatcacttgagcccaggaggcagtggttgcagggtgctgtgatcaagccactgcactccagcgtgagcagccaagctcaagcctgtctcaaaaaaatgaagaggaaagaaaatgggcttcggaggccacggatccatctctcctctctgtttggccgtccgtggtggcagtcagcgccttgtttccatagagaggtttgatagttttgaagggaaaagctcggcccactctgacctgaccaccgacgctgtctaccagcctctctcctcaccccaccccggggcctaggtgcctggccagcctgtgtcccagaagggaggctttagggaaccttccagaatgtggtgcgtggttgggcccccgatcgtgggctgagtggggcaggggctgaagatacgggtctgcacccttggcctggcctgcccattgcagctgtaggatcatctagaagcagccctgggtttcctgagcatcagacctgttgcctgggctcacagtgcccctcctaaaagccccatgccgagcacattcctgtgctgaggatgggcccgacctgaggctgctgcaaggccccctgcagtgccggccgggactgtgctgaatggctgctttgatagccagtgtctgccgtggggccggctgctccatgcagcccctgctgcacttggccagtgctgaaggagaccctgtctgtgtcctgtcccagtgccatcacctgtacggagtggcctcctggggtcccgtcactgtgtggagtggcctcctggggtcccgtcactgtgtggagtggcctcctggggtcctgtcacccagagtgtcccgacacccgcgcggagtggcctcctggggccccgtcacccacgcggagtggcctcctggggtcccgtctctgtgtggagtggcctcctggggtcctgtcacccagagtgtcccgacacccgcgcggagtggcctcccggggccccgtcacccacgtggagtggcctcctggggtcccatcatctgtgcggagtggcctcctggggtcccgtcactgatgcggagtggcctcctggggtcctgtcaccatgaggagtggcctcccggggtcccgtcaccgtgcagagtggcctcctggggtcccgcgggcgctgacccctgcgtcggacgtcctgctctgtttggctgggaggggtctgactgctctgttttccgacagtgcccaagtatctgcccgccaggtcccccagggccccctggaatgccagggttcaaggtgagtcacgggtgactgggacccaagcaccaccctgtgctgggcaggaggcagctgggctcccatggggctgtggaggtggcgggtccagaaagctggaccctggttccagggttgccccaggaagaaagctaggccagcctccttgtcccgccttcagcaccccagtgacacgctgatgtggccaggctgggactggccataggcgtcagagactgcgggggagagctagcctcaagctcccaccccagcccagccctggcccgctcctgaccgcagagcgccctcatgtgggtcctagcgcctctcaggcctcagtttccccatgagggcccagacccgcggtcctgtgcgctgccgtgtggcgggccctgggctgactgaccctgcaggcctcacttcagtgttgccagggagggggtgtcggggggtctgggtggggcagtgaccccacatttgcttgcagggacccactggctacaaaggcgagcagggggaagtcggcaaggacggcgagaaggtgaagctgccgcacagcagctggggaggagctggggactggaggctgggctccggcgggagggaggggctgggctccggcgggagggaggggctgggctccggcgggagggaggggctgggctccggcgggagggaggggctgggctccggcgggagggaggggctgggctccggcggtggggagggaccgtttcatgggtgcacctgcactggcaccttctgtgcctgtcttccagacagggcctggctggtcagagctgggtgatttaggcagggtccctggacagaccccgtcctgcctggcctcgctgtggaagctccctggtttgtgtctgtggccggggcgaggggcatctgtgaggatggctggctttagcctgtagcctcccctcacctgtggtcgctgtccgtggagggtgtctgtccatggtcacctgcaggccgggggaccaggtctgggatgccctttagcgtggctggagtgatcagatgaggagaccccaggtgcacatcagaggggtccctgcttggccacgaggaggggcctggacagggctgaagggccttgtgggaacagtgaccacggaccccggcccggcagggcgaggccaccgagactcgcgggactgctctggaactgtgggcaagtgtccccttcacagagcctccaaggcccagctgtgaagggggcaacacccccagctgcttgggcttgagtagggtgactggaggcaccgaaaggtgcaaggagagccagactgggccgctgaccaccctatcccctctgtttcagggtgaccctggcccccctgggcccgccggcctcccgggcagcgtggggctgcaggtgaggctaggaaggggtaaggatggtgggatgggaactcagcccacagagtgatcaagccctgcacatatctacccccgagggggccagctccggctggggggtgtttggccaacacccaggcacaggagcgcgacctggctgggggtcccacctctgccaaggctgctgacctcaaggctggtgccccctccctctgggggacctgagctgaggctgagggctcatggaagacaccagggctcccaggggtaccccgagggccttggccctgggtgctccccggggtggaggtgcagccccagcctctgcatctgtgcctctctctcgcagggcccccggggattacgaggactgccagggccactcgggccccctggggaccgggtaagtcctgcagcccctagtgggggccggccaggtggctgggggcctggttgtctgcacctccagacttcagatgggccccgtgagtgacactctgaagcagccggcaccctggctctggccatcgccactgtggcgcaggccttgctctgggcccctgttctcgcatgtgcctgggcgagagctgacagtcggcgctcactgatgcccgcacgcggtcccaggctgctgtgagggctattcacgcgtgtgcccgggcgagggctgatgaactctgctcgctgacacccacacacacggtcccaggctgctgtgagggctgttgtggcttaggccagagcaggaggggaagcagggatttggagactactaggtggcatcttgggggaacttgctggggagccctagaggaagggctgcttgtgtctgggccgcccctgagggagcactggggggatgccagccaggcctcagacaagaggaccccggatcccctctctcctctgcagggtcccattgggttccgagggccgcctgggatcccaggagcgcctgggaaagcggtacgtgtgtcagtggacggtgggcgccatgcctcgtgacctctctcccctttccctctgctcctctcagacgcccccagccccactggggcccctcttctgtggctgagctgttccctggacaccctgggagggcttgtggcatgggtacgggggtgcttaccaatggaatccattctttgtgagacattcgcctcctttctggttctggacgtggaatgaggggtcaccatcgtccctctggcacctccagccatctctgaccactcctggagggcccaggcctggaggggcccccatcccactctctgaccactcctggagggctgtcccccgcccgggcctggaggggcccccgtcctactctccgaccaactccatggtgttaactctgtccctgccccacctcatcctttccagggtgaccgaggcgagaggggcccagaagggttccgcggccccaagggtgacctcgtaagtgagagggaagttggttccctgggtccttatgtggaagaacccaatttccctcctgactcgtgctggggagggggacacacttgggagtgagactgcaaggggctgcctgggtgggcctgggggtgcgtgggggtgagcctgaccctggagggcccgagctctctccctggccccagccgttctcccagagccacatgggagctctgtggccccctgcagagcggcccacgagccgggtggagggaccaggctccagggcttggatcctgcccccagagaaaacggctctcgggttgagcaagtgaacataaggaaagtccagaggcagccaagcgttccaggagtggaactgaagtgaccgtccccagactggtcagcctccacacctccctcgactgagccctggcagccggagtgcagggagccgccgtgccgtcctgcagcatctgtggatccaaacacagttttctccacgcacccacaggccccagggtggtggtcgggggtggcccctgccgctgcccaccatagctccttggtgtccccgagcagctggccggagaatgcgtgaggccgtctgggaagagactgccactgcttctgtcacttgtgtgtcctctagggcagacctggtcccaagggaacccccggagtggccgggccaagcggagagccggtgagtgcacgtggctgctcatggaatgctcctcccccgggtcctgggtatgtacaggtggagatggcattcagaagggctggagctcagtgccctctgctgtggccatcttgaaatctgggttaacggtggaacagccccgcagccccacacatttctctcttgcccagagcctcacgagtgtgcaggagtaggggcctcaggctgggtttacctgcacagaggacacgggaagtaagggtgggtgggtagcaccactgggcagaggtgggcactcccagggtcccgggcacccatgcgggcaccttccttcctgctgggtgcccaccctcagcccagacctgagctcccttctagcccctcgtgttgcctctgccccggagtagtgccctgtcttgggacacccagcagttggctgtgtcctgattccaaaaccagtccagggtggacgaggcaggcctggcctaaggcctcagtttccccaccgtaaaatgggccagaaccaaacttccttagggcaccatgatgtgcctggtggacgaggcctcgggcgtcagcactgcatcagcaccgcctctgccacccacccgcacccctcacctgtgcggtcaccgaggcagcactggttgccacacggccaccttggtcatgaaaccagataactgccagggtgtgggggcagacacagttttaggttgatggggaaggaggctgcccccagggcaggactgtagagggagggaggggggccactgcccgacgggccttactcatcccttgtccccagggcatgccgggcaaggacggccagaatggcgtgccaggactcgatggccagaaggttggcatggggctcagggtgtgacgggagggagggggctggaggggagttcggcctcccgaggcctcagcctccccttccgcaccccaatctctgtcctcacagggagaggctggtcgcaacggtgctccgggagagaagggccccaacgggctgccggtgagtgcccggcgggtggggccagcctggggcgccacagcttctgcctgctcagtggcccatgttgggctgggtgggttggtcactgtagggccgactccctgtgaggggttctggggcctgtgtccatcagggcctggcacaacccctggtgcccagtgggtgctgtggacggttgcctgtatgtttgcatgtgtgtgcttattcgtgtgtacatgggacatgtgtgaacatgttgatggccatccctggatgccgtgcggtcatcacccccatgggctctgagtaggggctcctgcatccaaggccagggaggctgtcaaagccgcacctcaggtccacaaggctgggagaagttggccctgcctttgggtgcactcactctggcccctgcaccctgcctgcgtgcacgcccctgggtgctgctgccggcgtgcaatgtaactggcagccctgaccgcaagctctctcctggcagggcctccctggacgagcggggtccaaaggcgagaagggagaacgggtatgtggctgcagccgctttctctctgggaggggaggcgaggggccgggaggcaaggggctggggggccagcgacctggccccagtgcaggtgtaggcaggcactcacagctctccttcctctacagggcagagctggggagctgggtgaggccggcccctctggagagccaggcgtccctgtgagtatctgcggcgccccagacccctccccatccagcctgtgtgcagaccctgccctgacaccctccttcctttccctgtagggagatgctggcatgcctggggagcgcggtgaggctggccaccggggctcagcggtgagtgcagggacatggcccggggtcgggggttagcactgagccattggcacatggccccagtttctgagcaggccggggtggcatttggttgccttgatgggccaggcccacaaaagcctaggatgccaggaggtgtggggccccatcttcttgtccctcacccgctgggagacggtcggggccaggccggagctgccctgttttcaagccttctatgctgagcccagccttgtgcccccatagactgagataatgacagcaccagccacagggccctggtggggggagccaggggcatgggtgcctggccccgagtctggcctgacaaattgggtccagggtatgcctgagttctgagaccccctaaactgccctgggaggtagccctgcctttgtccccagcaacccagccaggtggcttagaaccggctcctgtgtccacccactctgggggaaggctgagccaggctccctggggcctcttggggactcctcgaaccctgagacatccgctcacacctcacctttgtcttccagggggccctcggcccacaaggccctcccggagcccctggtgtccgaggcttccaggtgggtgaggttggggcaagggcctggcatggggggcggcacacccagacgggccagacccgacagggtatgggcactgacgagccaggacctccttccccagggccagaagggcagcatgggagaccccggccttccaggcccccagggcctccgaggtgacgtgggcgaccgggtaagtggccctctcagcaggaagctcccctgcaccccctctacccatgtaccacagtcccccacccccatgacagtcccccaacccccaccacagtcccccaacccctaccacagtcccccaacccccaccacagtccccaccccctaccacagtcccccaacccccaccacagtcccccaccccctaccacaatcccccaccccccaccacagtcccctgggacgcagacagggagaggcccttgcagctcccagtgggaaatctggccatgggcagtgtctccctgcgtggcggaggcagtggcatcagggccccgactgtggcgcctttggcccctctgaccttccacgtggtgttccttgtgggtgggaggctgcgggagcctgggccgctctgcctcctgccctgcgtagacgcctggcgggacctgcacacggtcagtgttcattcctcgagattggcgtggaggctgaggctcaagagccacgcctgctcccgcctagcgggtgtctgcggaggcgcggttgacagaggatcacgttgctataaaataggtttgaacaccatgtcccaagtgactgtaacggtcacagcttctacctcgtcaagactttttcctgctggtcttgcagcagctgcagcattagctccttgggggtccgggcagaagcggggcacggcctacccagggccccagctcactggaaggagcctgtgggtctggtctgggccccagccatgctccaccaggtccttggggacctcgtgtgcctgctgtggccacctctgctgggcagacagacccctttttagatgtcaatcccgagaagcctccaggacacggctgcagatgccccgtcattccagggtgatggtcattccagggtgatggccggggctgtggacaccaccaccccatgggggatagcgggctgtttattggcctccaggcaggacattccagaggtgggggccatgccagcaacctcagggcctccgagagatggcagggctggcacccgccctgcgggcactgcgcctgtcccaggtgtgggtggggcctggtggctgaatttccctttcactttaaactcacgggaaagtctcctgcttttctgccctttgggccagttctcacttatgtggccatgtgagcaaatggacattttttaaagggattcatagcaactcccagacatgtcctcatttcacaatgccgggggaaggtgattagatgagcttttgcatctttgactctactgtgacggaattatcctgcaattgtgcagaaacacccgcacgaattcacgggtgttacaaacagtgcaaacctaacgggacttcactacccacaaggggaggctggacagagccatcgggcccagaggctgtgaacgtgagcttggcctttgggcctgtgtctgggagccggtgttcacagaagccctttgtgcagcacagatggagatgtggggaggtgtttaccattcctgggcccagggcaggctcactttagggattcctgccattcctctaatccagagccttctctccacatccagggtccgggaggtgccgcaggccctaagggagaccaggtgagctgggcacaggctggggcaaaaggaatgaaggcaaagctgcacagcttctcccaggctcctcctgtcccggctctggccctggctgtgttttcgggacactgagcctcctttctcctcttgccgtgtctgtcagtcgccctttctggctcctgcccctcctgcttagcacagcgaaagcagctctgggcacccagcccccaggcacgccccggcatccgccgctgccttcctgggtgcaaacagctggccagagtgtccctgcatggctctgggtgcaacagaagctgcttctagtccaggaggcaccaatgggaactctcaaagggacagaggtgtgtcctgccatccttccggagaactgacagagggcaggggctaggctctgcgtgtgtgttttgcaggcagattcgaaatgcatttctgctgttcgaagcactcttctttttggaaaagtgtcagggtgggtggggccatggccgtggctgccccgccctcctgcagtgcctgctctcacttctaggcacaaggcctttccataccgctggagggcctgcagccatcgaacccccaccgcaggttctgcttggcagaaaagcctcattatgcaaacaaatgtcttccgttttttggccccgcccctgcctgcaggtctcccaagggctgtgtttggagcgggttaaaaggcagccctggggcctgggcttttggcctcgaccttaagatgaacattacacctacggaggcttgagagcagggactttaaggcatgaagtccctactcatgcatgaacagctcttttaactttggggtgtatcgttttcagggtattgcaggttccgacggtcttcctggggataaaggagaactggtgagtaattaggtaacctcactgttaccaacagctgggagcgaggtcgccactgtggctggggaacagtcctggggacagggtcaaaatctgcagctcccggtggaagatcggcagctctgctgggcagcgtggggatggagcagggtcgggcagaggccttggccactggccatcccttagcaagtgggcagggcctggcagggaaactcagcggctctggagtctgacctgacccggtgctcagacgtgtgggctcccgcactctgccccgtggagtggcacctgcatgaagcagtcacagctgcatttttgtttttttgtttttggttttttggggtttcttgttttttgttttgagacgagtctcactctgtcacccaggctggagtgcagtggcgcgatctcggctcgctgcaagctccgcctcccgggttcacgccattctcctgcctcagcctcccaagtacctgggactacaggcgcccgccaccatgcccagctaattttttgtatttttagtagagacggggtttcaccgtgttagccaggatggtctccatctcctgacctcgtgatcatcccgccttggtctctcaaagtgctgggattacaggcatgagccaccgcgcccggccgggggttttttttgagacgaagttttgctctgttgcccaggctggagcacagtggcgcgatctcggttcactgcagcctctgcctcctgggttcaagcgattttcctgcctcagcctcctgagtagccaggattataggccctcccacagtcgactaattttttgtgttttggggggttttgtttgtttttttttgagatggagtctcgctctttcgcccaggctggagtgcagtgacgccatctcggctcactgcaaccttcccagttcaagcgattctcctgcctcagcttcctgaatagctgggattacaggcgcctgccaccacgcccagctaatgtttgtatttttagtagagacaaggtttcaccatgctggccaggctggtctcgaattcccgacctcaggcaatctgcccgcctcggcctcccaaagtgctgggattacaggtacgagccaccgcccctggcctaattgttgtatttttagtagagacggggtttcaccatgtcggccaggctggtctcaaactcctgacctcaggtgatccacctgcctcagcctcccaaagtgctgggattacaggcgtgagccgccgtgtcaggcccacagctggtttttaactgaagaaaactccacttccacaggcctaaaactcaggtgaagcataaaattacgttcttgtttgagtcccttgataggcacatttctccttctggaggtaacaaatggagcagtcgtgagtccgagggaaggacggcctttctggctttcccgaggggggttttcatctatgattaagtctttcctttgcgtctgggtgaaatagaaacagcctagccccagggaccccagtctctggcagacccccacagcccagtgtaaactttttatgcctggggacaaaagacctcagttgtatgtgtttcatttagtgaattctttttttatttttttttgagacggagtcttgctctgtccccaggctggagtgcggtggtgtgatctcagctcactgcaatctctgcctcctgcgttcaagcgattctcctgcctcagcctcccgagtagctgggactacaggtgcccaccatcacacccggctaatttttgtatttagtagagatggggtttcaccatgttggccgggctggtctcaaactcctgaccttgtgatccgctcgccttggcctcccaaagtgctgggattacaggcgtgagccacctcgcccagcccatttagtgaattcttagacaacactgacaaatggaccctggaaatcccagaagctgccctacgtggccactgttgctggtggggtgaggggcagagccccttgcaggcggaaaacctaaggctttgctctcagctactcgcacggtcgggctgtgtgaggtgaccccctaccctcctggcctccgcggagcatgctgtctgggcccggtcggtccctctgctgtgcggttagactgtgtcagtctgtattctgcagctgtaacagaacaccgcagcttgggtagtttacaagggaaagagatccatgtggctcctagttctggaggctgggaagcccaagaccgaggggtgcatccatcgagggcctccccactgcgtcattccatggtggaaggcagaagggccaagaggaggtgccagagagagaaaggggcccaacccatccttttcatgaggaacccactgcggagacaacggtgttagtttactccggagagccgagctctcaaacctaatcacctcttaatagcattgcagtgcagtggccgttcaattgcagcatgtgttttggaggagacattaacccggctgactgtgtgttgacgcacctggggccagtcattcctgaggacccagctggagggggttccagggttttagggcagagaggttcagcccagcattaggcgtgttagtaagaaaaaggaatggaagcaaagtaagcgtgtgtaagagacagcaccgtgcagctaacaaagtcactcttcccaggaaagtaagtttttaaaaagcttcaatcaatcagtgcaatcacagaaatataaaaaatgtatatagaagaacggaaggaaccactgtcaatatttggatgtagtctaatagcaggtgtgtggatgatttgatttattttatcctcaactggctacttcccacccacccaacaatacacttagttcaaacacacaacttttctcttcacagggtcccagcggcctggtcggacccaaaggagaggtgagtgcccggcgactgttccgatgacaccatccatgggcgcctgctggcttcctgcccacctctgggcaaccaggcagccctgcagggcactgcccagatccgagatgtaaaaaagcttgctctggtcaaggctgggcaagacggctccgtgccggctgggaaagagcacgtcggggtggctctgggctcctgggctcgcccctgacccaccttcctctgttcctctgcagtctggcagtcgaggggagctgggccccaaaggcacccagggtcccaacggcaccagcggtgttcagggtgtccccgggccccccggtcctctgggcctgcagggcgtcccgggtgttcctggcatcacggggaagccgggagttccggtacgtcgcttttccggcttttccagctttcacagggttgagatcgtgttttttccggaaggaagttactttgcggggtgacggtgggaatgcctcaccgaggctgccgcccccatgctgacgaatgtgtggggtgaattccaggggaaggaggccagcgagcagcgcatcagggagctgtgtggggggatgatcagcggtaagtcagccacgtgcaccggctgcagcggggcccatccccgcctgggggtcccgtgcctggggctacacagaaagccttcgtgccactgctttccagccaaagtgagcccctagcactcaccccgcctgttagcccttgggggtccacgtccgccttggcgtctgcctgtcctctgcgctagaggatggcccacgctcccgccccggattcaaccagattcccagcacgcagcagacgccctaaagcctgctgaatgcaatgggtacaagaacagcggagtgtgcccctgtggctggcagggcaggtccctaaacacccccaagggcacttccttcaccttcccactcaggcttctcaggctccaaggggttgggggtcctttctagctccagcattcatcaccccaaagcagttaaaccattttccatcaatcagaaggaaaacttgcttctggaagacagcaccgtgtagatattttatgctttacgtaacaatacttctgatgatcctctctcgagtaaacgcctgcacccttgttttcccaaagaacaaattgcacagttagccgcgcacctaaggaagcctttggcacccgggtccattggtcggcccggtccagctggcccccctgggcccccaggacccccaggctccattggtcaccctggcgctcgaggaccccctggataccgcggtcccactggggagctgggagaccccgggcccagaggtgagtgtttgaccccatgacacggtcaccctgctgtaaaaatccctgagactgacttgttagtaggcgctgcttctggtgcctgccatgcgccctcaggggtaacccctggaacgtgggggcctctcatgttttggggcctagcgcagttaactccttggtaatcctgtgggaactggaacatttttaacatgtgatgtttttctcaaataccattagaacaatatttggcagggagggattgatttaaaatgtgacgaaggctgggcgcggtggctcacgcctgtaatcccaacactttggggggctgaggtgggcagatcacgaggtcgggagttcaagaccagcctgaccaacatggtgaaaccctgtctctactaaaaatacaaaaattagctgggcatggtggcacacgcctgtaatcccagctactcaggaggctgaggcaggagaatctcttgaaccctgaaggcagaggttgcagcgagctgagatcgcaccattgcactccagcttgggcgacagagcgagactccgtctccataaaagaaaaaaaaaatgtgaggaatggccgggtgcggtggctcatgcctgtaatcccagcacgttgggaggacgaggcaggtggattactggaagtcaggagttcaagaccagcctggtcaacatggtgaaaccccgcctctactaaaaatacaaaattagccaggcaaaacacagatgtaagatttgaatgacgcaattagagggatgtgaaaatgcccttaggtgaaccatgggtggaaaatcatttaaaacatgattacaaaatattaataaatactcaactgcttaataggcataaatattttgaacaaaactaaaatcccatttaaattggctgccagaggtcagggaggtggttcagccgtgcacggctcagcagcaggcataggttctgacggctgtgccactgggcggtttcactgtggaacatctgagttcacttacgcaagcccggcctcctgcacccctgggccgtgtgccagagcctggggtttatggctgcagacctgcacagcctgttactgggctgggtcttgtgggcggttctaacctggtggtgggtatctgtgttaaatacatccaaacacgggaaaggaatggtaaaaattgggtatgataatcttaagggaccactgtcacctatgcggtgcgtcgtccacctgcagccgtcctgcagtctaagactgtgtacaggtgggtccctctcgtcggaccccgtcaagccctacgcgtgtgacatctgtacttttctaaatgtttccacttcagtgaaaagctggcaccctgtttgttacaaaggttgatcagacaccgctgtggtgtggctgcaacagatactctaaccatatgtctgtgtccacacctcgtgacaggaaaccagggtgacagaggagacaaaggcgcggcaggagcagggctggacgggcctgaaggagaccaggggccccaaggtacgagtccacggccagcaaggcttcactgggtgacatctcttccgccatcttgtagctttatgtggggcgtgcttgggttatgaatgggtctcttttcctcttctcttggcaaagcagtcttagagacaagattaggaattgtctcaataaccactttaatacataaaagtttaatcggggctgggcgcggtggcttacacctgtaatcccagcactttgggaggctgaggcagacggataacctgaggtcagcagtttgagaccagcctggccaacacagtgaaaccccatctgtattaaaaatacaaaaatgagccgggcgtggtggcgggcgcctgtaatcccagatacttgggaggctgagacaagagaatcgcttgaacccgggaggcggaggttgcaggttgcagtgagccaagatggcgccactgccttccagcctggcgacagagcgagactccatctcaaaaaaaaaaaagtttaatcagtaagcagatcctcctggatctattttagctaagtcaatttggttagattctgtttaagctactcagtatctatttcagttaaagtataacagaattttctcttaattgacctgtgcatacgttgaatatttccatttctaatgtcaaaaataaatgctttgtcacggagggaggcagcgccaggatccttggcaaaggccatcccctgcccgcccctgtcttagcctggtgccttctcaaaaccaggaggccttagactccaaggatgtgtgtgtccagatgagaaggatcccgaacagtcttcgagaaggcacccgctcccacctctgcctgggtgccctggagccttctcctctcctctcctccacgcactcacactgctctctggatgccctggagccctctcctctcctccacccaccccacctctccctgggtgccctggagccctctcctctcctccacccaccccacctctccctgggtgccctggagccctctcctctcctccacccaccccacctctccctgggtgccctggagccctgtcctcccctccatgcacgcacgctgctctctgggtgccctggagccctctccccttctcccctccacgcacacacactgctctctgggtgccccatgctcctggactctcctttgctgacctagctctgcctctacctggtgtccaaacgcacaggggtcccaggccccagccacgtctctccgcctgtggctctgaacagcatctgtgttgcacttgctggtggacagcagcctcccggccgcaccatgcccgcaccatgcccacaccatgcccgcaccattctggactttgtcacctcatctcagtgaagggctctgacaccccccacttaggcggctgactccctcttccctcacacccaggcctcccatgtttccactgtcatcactcaccaaagccaccccacaaccccccactccgggccccctgctcactccaaatccactccttactcacacagcccccaccaaacccgcgtaagtcagagtgcgggtgtcctcaggacggctctgcacccctgcctggggctggccgcgcctggccttccccggacactcccgaccgccagccccgcggagagcctttgtgtgccgttccctcggcctccccacccgctgtggcctctccccaagtgaagagtgagcagatggaagagcagggcttgcccacagctggatgtcaagtccccctgctttcagtccgggctgcagctgaactcacctttctgctctgtcccaaggaccccaaggcgtgcccggcaccagcaaggacggccaggacggtgctcccggcgagcctgggcctcccggagatcctgggcttccaggtgccattggggcccaggggacaccggggatctgcgacacctcagcctgccaaggagccgtgttaggaggggtcggggagaaatcaggctctcgaagctcataaaattcaacgtgaggaagcaagtgacaaggacgcccgaagcacagtggacggtcatgaaggagcgggggtgtggcaggcgggtgacgtccaggagagggagcgcccctggctgcccctcggccgccgactggacgcgcgggccttgccagcgagcaccctcatcgggctgtcgcctgacagcatacctcaaaaggccctagctaataaacctgtaagcccagcatttgagagaaggtagggtgtgtatatataaaaggttgtgtacaactccacgaggtgaaaaatattcagtaacttgtttacatagcatttgtgtaaagactatgatctcatcccaataaaatgatatattaaaccttcagattaatgactggctacagagtaacaaaaaataaagaatttaatgtacagtaaattctctcccatacaaaggtctagtctgatgttttgtgtacaaactcacatctccaattaacagtatttattgagggtgactttgtattgcactaacgtctattgctattacctgttgtgattgataagtaaagccactcattgaaaaacccaattccaaacaccacagtttgtgacacatgaagtaatgaatgactcttggtatgaaaacgtggcatttaagcgtctactgtgacagtatttcatttgtggacaaaagtagctttaaagcaagtatctggaaaatttttagcacacaggtttaaaatggtcctgcacgttgcaatacagcagcacgtgactcagagtcatgacaagggggtgtgatataacgaatgaaataaaatttccaaactgtttttagttaacaatttaacttgttccaattgctaaaggggcatatttaaaaggtaaataagtaaaaagccgtgtactttttaagattaaagaaagtacaaaggatgtcaattttttaagttatcatgttaagaaaacatgatggaatcagagcattgagaaaatgcttactaattattactaattaattattactaattattaagatggcttcatccccaaatggtctaagaggacattcatggataagcatttgcgtctagataaatatttttacaaaatgtgctctcaaagtccctactggagtcccgtcagcttgagtcacgcccttttcgagtcagactagccgagcagagctccagggttgcagaaggcgtgcacaggtcacgaaggaatggctgttcaccccccgaggattcctgttcagtccgatcacttgatctccatcgaggggctgctctgtaaactcccctgtgcaggacaggtcaccaaggagtccggtctggtcagctttagccttcggccagttttaccgcaaaatacgctctcaaattcctgcagtgaagaagtgacggttaacatactgaattaactgacatgaaaactgctgtcttccaaagtgcaaaaggttcaaattaagagctaagtaaatgactttagaatacgctgttttaaggtgtcattcacaaacttgtgtcttacctcacaaggggatttatataataaacagattttaactttttttttttcaaatagcagttacactgtacatgtacttttgtttttccaatactcagaatgtctggccacactgtattgattttattgtggtaaaatatacatgacatgaacgtttcaaccgctaatgggccctagctaataaacctgtaaacccagcgtgtgagagaaggtagagtgtatatattaaaacgtttcaggccgggcgtggcggctcacgcctataatcccagcactttgggaggccgaggtgggtggatcacctgacgtcaggagttcaggaccagcctgattaacatggtgaaaccccatctctactaaaaatacaaaaattagctgggcgtggtggcaagcatcttgtgaccccagctacttgggaggctgaggcaggacaatctcttgagcctgggaggtggaggttgcagtgagccgagatcatgccattgcactccagtctgggcaacaagagtgaaactccgtctcaaaaaaataaatttttaaaaagtttcaacaattaacaagtcaggggcatctacccccaccccagggcgactgccttgccctctgcactgccacacactcagggttccaaggccagcaaggtggaggtgctgctcgctgagatggctctgtccttggggagaccctgccagcagggtgggggtgggctgagcttgctcctgtcacaccacctgtcttttacaaaaggcctcaattataatggtggggtcagtctcaacctcccgaaggagactgagaggaagagaggggcacaggcgacggcccgatgacaggcgccaaccaccacgggcagaatgtggaaacgtctacgggacaaatcattcccttttcaacaaatgaacggtgaggaagaaaggaagggggaactattacgggttaagatatatttaaaaactatcaaccaaatgtgatgtttggatcctgattcaaatgagctgaccgtagagacacctgtgggctcacgggagattctgctcagattcgggaaggagactcaggtgggtaataaggagtgaaggctttcaggaaggagactgataatgcggttgtgtttttaaacaggccttttctttcggaagatatatttatgaatgaaatgatgtctggaattgttttaaaataattcagcgggggtgggagggcgaggggataggtgaaacaagctgatgcctgaaactgagttagagggacctgggagttcactttctatttctgtgcagatttgaaaatttccataagttggttttaaaacatagcattctacacgattaaatccaggtttatacagtttttattgtggtattaaaatatagcataaaatttgccttttaagcatgtgtaagtgtacagtggagcagcgtgaagtccactcacagtgctgtgcagccgccaccaccttttcatcaccctaaacagaaactccgtacccattaaacactaactccacaccgctccggcccccagcccctggcacgtaccagtccactttctgtctctctgaatctgacggctctaggtgccttgtttacggaatcccgcagggtgtgccctgttgtgactggcttatttcactcagcataatgacctcgggccatccatgctgtagcctgtgtcagaatttcattccttttcatggctgagtaagattctgttgtgtgcttgtaacacatttgtttactcattcctctgctggagcacacttgagtcatttccaccttttggccactgtgaaaggtgctgccatgaatattcatagaaaagcatccatttgggtccctgtttcacctctttggggtttatgcttctctggtgattctatgttgaaccttctgaggagctgtcatactgtcttccacagtggctgcaccatttcacacccccagcggcaaagcacagggattctgatgtctccacatccttgccaacacttgctattttgcttttgtttttgtttttgaatagccatcctagtatgtgtaaaagtagtatctcattgggtcttgattcgtatttccctaatgactaacggcttggcgcatctttcatgggcttattggccatctgtgtatcttctctggagaaatgtctattcaagttctttgcccatttttcagttgtgctgtcttttttttggacagggtcttgctctctcaggctggaatgcagtggcacatccacggctcactgcaggctcagcctcccgagtagctgggactacaggtgcacaccatcacgcctggctttcaacattttttttctgtttttttttgtttgttttttgtttttttttttttgagaccgagtctcactctgtcacccaggctggagtgcaacagcgtgatctcagctcactgcaacctccacctccctgcaacctctgcctcctggggttcaagcaattttcctgcctcagcctcctgaatagctgggattacaggcacctgccaccacacccggctaatttttgtttttttagtagagacagggtttcaccatgttggccaggctggtctcaaactcctgacctcaggtgatccacccacctcggcctcccagagtgctgggattacaggcgggagccacggttcccagtctgtgtagtctttttgttgctgagttgtagtaactttctacttaattcaagtccaggaggacacaagcgccatgctgccatggatttaacttctgaaccacctggagtgactggaacattccacccatccacttttaagcaactttccaaccaagcaagctgccatttccaactactgtgtgcactcagaatctacacctgcatataaatatactcattttcttcccaattttttttttttttggatatggagtttcactcttgtcgcccagactggggtgcaatggcacgatctcagctcactgcaacctttgcctcctgggttcaactgattctcccacctcagcctcctgagtagctgggattacaggcatgtaccaccacgcccggctaatttttgtatttttagtagagacgggggtcacaccgtattggccaggctggtctcgaactcctgacctcaggtaatctgcccacctcagcttcccaaagtgctgggattacaggcgtgagctacgacgcccagcttcttcccaaattttaaaaggttttaggatgcaatttaaaatgaccccacattttgataatttcctatattctgacacctaaagcctacatataaaaaacacttgcctatttggcaagatagaattcacctttcaggacaattaaatgaaagtcagagcctgggccggctccggagaagttagaccctcggagctggtctcggactgctggggcgtcaccccttcagcaacccccgctgaccatggcagtatttcatgacgaggtggaaatcgaggacttccaatatgacgaggactcggagacatatttctgtccctgcccatgcggagataacttctccatcaccaaggaagagctggagaatggggaaggtgtggcaatgtgtccaggctgctctctcattataaaagtgatttatgacaaagatcagtttgcgtgtggagaaacagtgccagtgccttcagtcaacaaagaatgagttaaatgctaaggaagccttcaggaatccgaaccctgaacagctggaaatgagcccagatagaaacttcaaatgcaaagctcctggcttcgtggagacacagccatttgtgatttgctgttctgtaggcgtgttgtggattctttccatcaactgctgatttcatcttcaggaagcaagtccataacatgacgtatctggagtttgtgcttagaaccttaaattggaagcattcttaattatccatctaaatttaaaagacgataatttaaaaaaaaagaaggaaggaagaaaataatcatcctcagacataactaggcgctcgcaagatcttctgaactattttcacacagtgatgaggctagtcccggcgtctgccttcactatgaacagttgggcagaggcagggttgagttgtggttccatctggacccttgcagggcccgcccacgacccgtctcctgggagctggggcagctgtgaaagagaggagcagatccccttagtcctcctcagctgagcccaggccaaagacgtggtactgatgtcatcgcactctcaatctgcacctcaatccaaatgcatctatttgcaacagaacatatgtgaaatcgttgagttttaaaggaatttttataacatcaaaacattgagatgacaacgtcccaaagcagatactcatgttagatttgtgaacatgagaagaataacaacaagacgggtgcggtggtgaggggcgcctacggtcctagctactcgggaggctgaggcaggaggagcacctgagcccaagaggacgaggctgcactaagctgtggttgcaccgcactccagcctgggtgacagaatgagggcccctcgctgggaaaaaaaaaaaaagagagaaagaaaaagaaaaataataataccaacaataaaaaaaattttcttagtaagaaaaaagaaatagctctaactatgagtcaggaaaatataccaggaagttattaagaggaagaaagcggccgggtgcagtggctcacacctgtaatcgcagcactttgggaggccgaggtgggtggatcacctgaggtcgggagttcacgaccagcctcaccaacatggagaaaccccatctctaataaaaatacaaaatttgccggggtggtggcacatgcctgtaatcccagctactcaggaggctgaggcaggagaattgcttgaacccaggaggcagacgctgtagtgagccaagatcgcgccattacacggcagcctgggcaacgagtgaaacttcatctcaaaaaaaaaaaaaaaaaattacaagctatttaaaactgagaaacaatgaaagcattgtgtcctaacctgtgaaatgtttcaaaagcacaccaggacaaatttactataatgcattgattagaaaacaacatagacaaaataaactttcaacccaagataccagaaaaaaataaaacttcaagaaggaaataatagaaataaggttttgggataataaagataagagcaaattatgatggaaaaagcactaccactgaccccacataaaaaaccaacaaagtgaatgactgagccccagaaagactccagcacggcccaggccagaggggtacagcagaccaaggagctcaggtggccagaggtaaggaggcataaactcattaggacaaaaagaatggcttttctttttcaagatgctttatttttaaaacaggtcacaacacagcgttcggctcattctgccacgaacaagctacaaacgcttgctctgcagccgagaggccctccagtggccatgttcaaaaacagaatgaaaatccgtatgtaggccaggcgcggtggctcacgttggtaatcccagcactgtgggaggccgaggcgggcggatcacctgaggtcaggagttcgagaccagcctggccaatatggcaaaactccatctctactaaaaatacaaaaattagctgggcgtggtggcgtgaccaaacggcatgggaggccatgatcacaggctgctgggaatggatccaagagaggatgaagtggctcaggaggtacagacaagcgccgggcagccgggcagccaaggagagcagagaaatgggcggttgccagtacaggacacgaggtccagggagttctcacagaaggatcacgggagaagtcacagcgtgtccgcaggaaaggaggagagaagggacaggccagtccgagtctgcagcagggcctgacaacagacagcacgtgagggacagcgacaccggggcctgatgcagatggcagggagatgcgaagcgggactcaaccacctgctggtgtgaagaagggagggacagacaccacaagggaggccccaggagtggctggcaccttcagggcccccagcgtgcaggggcatctcacaactaaacacaaccagcgccccagacgccatcccgactggggaaaaagttgtagtgggcactattgagacagcaggcaaaatgtgaataacagtcttgcaccaatgttaaatgtcctgattttcatcgttgtggatattaaaaagtcaacacgggggccgggcacagtggctcaagcctgtaatgccagcactttcagaggccgaggcgggaggatcacctgaggtaagatcgagaccagcctggccaacatggcgaaacactgtctctactaaaaatacaaaaattagccgggcgtggtgggatgcgtttgtaatcccagctactcgggaggctgaggcaggagaatcgcttgaatccaggaggcggaggttgcagtcagccgggatcacgccattgcactccagactgggtgacaagagcgagactccgtctcaaaaaaagtaaacactgggccgggtgtggtggctcaggcctgtaatcccagcactttgggaggctgagacaggcggatcacaaggtcaggagttcaaaatcagcctggccaacatggtgaaaccctgtctctattaaatacaaaaattagctgggtgtggtggctcaatggtaatcccagcactttgggaggctgaggtaggcaggatcacttgaggtcaagagtttgagaccagcctggccaacatggtgaaacctggtctctactaaaaatacaaaaattagccgggcatggtgggccatgcctgtagtcctagctactcaagaggctgaggcagaattgcctgaacctgggaggcagaggttgcagtgagctaagatgacaccactacacttcagcctgggcaacagagcgagacgccgtctcaaaaaaaaaacacggaagtatttaagtataaagaagcatggtgtctgcagcttactatcaaatggatcccaaagatacctggagagaaactgggaccggcagggagaatggagcaaacccggacaggcctacaaagagctctttgtactgttcttgcaatttttctgtaagtttgaaattacaccaaaatttaaaattaccaacagtaaatagagccatctaaacccagaatgtggggcattctctagacaaccggcctgatctcttcaaagcctcaatgccatagttaataactgtgggggggattcttgtagctcaaagagcttgaaaactgtcatcaaatgcagtgcataatccatggctgggtgctggactgtggaaaaaaacagctatgaaagtcatttttagaacattttggctgggtgtggtggttcatgcctgtaatcccagcactttgggaggccagcctgggcaacatagcaagaccctattgctacaaaaattaaaaaactagtcaggcatggtggctcatgcttgtaatcccagcactttggaaggctgaggcaggaggatcacttgagcccagaagtatgagaccagcctgtgaaacatggcaaaaccccatccctacaaaaataaaattagctggtcatgatggcacacacctgaagtcctagctacttaggaggctgaggcaagaggattgcttgagcccaggaggcagaggctgcagtgagccataatcatgttactgcactccagcctgggagacagcaagaccctgtctcaaaaaaataaaacaaaacaaaataaacattaaaataaaaaaattaggcaggtatagtggcaataaaagaacattttgggcaaatctgaatagtctgtgcattagaggatatgaaaaagacttattatcttggggaggcatgatcatggcactgggattctgtggaaggcctgtcttggagatttatgtagaaatatttagagatgaaggttcgtgtctataattgtctttgaaattgtgcgtgtgtacaaagtaaatacggtaaatgttcattgctgagactgaagcatgggtgtacaggtgttcactgtaattcctatgttcactagaaaacgaacagaagtgaatcactgatggctgacgccgccctgccctcaccccatacttatctatcccctgcctcccgatgtccccacctgacgcccccagaatgccgagatcctgcttctctgagtcttccctctcagtaaacagccccatccacccagccaccgaggccaaaccctgacgcctttttcccatcacaacccccaactggtaccgccacaaacacaagaagccttgtgcctttcctcctccccagcgccgccccctggcagccatcgcccggcaagccacatcttccagctactgcagactcctggtttccactctcaccccagcccagctcctactccctagcatccagtgtcccccagcagcagggtgatatgggtcatgtcactcactgcccaaagactgccgaggcccccaaccctcaggactagcggtccaccaggccccagcctgccccggtgccctgcccagcaacactggctggcaggcaggcactcctcagactctgcagccggcaggtcctggctgccagctccctgtcatcattgggccttggttgggcgcctccctcgaccacccaacatcacccaatccaaagcagcccccgagtccggctggctcgcagcagcaccttccacccgcaaggccctgctcccactgtcttcacgtttactcgtcccctgcctccctccatgccagacatgcctctatcttgcgcagggtaccccagcaccttcagcagtgcctggtcacactggaaaagacctgctgagtgaaatgtgtaccaaaataatgtagagaaatcacttaaaactctcatgtattacgtcttcaaggacaaaaatatgcatccaagtaaaagggggcagtcactaaagaaacaattaagaacccatgtgtttcggctttttatgttctaattccccgaaaaaattgtgaactgacttgacctcagcctgtttcttggtgggtctaataatgtgacccagaagtaatcagattcaatgtaattacatttaagaaatattcagcaaacataatgtatgtaaagtatcatatccataaacatttggtctacttaatctttgactatacatacaattaacattttttaatttcaaaaattataaatgccttcgtcttgagtaaatcagatcaataatgatttactaatagatacacaaagccaaaacattaaagcattttttaaaacacaaaagctttattttatcaaaacaaatcaacagtctacctctaacaataatcttcaagagtaactgcattgtaaataaccataaacgatccgatcagaatacattcaacatagcatcgctatagaatgcaattaaatgtataatgtaaataaacaacttaaattatgcaactcgcaagatgtaaatgtcatgtggacacagaaaagggacagagacaagacaaactattgcctggcgctgaagagacgagccctcactcaacacagcccagctgcggggacctctctctagccccaccatgacgtagacacaggagcccttcttttgagatggagtctcgctctgtcacccaggctgcagtgcagtggtgctatcttggctcattgcaacctccgcctcccgggttcaacaattctcctgcttcaacctcctgagtagctgggactacaggcgccaccacgcctggctaatttttgtatttttaatagagacgggggtctcatcatgttggccaagctggtctcgaactcctggcctcaaatgatccacccgcctcggcctcccaagtgctgggatcacaggcatgagtcactgcgccaggcctgggagcccttcttggaagaggtccttgtttgttgcagcaaccttagtttgttctctagtcagactcctgcctgggtcaacagcagcaattccccaacagcttggaccaggtacaaagtcaggaccctgtggatctatttcactaaggtctgctcactcctagagggccaaagagccactgaccctggccactgcaacgctgaggccgggacctggaactcgggtcccccaaaggcagggcccaggaccctggaactcgggtcccctgaaggcagggcccagaaccctggaactggggtccccccaaggcagggcccagaaccagccctgtgactgacaccttcttccttttaggccactgaggggctgactgaactcctgcattcaaatcacacgtctagttccagccaaccacgatggcttgctgcaggccactgccacgaccacacagacaggatcacggcaggctggctgtcctgagggactgcatatgctggcgctaacacgccggctcctccctagtcacccagtccacagaagtatattcacccggtccacagaagtatattcacccggtccacagaagtacagtcacccggtccacagaagtatattcacctggttgacagaagcatagtcacctggtccgcagaagtatattcacccattccacagaagcacggtcacccggtccgcagaagtatattcaccgagtccacaaaggtatagtcaaccagtccacaaaagtatgttcacccagtccatggaagtatagtcacccagtctgcagaagtacattcacccagtcagcagaagtatattcacccagtccgcagaagtatagtcacctagtccgcagaagcatggtcacccggtcggctgaagtacattcacccagtccgcagaagtatagtcacccggtccacagaagcatagtcacccggtccacagaagtacagtcacccggtccgcagaagcacagtcaccggtccacagaagcatagtcacccggtccacagaagtacagtcacccggtccacagtatagtcacccagtccacaaaagtatagtcacccagtccacagaagtatagtcacccagtccacagaagtatatgcacccagtccacagaagtatatgcacccagtccacagaagtatatttcttattaacctgctgggcatatttgaagtccagatcagactatttgacacttatctgcatttttgtttctctttcttttttggggtgggtgggggtggggcagggtcttgccctgttgcccaggctggagtgcagtggtatgatctcagctcactgcagcctcgacctccctggctcaattgatcctccctcccagcccccgccccgagcagctgggactacaggcatacgccaccacaccaggttaatttttgtattttttagtagagatggggtcttgccatgttgcccaggctggtctcaaactcctgggctcaagagatcctcccacttcagcctcccaaagtgctgggattacagacgtgaaccactgtggctggccggtttttgtttttctattcttgcttttatccctttcacaagtttttctgagggcaaatatcatgtcctacacacccgtcagccccagtgcaatataccgtacacagcaggtgcccaatttgctatctgacaattgcctcttcacagttatttacacactgagtgtaacacatgtaggctgtgactattactttaataaatgacaagttatatcattaaagagcagagctttgctcatactggacttagtatttgatgttagattccaggaaacaaaggatagtttgagttatccttaggaaaaaggagggacattgttaagtaaaatttgtaaaattctgaaaatctacctggcctaccactaacctttttaagagaatctccatgtctttcctggatgtatttcaggaatgctgtggtccactgcagagttgtggccttgtcagtctcggcattgcagaacggcactaagagattcaactcatcacagcaaatgcggattctgcgcctatagtcaaaacccaaagtcatcaccgagagagaccggagcaaaacaaacatgtaaaaggaagcgtctcctgtagtacttgagggaaccagagctcgtgcatcctggccactgagtgccacggaagcgcctgtcaccacaggaagccccacggctttgccacggccttgtctacagaggcagccactgccttccagaggccagagcatcctcgggtgcccttggcggccccatgacccacaagctccctggagctttccctctttacttctcacgggccaggttcaagtctctagattagggatggctccaaagcccctgaaactggaagcaacattttgtgtctgacaccttcttccatttggaccactgaggggtccaaattgggcagataactctgtcattcaagactgatattacttgcccttcacgggctaaataccctaccaggaactcgtgcacagctttctccaaggggccctgattcagaaaggatcacggcccaacactctgttaatattctgaaacttggtctttgtagagataaacaattggagtcttgttattagactattttttaaacttttacatattacattcagtaacatgcaaagtcctaaacaagcagatactgagcaacttattcaatatggcccttgttactcaccttcacacccgtctatttagaactttaattagagactttgccagtaaaacagcagctggcatttactaggtgcttttggacttctagacattgagcgaaacactctttacacatcagctcactgaactctaaccacaagtctacgcagtagagctagaagtccaactttcaaactgtcaacgtacggtgtaaggctttccacatagcaggtactcaataaatgtctattaaataaatgtcggagcaaaatgcccttcataattcacagtagggtgaggaaggccctcagttagtccatgtgtataaaagtatcataaaaagatattagctagctttttaattttctttctttgggggatgggtctcactttgtggcccaggctggagtgcagtggcatgatcacagctgactacagcgctgacctcccaggctcaagtgatcctcccacacctcagcctcccaagtagctggggcgacaggtgtgcaacaccaccactactagtattgttggtttttctttagagacggggacttgctatgttgcccaggctggtttcaaactcctgggctcaagcaatcctcccacctcggcccacagtcatgagccactgcaccctgccccagcaagtttgaatagatccctttaaaagaaattgccatgccaggcgcagtggctcaagcctgtaatcccagtactttgggaggccgaggcacgtggatcacctgaggtgaggagttcgagaccagcctgaccaacatggagaaacccctcctgtactaaaaatacaaaattagctgggcgtggtgacgcatgcctgtaatcccagctactcaggaggctgaggcaggagaatcgcttgaacctgggaggcgaaggttgcgttgaaccgagatcgtgccattgcactccagcctgggcaacaagagtaaatctccatctcaccaaataaaaaaataaataaataaataaattgccttagctcaacattcaaccttggagcttcaaacctgagtatttgtctcactcactgttatttatttcctgaacttaaagcagaaactggtacacagtaccagtactcgatacattatgtagttaattaattatagattagggaaatattctatgaaaacccaattataggccgggtgtggtggctcatgcctgtaatcccagcactttaggaggccgaggcaggcggatcacaaggtcaggagttcgagaccaacctggccaatatggtgaaacctcatctctactaaaaggtacaagaattagctgggcgtagtggcgggtacctgtaatcccagctactggggaggctgaggcagaagactcgcttgaacctgggaggcggaggttgcagtgagccgagatcatgccactgcactattccagcctgggtgacaaagcaagactccgtctcaaaaaaaaaaaaaaaaaagaaaaagaaaagaaaacccaattataatagaaaaaaattaaccactcttaattctacaaagaaggataccacaaataaaatctacagacaaaaccacttaaataacaattttaacctcttccttcccagcaatcttaaaagaaccaggcaatagccaggagcggtggctcacacctgtaatcccagcactttgggaggccgaggcgggcagatcacgaggtcaggagatcaagaccatcctggctaacatgctgaaaccccgtctctactaaaaaatacaaaaaaattagccaggtgtggtggcaggcgcctgtagtcccagctactcaggaggctgaggcaggagaacggcatgaacccgggaggcggagcttccagtgagcagagatcgcgccactgcactccagcctgggcgacagagcaagactccgtctcaaaaaaaaaaaaaaaaaaaaagaaccaggcaaaacttgctgaactcaagctggctggtaagcagcagttaccaaaacagcctgaccactctcctcagaaaggcctgcagtcagggctggcccttagtggagtctgcaaacctagattcagggagttaagagtgcccccagaacctacactgtgcaaacgatatggctgacactgaacaactgctttccttctgggagactggactgtggttgcatgcatgggggcagtgcctacgtgacacgcccctggtctctagcgagctttcctggttggcaacacctcacccacgttttcagaccacatggctgggggcatgaggggcaacctgcctgactccacagggcgcgctcttagaagcttgcacctcagctcctgccttctccccacgcgcctttgctgatcgcacctggcatcctttctccatagtaagtcacagcctgagagtgactgcatgcggagtcccgggagtcctcctagtgagccagcgagcctgggcatagtctgggggatccttgatccatctgggaaagctaacgatgctcctacctgctttattccctctgaacgcagaaacggctaaggatcactcatctgtgataaccatgtatgactaaggtaatcatatatgagtcagcctgacaagcagtcacacgtattaccttctatctctttccattcggttatgcctctccctacgttgagaccttcctccctggggcccactctgggcctgctcccccaggtttgcctgtgaggactccgaggactgccaagcgccttgtgtggcggtggcaccttcgcccacattctgaatctctccaagggctcttcgctctacatttgtgtccaactgacgcattctactccgattcctcttcagtgcttgtttgcatagcgctgcttctttgcgaaagaagaaaaaagtggtttttaattttgtattcttatctcaattaatgctgaatacagttttggccttttcaatccaagatataaacattattgggtaagcagcacagagaaccgaaacacaaagagatgtactaatgcagtttttcagcatcagcagggaccatgaagcccaagcctattttatacaacgaaactgaacaagaatcaatcatcacactaaatacgttttccaagtgctatgcaaccaatatgacctcatccaaagcccctctttttaattaacaggtgttatctatgaatacagaaaacaagaagttgtttactttttctaaaggtcagaatggaaaaaaaaaaacaacaacaacaaaccacctggacatatttcctcccaaaaatattttctttatatacaattattctaagaacaagaaaaaaaaacaattattctaatatgacagtatttttactgcaatgctcagaacaaaactgcagcagcgtgtgtgtgtgccctcgccgcagaagtggctctcctccccaaagcaggaagaagtagcgtccgagcttttctgctgcgtgacaggctatgccacgtgtgcgtcagtggaactgtatccatcaaaggaccacaggcacgtgactggcaggcgtgctcatgtgcacgcgtatgccacacaaagcacccatttcagaaggatgatgaagctttcagcaggagagagaggaattcggtcgttttggtgatattttattccttaacctgagtagtcggcacagaggctgctttaatactcatctttgtatcttacaaatgtgaacatatactttggcataaaattttatagggaggaaaaggaaggactgacatgggagaaggcggtagctcttcctccccatcttgtcttcaccaactcttggaaagctaagtgtaaggagtgttcttttttcgggtcacttcacaaatcagtttcccagggaggaaggggctacgcaggtgtttcccagggaggaaggggctatgcaggtgtttcccagggaggaaggggctacgcaggtgtttcccagggaggaaggggctacgcaggtgtttcccagggaggaaggggctacgcaggtgtttcccagggaggaaggggctacgcaggtgtttcccagggaggaaggggctacgcaggtgtttcccagggaggaaggggctacgcaggtgtttcccagggaggaagggactatgcaggttagcgcagcagtgccttcagcagtgactttatttccaaactttccgaatcaccttacagcctctccctggcagccctaatagggtcctcctattagcagccacctatccaaaggctttcggcagatgttagatgactgcctcactcatcgagtataacataaggaaaataaaaaactataaagtactttcagtaacttgaaaataactgaaaatttatgtaagtctatcactttactgttaagaaaaagccctcaaacgcaacgttctcacaccaagattaattatgtttgagaatcagaataatgtttaaagcgaaaagacagggaagcgggtggacagacccctgagatacacagacacctccaagactgtttcacatgtgtacaaaccatctgtctcccctgccccccaaggccaaaatgccatcagccacagggctcagtcagaagaaagctcccactacctgctgcttcatcgcttacctcccactttaatccaaacttgctcaggcaaaactttgtttctactacctaacgtctgtttagtggattcaatttcttgctgataacagaaagaaaatgctctaggcaatccaatatcctggtgcttggcagcttcaagtacagaacatgagttactagaactctggaaaaaaatgaagcaacaggaattttatcaatatgtggcttactctcctctttactgcacaaatgaaatgcacttaacaaacatcaaaactactaacacgtaatttgaagaactttagttgcactgaagatttaaaaatattcgcataccacataaacactcaactttcacaggtatttttttgtttttgtttttttgtttttttttttgagacaggctctcactctgtcgcccagactggagtgcagggtcgcgatgtcagcccaccacaacctccacctcccaggctcaagcgattctcccgcctcagcctcctgagcagctgggattacaggtgtccgccactaccacctggttaattttcgtacggggtttcaccatgttggccaggctagtcttgaactcctgaactcaaatgacccacccacctcggcctcccaaagtgctgggattacaggtgtcggccttggcgcccggcttaaaaggttattaagctcactgaagggaaaaaaaagtacttgggacctaaccaaaataagttaaaatttacccatttaatacaaaagagcaaagcttcacaaatcatgttccctacctgtgtctgtgaaagattagaatttccactagtagagcaagcatttgtagtaaacagtgggtatgtaaattgcaaagcagtagttgtagccgcagttttatttttcactaatgctgtacatttgttttgttgctgaagaggaacattcattagttcagatggatgtcgaatgagagttaccaaactgccaagacaaaagaaagcccagaagtgtcagcaatacgtggcagacaagcatccaccatcccactcccatggctctggctagtttttccagacagcaacccaactctcatcctggaaatctctacacaacaattagcaactatcgctgctgtggaagtcctcctcttcctatggaggaaaagcaaaactgcgccacctccctgctctcatcacatcctgacaccaatctcacttttgccatcctccagtgtgaccacgatgggcaactacaggctgggatgagcagaaaactgcggacgcagccccttccacagccatccctgagggtcgccaagggggcggctgcaggctggagcctcattttagagctcaaagcctgcaaacccccgtcgggccttcctaggcttccctgacatccaagagtgccacccggagcacatggttcccaggaattctgcgcgctcggccccactccaggcggggccactgagggagggggtgtttagtttctggaagtacctgctccccggggcccgcacagcgcacacagcctttcggggcggccccagacccggtgaggtccgcgccctgtgccgccgggagggcaggctgggggcgtgcacagcgagggccccctttgcctccgccccggccccggccccggcctcggcctccacccgggccccgccagcccccggccgccgggcacgcacttgttgagcgccccgcccggctcggggggctcggggccgcgcggcgcgggcggcggctcggcggggatgctgttgaagcggtcctccaggcggacgcgcacggccggcttggcccgggcctcgggcgcgccgtcgggtccagccgcagccgcagccgcgcccgcgccctccttggcggcgccgtcggcccgggccctcgctccgtccccgccgcccgacgtcttctccgccgcgcccgcctcgcttagcagcatcatgcgcagctcctggaagtcgatgtggcccaggcagggcgcgtcggccgccagcgcggacgggcacagcacggggtacacgggcgccgcgcccccctgaccgcccgccgcgaagccgcccgcgcctgcgcccgggcccgccgccgccagcagcgccgagttgaggcgcgtctcgagctcgccgtcagccgccgcctccatgtgcgagcagaggatgtgctgcagctgcgtgtactccacctccgtcatctccaccaggctcaggtcggtggtcgtgaagctcagccccggctcgcccagcgccgcgtccccgccgcccgcgccctcgacggccgcctcgccgcctgccgcgcctgcctccggcggcggctcccgcggtccggggcccgacatggcggcgcggcgcggcccaacggcggcgagggcgacgcgggcggcgggcggcgggaggcgggaggcgggaggcgggaggcgacccccggcccgagcactactctgcgccggccacagccggcgcgccgttgggggagggaaaaccgctgagtgccgcgcacagcgcctgcgccgccccgccccgcaacggcaaccccacccctgcgccagccccgccccctccgttacccgccgccgccggccccgcccccgcccaaccgcccgcacgcccggccccgccccacgtcggcggatgcttgcgcggagggcccgcccccacggcccagccacgcccccacagctaggccacgcccccagctcaggccacgcccggttcccagccacgcccctgctgcccggccactccccgctgaggcccggcgagggcggctgcgctggaatcagcgtgatacctacgcggtgacaccctggggagaagccacgtccgtgcgtgcacgtgcgccccattacagcggcaggaatgaagacgttgtcaaaacagctccctggacccacagtccacagtgcccaggccatccgcttcatccgcgtaaaatgcgcagcgcatggccgggttctgtggctcatgcctgtaatcccagtactttgggaggccgaggcaggtggatcaggaggtcaggagatcgagaccagcctggccaacatggtgaaaccccgtctctactaaaaatacaaaaattagctggacgtggtagtgcgtgcctgtaatcccagctactcgggaggctgaggcaggagaatcgcttgaacccgggaggcggaggttgcagtgagtcgagatcttgccactgcactccagcctgggcaacagagccagacttcatctcaaaaaaaaaaaaaaaatgcacagcgcgacggtggtggtacattcccagcgctgggcccgcctccaccgctgcattcaccaccggtctcctgtagcagtcagcacactgcccctcccccgcctgcagccactaatcttctgtgtccaggagtttgcctaggctgggccttccctgttaagggaactatgcaatatgtggtctttaagagacttatttttgcaatcttgaaataattcctgtacttaacctctcacccacattcccatctcactcagtggttgtctgttctctgtctaggcattaggacacttaaaggcctgtgacttgcacatcgtcttctaagccgggtctgaatctttcgctcatttcatcacagtttagacacagaccaatatattacaatgattcaacgatgggctatgaaagctcagccatgcaaatctaaactcacacatgtatacatgaaaataatatatcagttttgggcaaaacatcaggtttcagaaaacactaccaaggaggaaagcaaggacttaaaactctcaaggacatggcaacagaagtcgtctaacgtaaaacagagagggaaggctaagagagtgagcagagcatcagtgagctgtggggccgcttcaagcagtgtgatttgaagtcccctgggggtggaaggatggggagaaagacattttaagaagtaatgattgccaggtgaggtggctcacgcctgtaatcccagcactttgggaggccgaggcgggcagatcccttgaggtcaggagttcgagatcagcttggccaacatgatgaaatctcgtgtctactaaaaatataaaaaattagccaggtgtggtggcatgtgcctgtaatcccagctactcaggaagctgaggcagaagaatcgctggaacccgggaggtggaggtttcagtgagtagagattgcaccactgcactccagcctgggagacagagcaagacgctgtctcaaaaaacaaaaacaaaacaacaaaaaaaaataatgattgaaaagtttttttaaaactacaaacctacagacccaagaagtttaacatacctcaaactcaagaaacatgaaggaaactacaccaagatggaaagcaaattgctttatttatttatttttttattttttgagatggagtcttgctctgtctcccaggctggagtgcaatggcacgatcttgactcagcacaacctctgcctcctggattcaagtgattctcctgcctcagcctcctgaatagctgggattataggcatgtgccaccatgcctggccaattttttgtatttttagtagagacgggattttgccatgttggtcaggctggtcttgaactcctgacttcaggtgatctgcccaccttggtctcccgaatgctgggattacaggcataagccaccgtgcctggcctcaaattgctttaaatcagtgaaaaatcttaaaagcagctgtacacacacacacacacacacacaagacattgtgtacagaggaacaaagataagaatgattacaggccaggcgcggtggctcacgcctgtaatcccagcactttgggaggctgaggcgggcggatcacaaggtcaggagatcgagtccatcctggtaaacatggtgaaatcccatctctactaaaaataaaaaaaaatagctgggtgtggtggcacaggcctgtaatcccaggtaactcaggaggctgaggcacgagaaccgcttgaacctgggaggtggaggttgcagtgagccaagatcacgccactgccctccagcctagtgacagagcgagagactccttctaaaaaaataaatgaaaagattgcagtgattgcagacatttcttcaggaataatgcaagtcagaacagagtggaatcacacctttgaagtgctgagggcaagggagaagctgactgatagtgtcaggcgtctgtattcacaggctctgcgtctgtggattcaaccaaggatcaaaaatactcagaaaaaaattacttgcaccgaaatgcacagactgctcttccttgtcattattccttaaacaatatggtataacaagtattcatttagcatgtacatcgcatgaggtattataagtaatctcgatatgtatatattttagaaacagggtctcgctctgtctcccaggctggagtaggataatacggttatagctcactgcagcctcgacctcctgagctcaaccaatcctcctgcatgactctgccgagtagctgggaccacaggcacacaccaccatgccctgctaatttttattttattttattttttgtagagatggtatcttactatgttgcccaggctggtcttgaactcctggcctcaagtgatcctcccacctcagcctaccaaattacagagattacaggtgtgagtcatcacgctcgccgctacagatgatttaaagtgtatggaagaatgtgcataggttatatggaaacactatgacattttgcataagggacttgaacattcgtggattttggtacccatggcaggtactggaaccaatcccccagggatactgaggaataactgtagttctatgcccagcaaagatatttttcaaaaacaaaggcaaaataaagacttttttgcacttacaaaagctaaaataatccatcactagcagacttgcagtacaagacatgttccagaagtccttcagacaaaaggaaggtgagactggatagaagtcggggtctccacagaagaatgaagagactggacgggttaaagctatttattacgagccttaccacaaccactgcaatacagcaacaaagggtgatggctaataaatcaataaaggagagaaaatggaatcagactctcaaaggggcagaaagtgagatatgattgtgccactgcacaccagcctgaatgacagacctcacctctaaagtaaataaataaatgatacaaaaattaaaaatgcaagaggcagaaaaaagaaaaatagaacaaagagcacacgggacaaatagagaataaatagcaagatagtagatttaaatccaataaaaaaaaatcacatgagatgtaaaaggtttaaacacgtcaatgagaaagcagagaccagaatggataaaaagtcagaacttggaggccgggcgcggtggctcacgcctgtaatcccagcactctgggaggccgaggcgggcggatcacaaggtcaggagatcaagaccatcctggctaacacggtgaaaccccgtctctactgaaaaatacaaaaaattagccaggcgtgggggcgggcacctgtagtcccaggtactcgggaggctgaggcaggagaatggcgcgaacctgggaggcggaccttgcagtgagctgaggtcccagctctgcactccagcctgggcgacagagtgagactctgtaagtcagaccttggagtgcccgtaagaaactcattttaaagagaaaggatggaaagtgcgcacctccctagcgctgtcgaaaggcagctggaataggcatataaacactaaagtcaatttccaggaggcgggtctgaagaaaaagaagaaaacaaatactaaagtagatttcagagccaagaattttgccagcgattctggtcatttcatagtgaaatagggggcagaacattttcctgattaaatgcatctaattagaaagcttaaaaatacatggagcagggccgggtgcagtggctcacacctgtgatcccagcactttgggaggccgaggcgagcggatcacttgatgtcaggagttcgagaccagcctggctaacatggcaaaaccccatctttactaaaaatacaaaaattggctgggcatggtggtgtgcgcctgtaatcccagctacttggcaggctgaggcaggagaatcacttgaacttgggaggcagaggttgcagtgaactgatattgtgccactgaactccagcctgggcaacagagcgaaaccctgtctcaaaaaaataataaataaaaaataacaaaacaaaacaaaacaaaccatggagcaggccgggcgcagtggctcacacctataatcccagcactttgggaggccaaggcgggcagatcacaaggtcaggagttggagaccagtctggccaacatagtgaaaccccatctctactaaaaatacaaaaaaattagccgggcgtggtggcgtgaacctgtaatccagcgactcgggaggctgaagcaggggaattgcttgaaccagagaaatggaggttgcagtgagctgagattgtgccactgcactccagcctgggcgacagaggaagactccatctcacaaaaaaaaaaaaaattctgggcacggtggctcacgcctgtaatcccagcactttgggaggctgaggcaggtggatcacctgaggtcaggagtccgagatcagcctgaccaacacggagaaaccccgtctctacctaaaaaaaaaaaaaaaaaaaaaaaaaattagctgggcatggtggcgcatgcctgtaatcctagctactcgggagcctgaggcaagagaatctcttgaacccgggaggcagaggttacagtgagcagagattgtgccattgcactccagcctgggtgacagagtgagactccgtctcaaaagaaagagagagaggagaaagacagaaaatcagaaaggatgcagaagacctggacaatgccatcaaccaacttgctctagttgatgtttatagaacaccccaaccacccacatcagaatacagtcttttcaactggataggtaacatctaccaagataaaccataatttggaccataaaatatgtctcaataaatttaaactttagaaaaatatgtcctcaaccacgactgaatttaatttcaaatctaatgtaaagatatttgagatattgtaaatctccgaacatttggcaactaaataatacatttctaaatgtctcacgggtcaaagaaatcaaaagggaagttataaagtatttagaaatgagcaaaaatgaaaacgacaacatcaaaattcatggaatatagctaaagaaatacttagaaaagtatagcaatcacaaaagaagacaagtatcaaattattaatctcaacttctgcactgttgaaaaggaagagtagaaaaggaagagtaaagtaagcagaactgtgcgtcagtttccattgtatttctaaatacaataaaaaacagaaaaaccgtagagaaaagctcaaatgaaaccaaaggctggccgggcgcggtggttcatgcctgtaatcccagcactttgggaggccgaggagggtggatctcctgatgtcaggagttcgagaccagcttggccaacatggtgaaaaaccccgtctctactaaaaatacaaaaattggccgggcgtggtggtgggcacctgtaatcccagctactcgggaggctgaggcaggagagttgcttgaacctgggaggcagaggttgcagtgagtggagattgcaccattgcactccagcctgggtgacagaacgagactccgtctcaaaagagaaaaaagaaaaaaaactgaaggccggttctctgagagaagcaataagatgtatcaacctctggccagactgagcaggaaaaaagagaaaaacaaatgaccagaatcaggaataggcggtgacagcagtaaagattctaaagatactggatgggtgcagtggctcatgcctatactcccaacactttgggaggccagggtgcacaggccgcttaagcttagaagtttataaccagcctgggcaacatggcaaaaccccatctccacgaaaaacaccaacaattagccgggagtggtggcacatgtctgtgattccagctacttgggaggctggaggtgggaggatcacttgagcctgggaggcagaggctgcagtgagctgtgatcatgccactgcactccagcctgggtgacagtgagaccctgtctcaaaaataaaatgaagaaaaaaagcttctgtagatattgaacgtatattaaggggctattatgaacaactttatggcaataaaatcaacaacttagacaaaatgggcaaattcctcaaaatacataaattacaaaagctcactcaagaataaatagataactttattttctctatatctgttgataaaattgaactggtaattaaggaccttctcataaagaaaatgcctctaacagatgtcttcacgagctaatcctactaaacatttaaggaagaaataataccagttctattggtaatacgaactcttccaagaaactgaacaggaggggatactttctaaagcattctatgaaacaaacataactctgatatcaaaaccagacaaaacagaactacagagcaatatctgacaggagcaaagatgcaaaagttatttttatttttatttattactttaaaaaaaagtttcaagagacagggtcttgctctgtcacccagactagagtgcagtggtgtgaccatggctcactgctgcctcaatctcatgggctcaagcgatcttcccacctcggcctcctcagtagctgggaccacaggcatgccagaatacctggcaatttaaaaaaatttttttgtagagacaagagccttgctatgttgcccaggctggtctcgaattcctgagctcaagcaatccttccacctcagcctcccaaagtgttgggattacagttgtgagccaccatgcccagcccaaaattctttttttttttttttttttttgagacagagtctcactttgtcactgagactgaagtgcagtggcacgatctcggctcactgcaacctctgcctcccgggttcaagcaattctcctgcctcagcctcccaagtagctgggaatacaggcacccgtcaccacacctggctaatttttgtatttttagtagagacaggtttcaccatattggccagggtggtcttgaactcctgaccttgtgatccacctgcctcggcctcccaaagtgctaggattacaggcatgagccaccccacccagcccaaaattatttttaaataatgttagccctgtaatcccagcgctttgggaggctgagatggacggatcattggatgccaggagttcgagaccagcctggccaacgtggcgaaatcctgtctctacaaaaaaatacaaaaattagctgggcgtggtggcgggcacctgtaatcccagctactcaggaggctgaggcaggagaattgcttgaatccgggaggcagaggttgcagtgagccgagatcgtgccactgcacttcagtctcagtgacaaagtgagacactgtctcaaaaaaaaaaaaaaaaaaaaaacaaaacttagaaataaatttgatgaaagatgtaaaagactgtacactgaaaactacaaaatactgttgaaataaattaaaaagatggacaaatatagagatatactatgttcatggattggaaggttcgatagtgttaagatgtctgttattcccaaaactgatgtatgcagttccaataaaaacccagcagtgtcttagtccatttgtgctgtcataacaagacaccttagactgggtcacttataaacaacaaaaatgtattgctcctagttctggaagctggaaagtcccagatcaaggcaccagcatatgtgatggctgatgagggcctgttccgctcagatgctgccttcctgccacatcctcatgtggcagagagagaaaatcagctcccccaggcctcttgtaaaagggcactaatcccattcatgatggctctcccgtcatgacctagtcacctcctaaaggcccctcttcttattttttatttatttatttttttgagatggagtctcgatttattgcccaggctggggtgcaatggcatgatctcggttcactgcaacgtctgcctcccgggttcaagcaattcttctgcctcagcctcctgagtagctgggattacaggcacgtgccaccacgcctggctaatagttttgtattttcagtagagacagggtttcaccatgttggtcaggctggtcttgaactcctgacctcaggtgacccgcccgcctcggcctcccaaagtgctgggattacaggcgtgagccaccgcacccggccattgttttaaagacccctcttcttaatgccaccacagtgcagattaggtttcagtatgaatcttggagggatacaaactcagaccgcagcaagcagggttttttttctttctttctctctcaaattcttggaaggttgagcagggcagggtcaccaggcctgccggcaactgctccccttcctctcatcctcctgtagcttcttggactcctgggccaattgatttttctgttccgtgatgtggagtgatcaaagctggttctgggttttctggagctggatctttgattgcctttgatttaaaagcattggtaaccgtttctcacgggaaagaggcgctgataattcatgcaaatgagcatcaatgggcaaaattcaaccaagtgcctctggaaccaaggctgccattgaacattctagtaaaaatggggtggaggcttttgcccaagtgctctggataatctgggaaaagaaaatggtgagtcagtgctttattttatttatttatttatttatttatttgtttgtttttgaggcggagtcttgctctgtcacccaggctggagtgcagtggtgcgatctcggctcactgccacctctgcctcctgggttcaaacgattctcctacctcagccacccaagcagctgggattacaggcacatgccacgatgcctggctattttttgtatttttctggtagagacagggtttcaccatgttggccaggctggtctcgagctcctgacctcaagtgatctgcctgcctcggcctcccaaagtgctgggattacaggtgtgaatcaccgtgcccagccgaattttttttttctttttttttctttttagatggagtctctgtcacccaggctggagtacggtggcacgatgttggttcactgcaacgtccgcctcctgggttcaagcgattcttctgcctcagcctcccgagtagctgggattacaggcacgtgccaccatgcccagctaatttttttagtagagacggggtttggggtttcaccatgtgagccaggatggtctcgatctcctgacctcatgatccccccgcctcggcctcccaaaatgctgggattacaggcatgagccaccgtgcacggcctttttttttttttttttttaaatagaggcaaggttcaccatgttgcccagccttgtctccaacaagctcaagggattcacctcctcacagacagtgctcccacaggcgtgagccaccacgccccaccttatttatttttatgtatcttaacttccaaggtggatttatttaaaggttttacaataactatgtccaggctttaggctcatgggaagtaaatgaggacacctttttcccaagaagaatttctttaaaaccaagcacattgctaaataacaacattatatttggcaaacaataattggcaacaaaataagtttattattctgcccaagccagtcccagatgctgtttcttaaccaagatacaaacaaattttgctgtagcaagtctagaccaattttatcaaacatgtctttggttagatgtctagtttcatttaacgttttgaaaactcatttgacagccagtcaagtccctcatctacaccagctccgtgttgcacaagtggcttgaacataccatgtcctgttaggaagagactgaagagctggctggctcatctgtcgtcacactgatggcccgagcgctgggcaaaccctgtttgtttgcagagagcagtggcgctgcgtctccacactcaccggccagaagccttttctgcagcgcgtccgccacttcccgaattctttcatgatcgttgctatctaccagcaaaagaaaaccctgggtattctggaagtaatgcttccagagaagcctaattacatcttgaccatgaacatcccacaccatgaaacaagtgttctctttttgagtcagagtctcgctctgtcatccaggctggagtgcaatggcgcaatctcagctcactacaacttccacctcccgggttcaagcaattctcctgcctcggcctcccgagtagctgggattacaggagcccaccactatgcctggctaatttttgtatatttagtagagacagggttccaccatattggccaggctggtcttgaactcctgaccttgtgatctgcctgcctcggcctcccaaagtgctgggattataggcatgagctaccgtgcctggcccaaaacaagtgttcttatattctactctttccatgttaaaaccaatggcaggaactgtggtgagtacctcccctaacttcagtttatacacaatgtataggcagcatccaatcgaaccgtccaaatgtgcatctgcttcttgctgaagaggcgggagaagagagaggagatggcggggaccatgggttcgtggcacttgtgatgggcagaagcagaggggcttggggggccctgtgctttcttctttcatgcttccaggcaaattgaacaagggggaagagaaagaactgaggaagaaagagggaggcagggacatctcactggcccatgtgctggtgaagctgtagacaggaattagcaggacgaggacctgctggtgatggacacagcagctccagctctcgatgctttaaatgcctggcttggagtctgaaaaaggaacctgaaagcctctatgactgccttaaagtaagtccttatctcctgtagccatggggctgagatttctgcaaagcaaacctgaagcctagtctcctggatgatttaattacagcctaaactgcagtttcgactttgcagtgcctcttttgttaaagttagggaagttgggaaagaatgggaacctgacgttgcaatgggggcatgtgggcggcaagccacccaggtgccgaggcaagagaccgagggcacgagctgttccagtgtaataaaatatataaaacaacaagagttataccagatacagatcatagacatgattatatatgaatatctttcatcattagtttgtagcaattactctttataatgcttgctctataatcataatctaggaaaaaccaggccatacagagacaggagctgaggggacatggtgagaagtgaccagaagacaagagtgtgaaccttctgttacgcccggacagggccaccagagggctccttggtctagcggtgacgccagcgtctgggaagacgcccgttgccagacggaccgtggtctagcggtagcctcagtgtcacggaaaaacacccgctacttagcagacggggaaagggagtctccctttccccgggggagtttagagaagactctactcctccacctcttgcggagggcctgacatcagtcaggcccgcccgcagttatccggaggcctaaccgtctccctgtgatgctgtgcttcagtggtcacgctcctagtccgccttcatgttccatcctgtgcacctggctctgccttctagatagcagcagcaaattagtgaaagtactgaaagtctctgataagcagaaataatggcgtaagcggtctctgtctctccctctctgtctctgccttggctgccaggcaggggagggccccctgtccagtggacacgtgacccacgtgaccttacctatcactggagatgactcacactccttaccctgccccttttgctttgtatccaataaataacaatgcagccagacattcggagccactaccggtctctgcgcattggtggtagtggttccccgggcccagctgtcttttcttttatctctttgtcttgtgtctttatttttacactctctcgtcaccacacacagggagaagcccaccgaccctgtggggctggtccctacaggggcatgtgggaagatcccagtgaagctgaggaccacgagccctgcaagtccattgggatctgccggtgaactccgcaggtcgtctttgaaggcacatgtggctcttctgccactgcctggggagctgagacccctttgcccaaagaccctcaagtgccttccctagggagctgccctgtaaggtgccgccgtcctgcccgggactcaccaccacctctgtgttccttctagacctagatccagactggagttccagcaggccccaaaagagaaagtgtgaggtgtggcctacaaatatgtttccctacgaaaacctgcggaaaatgtgtggaaatcgatgttgagagtgcgggatctgggtgggaggaatataagcttgcgtaagtggacagggactcagatacgagattctggatttgatgcgttggagggaacggctgggagtgacccaccccccacccccattttcttcatcagtcaccgaaactttcgccccacaggtagctgaccctaaattcagtgaaatccagaactttcctggcacactggagaggacggcagaacgctgggatggatttatcgtgcaagaccagcttgatgtccttagggcttggaggtcaccccttcacgaggattgtgaggagtgaattcatcggggagccccgcaccctcacctgcaccctcacccccacccccacccccacccccacccccacccgcacccccacccccaccctcccccccacccgcacccgcacccccaccctcacccgcacccccaccctcacccccaccctcacccccaccctcacccccacccccaccctcacccgcacccccactcgcacccgcacccccaccctcacccgcacccccaccctcacccccaccctcacccccaccctcacccccacccccaccctcacccgcaccctcactcgcaccgcaccctcactggcaccctcacccacaccgcacccacacccacatcggggaagagctccatgatcattcttttctgtaggcgaaaaactgcggcgggaactgctgccatgcagctgggctcccaatgcagtggggatggtggcgctctgggctggcgggagctatcctgccggacgtgattcccagcacagccgtgagcggcagcagaggcgcagtcatctgacccacatagttcctgcgttgcctgatgggcgcagcttccctagaactgaaaaaaaaggacatcctgccaaaggcgtccccgttctgtgctggcagaaaggctgtaggtccgagagcaggagtcctgcgctctgactggaagccccaacacagagtccggggccctcggccaagttccagactctggacagacccaggcccctggaatgaaggacagactgagtctccgagaggaaggggccctgctaaatgccaaaaacatgcagctaatcttcccaccgccccttcccaaaggaatcttcctctgtttatcaggagtctgtgcaacgggaatgggaaataatcaggccttttaggaattactagaccctggagctgaaaggacattcatttcaggaggcccagatgccaggcagagctgtggtttatggaggcggacgacggagttggttcaggttttcctctgaggaggcccagtgagcctcccggcctcctgtggaacagacatactcagccaatggcagggtccccacatggtcccctgagccctggagtgaggtcggctgggagcagcagagcagccggaggaggaggagcaaaccccaggccacagcgtgctcctggagggaccccgattttgtcaaaatttagatgcagagagaaaaagattaaggaaaataccaaattaacgacagcagtgactgctgggtgtgacgttttgggcaggcttggttcttctcccttttgctaggtgtcccacaggaagacggacccagcatgtggggacctgcacccagccagtctcgccctggctcagcctgttcactggcgctgccctgccactgagggctgaggtcactgtccgtctgggcatgtctcatgtggtctttccttttctccccttctggttaggccccctgagctcagccacagccacgatccccactgccgcctcctccctgggactcgctgatgcctggtgtggggagggtgctggctgctttgggtgttaccccccgttggaggcccccgtgccgagttctcgagtgagatggctctttccattttcccccgacagctgcctcggcctctgtgctagaacagggagctacagctcagtgaccctgtggtgccttgtgggcctgtgggtgccagggctccggggcctgggccttttcctgcttggtgtggctgaccgggacgcggccgaccccaggggcatactggagctaggtcttcctcgccatgtttccacagtgagccctttggctgcacaggtcacggtctggagctgttggaggaggctgctcagagctgttgctgccccaccagacacttggccaaggggcctgcaccggtctgcgcgggaacgtcccaccggcgtctgctcatggctgggctgtggacccatacgcttgttcggaagccaagctctggcccacaggcgaccagaggaagctcgcaggccaggcgccagctccccgagcctgtccctgcagccgcgctgtgtgcaggcacgtgggccaccgcgtctcctccactggcactgctgggtctgggccgccaagcccacctgcccacctgcatcctcagcagcagcacgccccgcagtcggcgggtgcacactctgctgcagcctggatgggctggggcctcggggctcactccccaaccatgagactccttcaccgcagttgaggctgttgcagtggtctcgggctcccactcagccccaggagagggtctgaagggggtgagtccctcctcccgaccttcctgcccatcgtctccagagctggatggtgctgggtccccacagggagcgagacagctgccccgtgacggaaggatgtggggacccgcacccggccggtctcaccctgggctcagcatgagttcagggaggggtccaaagggcactcctgcccacgcccaggcaaaccagcaacaagaaactgggtggccagggcgtccgtgcacgaccccaaacttctccgcgttagaaaaaggctgatgaagacccgagacagaaacttcctgtagctgtttattctactgcgagtaacaaaacctaggtcgttccatgttctcatgtacagtgatataagcctccgcaatataaaatacaatgtacaggaatctctatcaagtaaactaaagaaacacacttgatttttacatttgtgtatttaaattagaaaaatttgctttatatgttaaacaaacaaaaccttctcatcgtactagatgttggaacgtgacacctactttaatgtaatttaacctatggacacttggctttcaacaccaaacatctcaaactgatacattctcaatgttttcttaacttaaaaaatctgtgctataaagtgaaaaatctgtagtgacgtacaatggaataacagactccaaagaacaagtgaagttctttaattttacatctgtaaaagtttatgaaaatataaaaaattatcaaagtgtatttgtacaaataaattagccagatttttttacttcacacttcagaagtactcgaaaaatacacgacaagcaagagactgtttcacagtgaacagcttcctgtctcatttgcagttcttgagctagtgatcactagttcccgtctcagactttacacaagtcttgttccacgttcaaggacaaacttttacatgtatcgtctgacaaataccagtttggggccgagcgtacttttcccgggatacagaagaactgctcagaaggcgaaactggaccaacaaaactcctgattattcaaatcaaggactcctccctgcccccaaagtacacttaattggtttgttactttttttaggctggtaaaacttaacatttttcaataaattgttatttaaaatgcaacaattatactaggacagatgttgctttaaatcatgttttggaaaaaattgataaggtgatatataaaatctgagcacgctaagaaatgtgtttctgtttcccagttgaaaattgtaattccaattttatgacaaaagaaagatgcatttgtaaggtttgtgtttctcaagactccagatacaagctactaagacttctcccgtagccgcagggtggacgcctgcaggtcacgcccacaccggcctccggggcggcggctaagacctgtaaaagcagcttttggaaacacaaacggatgagatgtcagtgaaggtatggctctagggtccaacgaaactcccttaaaatttacaataaagttattggaaaagataactatgatctgaaaagcaatatgctccgtaggcaatttcccatttcttttaattttaaatggaaatattaaagtttagtttttttaaaaaagcatcagaattgtaaagatgtgaaatcttgtaagaaaccatttacacaaaattacagtaatgtttaagtccagaatattctatcctgaatctaagatcgtggctatttcaaaagctatttgttcaacgcatcttacgaacgtggctttaaaaagggtctctgcccggccggggcgtctaggcctgcgaggcggtgccagcgtcggaggccctcgaggcctcgggcttcgggtcccgagcgctctctttgctcttgctccggtccttgcggtcgcggccccgctccctgtccctggccttgtctcggtcccgctctctgctccgggaccggtcccggtcgcgcctccggtctcgctcgcgctctcggttcctgctccgctcccggctgcggtcccactccttgccccggtcggcctcgcgctctcggtcgcggttggcgctcctctcccggtttctgtcccagtcccggctggagtccttgtcccggtgtcggtcccactcccggggccggtcccagtcccgctctcggctccagtttcggccgcgctcgcgctctctcctcctgtcctcggacgcccggccctgggcgtcgggctcctccagcggcttctctttgggccccacgtcaaaccgctctctctgcctcccttcgaaagtctggtttctgtattcgtggcctttcccctctcggaagtcggccgatgcccactgtccgtcggcctcggggccctgtccgggcgcactggaggagagcgcggagggcggcccggcctcctcccagcggtccttccggtgctgcggggggtggctgggaagctccagcaggggcctggggcccggcttcatcacctgcggggcctggccctggaagtgaaatcgcgaaggggtctgctcatttttttcagaaaagggtgcggacccccgtagtccaccaaactgcaggggtgcaggcgccctttggtttgtgaatcttggtggtgaatggaccctctggtcttcgaactgctgaggctgaatgcccctgggacctggcataaagttaggcgcttggcctctgggtccttcaaactggttgggatgagggccccgggcagtttcaaactgactaggatggggccctcttgggcccacgaaatgaccagggggtggtcctctctgacctccaaactgagagggaggggggccgcctcgggggcctttcagctgagacagcagtggccttctctggcctccgaactggaaaggcgcgccgcctctgcttcccagaaatggggcttgctctgtcccttcaaactgggcgggggcgcccgtcacctcgttatacggggcgtcctggaactccctcttctccccatggggatccttgcgttcttcaaattgggatggtgccactcctcgtggtccaccaaggtaagagggtgaggggcctctgctgtccccataaggaggtggcccatgttgccccgagaataaggaagggatgggccccttctgggctccgaatctggctggcggaggccctcgtggcccatcgttagaagcgatattctcttctggaaacggaggggctggcccccttggtcccgggaaattggggccgtgaagccctgacatccccaaagcatgaggtccaggttcccgctgaccctgaaacgggggctgagagccccccactttctgtcctggtggggggagcggggcggtgccctcgccgggtctggcctgtggctctctgtccccctctgtttcacctgcagggctgctgctccttccagcagaatgaagatttcttgggtcctcatactgggctgagccgagagccttgtcctgcgacgcgaaccccgggcaggtgaaagggtccctctcaccgtcgtgctgcagcgggaagccgggctgcagggcgccgcaaggcggtgtgggcagcagcaccctccgggcaggcctggccgagctgtctccaaccgtggcggggcgggtgccctccccaggctctgccttccagccgtcctgctcggaccccgctgggggcttttcgcccgaagcccagggggaagaggctggctctttttcctccgggactggcatgggcgcctggcccacgaggccacccctggaagcatctctctcgggcagggcaccctgggcaccacgtgccgagagcctggagagaggctccccctccccctcaccggtctcagtggccaggcgcctcgcctgccgggggtccctgtggtttgacgcctggctggcggggggcagtgaggcgggcttgtctgcagactgctgctcttgctggaacagctctgccttgggcaaggacgactttggtggtggagacatcaaggcgtccgacaccgagaagtgggccatggagaccccgacggcggccctctgctgcctgagagcttcttcttgctcctccagctgtctcttctgctcctcgatctgtttgttcagctcttctagcatcttctgttgctccaccagggagggcgtcgcagccccggccaccggctcggcaggcctctccacggagttccttctcacgtcggcacacatcctgttgggcaggtcatcaacagtcactttcgcttcttctaagatggtctcatcctcggggtcataggccacctcttcccgctcggctgcagctgcttcaggagccctttccacctcgtggcgccgccctcgctccacaagctgagtgtcgaaggccctctccgggtcgtactcctcctcagggtcgtatggcctgtcgtcctcctcttcctctagagccttatcttttgagaactgaccgaactgctggacgatcggatctaacaacggaggtgccggcaccccgtcctctgctgtggttttgggctcctgggggagacctgcggtggacccgggaggctctctggcggacgggtcgaatgatttcttctttccaaagagagtctgcaggatgtgctccagcggtgatgctgttttggaagcagacgaagcggtggaggaagctgccgtggaggctgccgctgctgttgtggctgctgtggctgggctgggggctgcaggtttgagggatgacagcacttttagcaccggtggttctggaagagggggcggaggcggcggcgacccaggaggtgtggtgctgacagccgcgtctgcagagcagagtggatacttggagggcttcttttccgactgcgggactgtggctacttttggataggccggaacgtccgcttcttccggttgaagtcgggtccgcttttcgtccatcttgtctaactctccactgtttgcgggacgtttgattttttggcagattactaacccaagaattatattcggacgtggtgactcaagacctgaaaaacaaaatatttgtgcaaattttagaatctaaatccagcttttaccctttagaggtgaatttcattaagggctttcacggggaacgtttaatagacaaaaataagccattctgtggcaaaataagatcaagtgtcaagacagttgcaaaagcctggacgattccgccccaggaacgcaccgccccgggaacgagctgggaacacaccgtgccaggaatgcaccaacccagtcctcccggagccatgtgaagggggcgactaacccctcgtcaccaaccatggaaccgaaggcccaatccacaagggaattcatcccaatcgtctgaatttgttacatattttaaattataatgctagagcagtagtgtggaggggagggaggccgtggtgtgagcctgcagggtgaaaagggcattgtcgcacatgccctcaacacaacagctcagctatgctcttcttcccctcgtgccactgccaggaaggtaacaaacagcctttttttttttttttttttttttttgagatggagtgtcgctctgttgcccaggctggagcgcagtggcgcgagctcggctcactataacctctgctttccaggttcaggagaattctcctgtctcagcctcctgagtagctgggattacaggcatgcaccactatgcctggctaatttttgtgtttttagtagataagaggtttcaccatgttggccaggctggtctcgaactcctgacctcaggtgatccacctgcctcggcctcccaaagtgctgggattacaggcgtaagccaccgcacccggacccctttttgtctttaacttaggagttgcaacacataattactctaaatatactaatattaaattatcaataaagtcataataatcaataaagcacaagccatgaggtcatccattagtctctggtgtcagaattacaactagacaggaaaaacagcattaaatgaaatggctaaaataaatgctttggactgggcatggtggctcacgcctgtaattccagcactttgggaggccaaggcgggtggatcacaaagtcaagagtttgagaccagtctggccaacgtggtgaaaccccgtctctactaagaatacaaaaattgggccgggtacggtggctcacgcctgtaatcccagcactttgggaggctgaggtgggcggatcatgaggtcaagagatcaagaccatcctggccaacatggtgaaaccccgtctctactaaaaatacaaaaattaactgggtgtggtggcgcacacctgtagtcccagctactcaggaggctgaggcaggagaaatcgcttgaacccaggaggtggaggttgcagtgagccgagatcacaccactgcactccagcctgggtgacagagtgagactctgtctcaaaaaaacaaaacaaaacaaaaaacaaaaattagccaggcgtggtggcgtgtgcctgtagtcccagctactcaggaggcttgaggcaggagaactgcttgaacctgggaggcagaggttgcagtgagccgagatcgtgccactgaactccagcctgggcaacagagtgagactctcttggaaaaaagataaaataaatgttttgggtttagaaattcagtgagcattaacatatcaaagactccctaaggctcatgtctttgtaaacacaggacagacaccacgctcacgtaaagcaccgaggtgctcagcaaacaggtggcaaagagcagagcaggtggacgacgcgcactgggggttttaaggcacagtattagtttaaaaaaaaaattattcaaagatattcccaacgtcgtaagttgtggtaacttcaatcaggagtactaacattccagtaacgaccatccccacactcataatcaatcaagaatgccaaaggggaatataaaaacccacatcccaaaacaggagctgaaggaaagtgatacacgtgggtgggacgtttcagcggcagcgacgtaacactatgtgagattaaaccgtaacaactcaacggtacagataatttaacgtgactgtggtatacaaaaggtgctcacactacagattttcttccccttacagtgaaaaccagtatgatttcccgtgcttcaggtgatgttaaagatcatcacggactgcttcaggcaccaccatgtagttctaagtacatctgttgttcatctccctaaattccactaaggaactgatggacaggctgagcacggaagatgggtgaaggcaggaataccaggcctgccagactgagttgggaccagcctgctccacgggacacttcctccctcctggagagaggaccaaaggcctcttccttcacaggctgctggacagagctgagattcccagcacctcacctccacctcctcttcactctctgtcccccggatagtagcacggtgccagtgaaagggctgggtgggcagaggaggagggaagcaggaaaaccagccgggccacaccgaagggcacagctgagctctgctgctcagcaaacctgtcgagttcatgttctgcttaacatgagttgaacatattttaaaacggtatttctctcagcacaacagctatctgtttactgaataagctattacacagcttactcaaatccacttttcgggtatgttcggttatgaaattggctattatggccttcctggaccatacatctgcagagcccaccacgccctggggtgaagggcactgaggctcaggctgagttctgtaagccgggctctgtaagccaggccctctgcctgcagaacctgacacggggaacagacacaggcatgggctaggcctcgggaaggaccctgggcagtagggcttgtggggcctcgtgtggggaagttacctggggaagcctagtgctgactctgacacagaggggacatgccacccaagggagacactcagcttctaaagggctgttagggtggcagtgtgatgtacaaaatcactgttacgtggtcccgtctcgtggtgtgtcactagaactcaaacttttaatggctaacttgcttgttaatgaaaaaaataattagtatatcccaaccctggcaagactcgttagtcttgaaaacagcaaccgtctggagattggcatcaaacacgcagctggcacgtgtaaatgctcccagctcttggtgctctcaactgcaaacactggtgactgaataaagaaagctgcagagtcagatgggtgctcgttctgaatttccccgccatttaaaatttaaattgggctgtccaaaaaggcacacccgctgtgaaacagtcaaatcttgtcacccaactcatgtttgttattatgtatggttgcatgaatatgtaaaatgtggcaggcgccttggaaataactcttcgtggaaggagcagtgcacttcgcctggctggaccttgggagccatcttcccctggaggaaagggtgtgcctgccactgcctggcatgtccagcagaccagtaaggtcgaaaggtcacagagcccccacctcaggggggcagtcgaggttgcccaggggctgttcccaggctagcccctcccctcggcagctgccccgtggtgtgtgagccctgggagggagagtgccccgggaaggtgcagagactgaggcctgcacgaagctggcaccagccaggttgcgggtggcacagggcacggtaggcttacttacccaccttcctcctgagggctactgagggcctcagttcataaagcaaccaggggccggggctcaggagcaaccagggaccagggcctggagacgccagctgcggctaaacgtgcccctgcacttccactgaagggtactgatcaggcctggaacaagggtgtggatgttcccccaacgccctctgaaaggccagaaggcaaatggctttcttcagggcgtaccacgtgcaagccaacaggcctttttagcacatctgtgtcctttgcgtattcatgacggaggggtctggactcagtggtcagaatcagaccacacgcacaggaaaagaactcaagaaactgaagataaaagggtgtattcgaaaagctgtgtgggccaagaccaaaaccaggatctgtgtccaggtgtgtcgcaacagggactgggggacaaggcagctggcaaagggaaccacctgcttctcagggtgcaggaagcaccctcggtactgaacctgaggctgcaggaagacgctccttcttactaaatgaaccacccgaaacctgactcctcccaaccccaaactatcacagtgaggcctttacccctaaagccacctggcacatcccactatcagtgatttaaaatgaaaactctctcaatggtctgcacctgtcaaaacaaaatgttcacacctgctggaacagaaacggtgtggaagttaatcaacaaggggtgacgtatgacttggatagaaagacttggcaattaaggtgggaagaagtgacttcccccaacccaccaaacacacccactcacacacacacagaccctcccttgttccaactgggaatctctaagacctgcacaaagccactgggtccagcacgtctcaggtaagaggagagcgacgtccatcttcttctgggtgccggggtgccgagaagggccccagggcagcaccagcctgcactgcgtcctctccagcagctgctgggtgggctgcagagctgggcacactagggtgcactgcgctggcttatggaaagcaaacaggggcctaggataggtgaccaggagccaccaaatggttccaattcaaacaaacaaggaccagtttccatgaaagatgtttattgatttaggaggagaaggcagtacattccattcaatactgtatttgactctgattacaatttccatgcaaagctactgttacatacacacatgaaaactgaagaaatgcttacctgacaatatttcaagtcagaatttctcagctaatttagaaagcaattaaaagtgaatacagaaagacactatggattcaaacattcttcccagaagagctttctaatgtataaagacctcagagaaaagagccctttccattcgagcagctacagagggcggtgtttcctcctgccctgtacttggggagaacagactgtgcacccatgtttatggaccgaggttactccacaggcatttcagaccaaggctccgaggcctgcggcttcacgcggaaatgacgggggctgggcatggttaacaggcaggcatcttggctgcggtccagtcctgtaagggccctgcacagaaccctacacgatgagctttcaacctgactcatctcccttccatgaacaaggccctgagacaggccgggactctgcgaccccaagtccctgcggggggccctgttggtaaagctggaactgagtggggtgaacatctaggtggagaaggtcacctggaaccaggcctcccagctgccccccaccgtgatgctgagttacagagagtgcccccactgcggggcagaggggcagaggaagacaacccggtgtttctgtggacaaatcattaagatatgcaaggacaaatgtcctcagggagatccagctactgctgtgaactgcatggctcctgagggtgctgcgggggcagctccactctcactgcccgacaagggccaagtgctgacagggcgggtgacttaagtttcccctgagggcacagctgggcaccttcaggccttcacttgcttaagtgtgaacagcaagcactgagggggctaggactggacaccacgctgtcaaaacccactaggtccccatgtgtgggaggcatggacacctgcaattgtgtggtataaactgaggcacatggacgagtcagtcactcttttctgcgtgaatctctacccccaacaggaccttctccttaacatccccaggggaagatgctcccacatcagtgccctgatgcagacgggcagctcaaggctggggcgccaggtctccttcaggcctgtgctgcatgtgccgcagagaactgaggctgtggaatggagctgggtcctgcagaccctcacccagcacttctgggggcgtgactccaagctgcgcagcacacgctcacccctgaccacagctctgtggagtcaccaccatcagcaccctcaggtgtggcctgtgctgtccaagggcttctgggctatctccgtgaggacagggtccgctgagacaggggaaacatgccaggacctagccttacacacacacacgcgcgcacatgcacacgcactacacatttacaccacaaagccaggacacacatgtacatgtttatatctagaaaacgccaagtcaagtaatcagtacgtgaagcgggccgagtacccgatggcctggcccggggtgaaggctgtttagtgaccatggaagtgtgtgagatttcacgcacacgcattcatgtcaacaaggacatcaggagaagttaacattatactgaagtcttaagttaaaacatttctgaagtgtatggaaaggtttcactagctgttacttttctaaagtcccttgccctgtgttactttacccagacgcctctgctctttatcgtggatcaaagtccctggggcttttgtgtgtccccgtcaggcggcgtcgtggcctcagcaagtgccttggtgggcgagtgtgacgttcccccagctggtcgcggagctgacagtgtgggtggttggtgccatcgcactcagcagacaaggtgagtgaccccagcccagccctccttgtcccggtgccatccgggaggtgctgggagacctgtcctttccctctgccccggggctgcacctgcacagccagcccttgctgtggggagaatggaggcgccgctcctctggtggcctccctgggccccgtcactgcccagtgtggggaacccggtgcccggcatgcgccggggctcgctcaacaccctacaaccgtgctcacctgacagctccaagtttggagatgagcagggagagaagctcaagaaaggatgaaatatcgcctcaattgttttaaaaaggggaggctcgctatctaagaatcatgtttctgtaaagaaaaagtgctctttccaccccggtagggaggtgctgaggtgctgcagtgtctgcactgagtgcacacactgtcgcacttgcaactgaccagtgggtcttcacaggtgcggagaggccagcttctcggtcttcacctccaggagggccgggcttttcctctccctggtcacgtggagctggccagagctcttcacaagcaacaccaagaacctctaccagggtcctttctgccacccattaggtggcatctctttatcccaagtaggatttgaggggacacactaaagcactttgcttttaaaaatttatctggcactaaaataatttaatgcaccacgccagcaaatatttaaccctgaaattactgataccaaccaatccctttatggacatataattccacaacacaggcataggctgagcccactccagctgtgaagaatgggctccagtaggaacgtgggctgtgcctggggcgacagaagtcccgcccaagatgtggagtggcccctacaggaccccagctagctagggtgcggcatgaggggtgtgggtgggaacaccctgcacagctatggcaggaacacccgccgaggcctggtgacagggacagagggcactgaggcacagggtccagacagcacctgcctttatgacgaagcacttcagaggacactgtgtgatccacacacccgctttgagagaacaccaatcctctggggactgcatggccacggagacacttcagttgggcatcagatactaacccctaactgaagtcacatcagcttcttctaaggggctatgaaagagctggtcactaacagagcacgtggcccctggaatcaccctcaacccttgacaaagatgtattttaggctatttgtaaataatcgtttaaatacagtactttccaaggaacgtgcaaacacaaaatagcttgccaaagatgaatgaacctattacaatttgagctgcagattttaaaataattatttctagaaatagttttctatgtcattattgttaagtctcctggaaatccatccctgttagagaagtgatccctgatggagccacttcccggtgtgtgctggctcccgagtctgtctagaggaaagagcagggccgctgggagtgtcacctccctttctggctgagccttgggcttctgggcactgagtcttctctgacctgaggccaagatgagctggttgcaggctgtgggtttttccctctctaaaaaactctcctaagacaatttatgctgtgaatcaggggtacttctcgtgccacagtcctacgccctcaaagatgaatcctattgctaaccgctgcgtctgtgctcctaactcctgctcccagagagccctgggctggtcaggactcagcagggcatgtcagtgggaggaggggtgcaggtgcaggtgggcctcacctccacccagaaagccggcgcttacctggtccctcaaagggcaagagtttggatggaacagggtcctgggcgctcagcgggatcaggtagaggtccttgacgtgcctgttgttattagctacaacaccaaagcggccacggctgctgaaataggagtagagagagatataggcgacctcctcttcctctgtggcggggtggaagcggatcagacagagctcctgcaatggaagagtgggaagcactcataaagaaaatgtggctcaagcatcacacgcccaattcacatcctgctttcaacaggaaaccttgtcagatctctccgactcacagccacgatctcacagagctgctgtctcagtgaggcaattcacgtgacatgtgagcccagcagtgtctggagccgagccggctcttcctacatgcacgacggccccggtcacgaggaaccagctgcatgatctgcaatggctgtctgtgcccctccctagagggggttaaactagacgacagggtctagccctttcgtgaacctgacgaagactacagagattccccagagaaaaccacagacagacacgcacagctgtagctaaatctcagggggtcccagaaaaccagaaccgttcaagagcccaggttgagtgccctgagcctgatcacccctgcaaaagacaccttctgctccttcaatcataaaaaaacaagaaaataaaacgtatctatttcttcctaaaatttaaccgcacatacattataataaatcagaaacaaacttctaccgcggcacactcagacaccttcacacagtcatacaactatgtaaactttttttttttttgagacagtcttgctatgtctcccaggctggagtgcagtggtgcgatctcggctcactgcaaaacttaatttttaacattcacctggaaatatctagtaagctacaggctaacattttaagtgttaacccatccaaacgagaggttaaaaaaagatgtgtttaaatcaacacaattttccatggttgcagaatttatactataagcaggtaccttagacacagaagacttgagtttgccaacataatcccaaactgtcttcggtgcgatcctcccaccaatgtgaattgtgtcaggcaaatcctaaacagaaagtactttgcgtaaatcactttgaactgtagtagtcacagaaagacgaatgcagccatgtgaaggcacacactacccaagattcaagaagactacagctattccaaggaaaagagtcacacttgtattaaatgcattaagtccaggatgacaagtggccaaatccaaagggggagtgatgccaaccttctgccagacaagattatgtttagaaatgactgcccaacacttctatgctgtctttacgtacatacacagagagtaacgattcactatgagccagggtgactccttgcattaaagtcataaatgctagtgctgtcttctggttaattctgaaaactaaaaggcctgccacggggtcatatgcgccaccccgcaagtggccaggtgtgtgtaaagcaggctccgaacacctggctgtgccggtggctgtgcgcacagccatgtggtcagtgccccagcgaaaccgatcactgagaggccagactgcaggctcacatttccgaccctgtccaaactgctgaacctgcggactcatcacggccatcgccactttgcatttagagccgtttctgcatccagacagacggttgcaagagtgtcaggcatttctgtttctctcctacctcatgaattaagggagaaagtcatgtgtttgactctagtttagaaactcctatgaaagacacacacacgcacacacattttcttggttctaacctcactgaggtaatcaaaacacccagagacaggatacgccttagtgacaaattttgccacactctgcatgttaataaatcctttccaaatggtgctgagtcgagacaaaaagagggtcgtgtctccctctggaggggaacgtgattctgaagtgctgtaaaacaaaaccataaaaaaaaagtcaatgtctctctgtgcaatgagaatttcaaaagtagaaagccttttttttttttgagacaggatctcattctgtcatgcaggctggagtgcggtggtgcaacacagctggctgcagtctccgcctcccaggctcaggtgatcctcccacctcagcctttcaagtagctgggactacacgcgtgcattaccacacctagctaatttttgtcttttttgtagagatggagttttgccatgttgctcaggctggtttcaaactcctgggctcaagcacatgctgggatgacaggtgtgagccactgtgcccggcttcaagagtacaaagactttatatgtaaaagcaaaagtgaacgcttgcaagttttacgtttttggtagcttacttttgccaattacttactttaattaaaatgatacagacattttggttaaagaaaaataaagtgaataggcaacaaaactggatgagcacaaatttaaatgtcaatttctaagatctctacttccaaaaggacaataaggcaccctacaactggggctttttaaaagatgaaagagtgaagctgtatttcaggttacatttccaagttcaactatttaatcaccagttatctttcctttcgttaatctaaaaaaaaagtttggcttgttcagaccacacctgaagtacgcacctgatatttggtgacggaggaactgacaggtatcttgggtcaggagatgaggatggcttagctagtatggacttgggcaccatcacagaagtcaagacaggcttcggcacatcctgtctggcttccaccatgtgggtgctgtctgggcgggatgctgcggaggccacggctgtgcatgaactgcttggagcggtcctggggtcccggccggacactgtgacggtggtgaccaccccgctcccacaggaggctgggcagggggacaggtcttccagcggggagggctcgggatggccatctcctggaggcccagggaaatacgttctgtccacatttggatgagaagcactttctaggcctggctcagaggcaacttcaggcacagcctccggcatcacctcatcagctgaatccggagctgggtcaggtgcagagctgtcatgctttgattttaagtcttctttcttaacagaagctgacaatttttgttttttcggagctggctcatcttctgcggagggaacctggcctgaagaaggcgaggaaaggctctgtgagaaacccagccggcacactggtgtttctcacacaaagccgaaagcaatactctaaaggcagggcaggaaatcattctggcccttctgcgtgtttaagcttacgtgcggttgcttttaggaggttcagtgatttttaacaaaatcaagtttagtctcagctccaaggctccatcccctgcactgtgctcacctgtgcaaattttacagttgagatcgaagaggtgtgcgcggtgctgactggtggtgtctttcaacatgctgctgaagacgtcgagaagcggcgctgtgctcttctcagggacagcacgtgctgactcttgctgttcctaaaaaagaaaaagaaaaaaaagtgaggtcgtttcttctccaaactcagctccaaattaaccacacacaagaaaagcagtctcatgggattgagacccacgggggagaaaaaaggaccatctaatacaaggactgaggaatgccacaatgacatacacctgctgtaagctcaggtcctgcccaataatttaagataacctcaaaacatttgggatggattagtctattctcggtgaacacaaaatctcccaaatgcttacctctgaatccgacactggcggagagtcctccagatcggggatggcctcctgcctgggggccgtcttcttgctttcattgtgcagtttagttctggactccatcacctgaaatgaaaaagacgaaacagagcttaggccttgttttctaggaggaaagcatcgcttatgcagccgtctatgaatttatttctattaagctcgagtcctgggtgcctccgcaggtacccctcagcactcacagatctcgctggcctctctttccacgtggaaagctctttagatacaagttcttctggcttcagtctcacaagtttcgccaaagagatttcctcacgcagaacacgatggaagagtccctataaacaagtatttttcatttactcaaataatattcctatatctgtcaatacagagagcttctggaaaacacagctgcccagaagtttagcgggcacaggacaaaggccctcagggcccacttgcgtgtggcactgggcagagccctccctgcagggtgtgacctaactccccaaacggccttatgagagtgcgccccaggatatccctgctgtgagcaaatgggagcccagagagcacaggtaataaggttcaacagtgggtttcacggcctgtgctgcactggctctgctaaaaaaaaaacaacacacaacacctcaggaaaaacaattatgtacacaaggtggacacaagtcaaaaaggtagcgtcaggaacaaaggaaggaagaaatcatttctgtttagggctgttcaatggtgagatgcaaagtcagggtatttcattatcctaaaattctaaacagggaggagcctggaggccgatggagagagaacaccacaaggctgtcagcccggcggcctatccctcccagctggagtttctgtcctcgtcgcatggcccatgctgcagtgaggaaggactgatcccactacctgggcgtgagcagcccctgctccaagtggtgagaactcaagcagcccaaaccatcaggctcactcggctgatgaggaatatgagaaaataaggtggaaaaggctgtctgaggccggaatacggacaccctcatacactgggatgaagaactggactttattttggagcccagtgaagcgactggcttgtacctttacagcaatgtttacaggagactaatgtggtgataaaaggtggacttcagggaagccaggaagcggacgcgaccctagttaaggcagggaagggaaggggtttccaggacgctcaacgccagtgcaacaatacgtgggcggcagaaggatcacagaggagaaagaaacgtcttagctttcctggaaaggacacgaacatctcaaaatattggttgatccctttagcacccagcgaacagaacaggaatactccaatgcaccgacaccaggcacacacctgatttttagggtccttcaggttgaacatgatgctgcgatatttactcttgtagcgattatctgtaacttgaaacaagttaaacatctccttctcaatatggagggcaatttttcctacttcgttttctgtcatgattaagtcatcgctgtcattgactctgaacagaataaaaaaaaggaactacataagacacttgtgtatattaaactttttgaacagtgaggcaatcctgcagccacactctaatgaaagcccttccattttaatgggtaagaaatcaagcagaacagcccaccttttccacaaaatctcttttaaggagcgtctgatattttgccgaatttgtgaatttggctgcgatggtgcagcactcatagccccaaggcgtcctggggctggcgaggccattggaacagaaggtaccactggcttccttacggctcccaccaaagcagcggagccagggaacttcttggaggcagccgttgccgctgcaggtgccggtccggcctgcctggcagctgaagcaccactcgatggggtagcggagagccatggcctcttggggatggtgcccttgaaacctgagggtggctttttaatggctggtgtggctgctgccacattagcaaaagaagacttctttggcacgaggtttctaggtgcaggctgcttgcccaccgcggagcctggaggggctgttttctttgaggctgccatggctgccgctttctcctcggacctcctgtcttccttcgtggctacaaagaagaacacaggcgctgagtaagggaggacaccacagggtgctgtcacctgactctaaaaagcagacttacccttaaacctgtaagtgcccacctggcattactgaataggatacacatagagaaaaggatttgtaaaatgttagtgttcagaggagtgtaagggaggaccgccagcagcatttatgacggtgactacattttatttcagaaagaagaatgctttattattctatcttttaccttcaaccagcaaactctagttattaaaggcttgacttgcgcactagctaagcttcaaagctgaaggacaatttcctatcatcactttttaaaaggcagatttacagcagcactatcattatgaattcaagtgcaaactgtttgtaaacttcagtgaaaaagaccgtttagaagcgtaaaacaggctctcttagcccggtgggtggggtttacacatctcacttcgttgtccttccagactggagtccattggaggcgatgccattaataaaaatatggaaagctggcatacacctgaaccacaggaagagcagccacacctttacgtgaagagtgagaagctgagaacgcagcaatgctgttacaggaatgcgtccattcacagccctcaggctgtaattccattaagtgaagtatgaatccaaacaaggattataattaaaagctcaaagacatcaaaccccctcaacttgcacaaaaagctttctatgtcagtagagaatcaatcaccttataaccccatgtgagatcgtcagagcccaaaggccctcgagcaggggacagacggcgtgccaggggacagatggccaggggacagggctcgttgaggtgcaccgcatgccggggcagggatccagctagtggagcagagtgaaacgcctggggaatagggggcccccatgagggccccaggatggcagaggccatctcagctctacaggcaagtgcctgggagctacctcgggtgatcaagtcaacaaggcacctcctgaggaaaggcttttccaacgatcggtacagcagcaagcctccaaaactcccaaaggcctaaatgggagaatgtgacagatgctcccaagagcgcttcagttctacccagggactgaaaatcaaaccgcactcctcccccgtcgtcttactgaccgctttcaataaatgaggtaagtctgaaagctcaggaaagagccaagactctacaaataaggcctgattcaacagcctgccccagcttggtcctgcaggatatcccgcatgtgctgccaggcttggccacgttggcagcgggtgccagccctccccagcagccagtccatcaagcagcagcctcagggctgcaagtcttcccaacttcccagataagtacaactccttccatttttacaaaacttgcaacagtactacatggatccaaaaagcggtgtcactgttaacagataccccaactttcaaacaatggtgtcactgttaacagatattcgccccgactttcaagatttccatgtgttctttcctaaccatcattttaatggtaactaagtaaaggcaaatcctgtattttcatcttaggacccttctaacctcatggccggcccctgcctaccccttgctagatgtggtccagccacaggaccccctccttggcaacactgccaagccctgtctcctcacccacaaccgcaccccaaaacactcattcctgttggagctggatcttaaaagcgcactataaaaaatggcaacgtctaacacgacaggaacaaaggtgacagctagtttttatctgtccaggaaactttgcttttaattccacatgtactatgtcatcagatcaggtctatacaccccaggagtcactaccttagtgtttgaaaatctgtttttaacaactcagtttaactcattagacttagctcacaggtctgcagcatcttgcctgcagggttgcaataggtcagtcaggttaaataaaaatcagtggaggccctttttcttgggggaagcagcgagggggtggggtgaggatggaatgaaaaggcccagcaggcctagggcgctggaggcacaccggcaggaggctgacaccaggcaggcaccaggaaccaagccccggtctccagaggcggcagacagacacctgccgggaagccaaccgtgattcaaactgaaacctcaaaccaattcagtgactgcactagaaaccttggagtgttttaatatcacgtttaaagaactctaaaaaagctggctgaaagcatttccagaaacctcggcaaaatgccttggctgtgacacacagaacacctgtgtgctgtgacctgaacggtatctttaatgatgtttaacgctcaccttgttgcaagttagggttacatgctaccttcaaaaccatcaactccatttctccagatcgtaagtgttggaatgaggcgtccatggccacactcagatttctgctcgtgtaactacactattgtctccctcacttagggaaaacccgagttgagagatgagttttagggcactcccagtacatgggtttaaaaccacccattacccaagagtgggggcagcagattaacgtaatttattttaaaagcaggaaatagctttccttaaccattgctattttagaaaattaactgctccctttctaaaggcaacctttgtcatccctcatctgtgctttaaagagcatggaaatgggcagtcaggtgagtgaacggcagaatgttccaagccgggcctctgggagcagtgtcctacaacacgcagaaagccccattcctgctctgaacggacatgttctatccagcaactgttccagggacccgagcacacacccattccactccaggtgggacagcatggctggtgctcaacttgggtcagctgctgctgaaatggggacagaaactttttagtggagctaaaattcaatttgcaagttcatccaaatttgctttgaactattacgttgtgtataacttcagagaagggcaagcagcaactccaggcaacccaggaaaaaaccccactgcagaaacacagggctctgtcagggtacgagcctcccctacacgctgctgggccccctgggggcagcagtggtggtgacctggtcacaccgcacagcactgatgcctgagagccaggggtcccctgcccctccccacacctctctgccccttggtcgcagtgctgtctcctttagctcccacattctgggggcctgcccaggccactggcccagatgaaactgttgctgccgggtctgggtttcagccaactgcagaatgaagcaggtcgtcgtcgtgcacagggatcagcagcacactctaattggccaatttcccccaaagcagaaggctggctggcttgggtgctacagcgcctctggccactgggtggcaccagggcctgagcagagacggggaggagaaaatcaggcccccactggaggatggtgctactccgctcctctctgcagaacccatccaattgccccagtggaagttttagcaggacagggattaaaatatggggcaagagaccaagtctgctcagttctggactgtccagaggcccccatgtagcaaccttatgtgctggatggctccccacagggaaaggaactggttataaaaatcactaaaataaacaccacacgccctcacgtaggtgttgacaatgaagtggcctgccctgtcgcggtactgctggctggtttagggaagctggggcactcagacctccactggtctcccacggtgtcctgaatcctgcctatcaccatccgctacagctctaagggctgtttctatgctatgcacctgaaaacagactcaacagtcagtgaaggaactgtggaagtaaattctgttcactgtgacgtcaggcctatttgcagccctcagtgaggcgtgtgtacaacaatgcagtttcctgctttacctgtttcttcactccaagattgcccctagtgggaacaatcaaggtggcagcggcaagagaaaatgttctgcttttgctcctctcaacatgctagaatgtgttcacatgaattcgccttttataagtagttactagtttgctttcatgttgcggggaaacagttacttcccaaatacagcaggcagactacatcgcagacgctcctcagaggagaccatcactacagccaggacgcccttgcagggtccacagctagactgccgtgttttggaatactcaaagctttccttggtcagttttcttactaatacccgctacttgagtgccttccaacttaatggagaggtgtgtaattctccctaagaaactcgtgtgatgagggccacgtggacagatggacgttccactcaactgcaatttcagttgtgcccagctgcacatggtgtgtgcctggctgccaagcccatttgggagcagagctgctgctcttcccaagatctcccacacgagtaatttaacctttatctaagttgtttactacttaaaccaacatgttaggggcatgttaaaattagtccacaaccctcccctgtaatccctccagtcctaaagggccatactcagtataaagcccctagctgacagcaccaagcaggtcagttgaggataaagccagttaccttaagctcttcttgccgaactcttccaggtttgcggcaaatgaaagttgccgcaaccttcatttaaataagtagcaaaaattcttgtcaatattctaagttacttctctaacttttagaagctaagaatataactatgtgtatgttgatgtgttaacagaaaaaaaaaaaaaaaaacctagtattattttacaactttatacaaatctacctgaaacttgtgtaccacattggaggaattgtagcaggcgtcttcagagctgacctctgcactctgtgacaccgagaatgccgaggaggctttcccgagtattcatctttagactatgagtagatccacagctccgaaaggtcctatgaaggtcactgaagaggtggtgaattcagggggaccgatcctgctggaaacttccatccctgcaccccacctgcccaaggtggctgaagcataagcacaaaggggcacctgagggatggacaggggcaccacgggacggtgctgatgtgggacttcaccgtgcagggtcacggttacggaggtgtgaaacctttccctgatgtaattttctcaatggcaggctgctttttaagtttataaaaagtaaaacacttaaaaataacaaaagaatgtcattactgacagccaagaaacttccagttatatggataacgtaaaaaaacaactatcaagctatattctttctcagaacaaattctgatttttctaattgggaggaagagattggtggacacgtagagtctgatgactcccagtctcgttttattgccgctgacaactctggaggagacagataaaaaaagagctcacgcgaccagtgaaacaagccaccctcctctcccggctttaaattcctgcaaaacactcttaggttctagaatccccccatgtattttttattaatgaaaactgagactgggtcctcttaggatttcagtgaaatgtgcttctggagcccacaccatgagttatccttgtgaacggtgttctccgtccatttcaccccaccagggccatctctgtggcagcacgtgggaacaagaggcagtgcttccacctgggcaccatgcttaacacagcatctggatttgggtttacaaactggcaacgttttccattttaattccaacggttagatgaaacgaactgtagaatctgctttgcagtcaaaatctgttcagatcctcagtgtttaagtcacttaatgagccatttagggagacaaaatactagaaattgcacctatcaaataccatctcaaaattttgagaattccatctcaaaattctagtcagtcaggtacatctcagaaaaacatttccaactgacttcatgcctcgacaataatgggaggtgaacagtggaaataaagagaaaaaaatggaataagaatttataaaaccacaaaagaaacatcatgatctttgagagaagttatgtgcaccaaatgtttacgtaagctaaataaactgtatatataagaaacaatttttaaaaacaaatgggaggaacaaggtgaggctgtgaaggacctactgatatcttagcagggggcacagcctccttctagcaatggcagagtgtctgtgcacaccaggcctcacctgttggacaggaacccccaggtcaaccgagtgccatgggaaggacaggagggtgcctaggtgcactgtggggagcagcagcggtagctccaccacgtgggtcttctgatggtatgtgtggtgaggcaagtgtgagtcagctcatgggacagacccacaccagcctctcacttccaaactcaccccctaccagggagggcgagctccgtggccagccagggaggcagggcaggggcctcaaaggcatacagtggtggcaggctccccagtacttgttgagcctacaaaagtgcagaggtgtttaggggagaggcagagacatggtagctgctgtcaccaatgtctctaactctgctccaatcaatcaccttttgggaagacaacatttacgggataacaaaacgagcagaagctactagctcaaaagtgtgtcgtccccattcccatcctatacaaattctggaaatccaccaattttaacttgaggtgatgtgttgggaaggttaacaggcaatttcccccacctcctgtccctggagcaaatcagcttcccagaggagctgatgtgtggcaaagaagggaagagggagaagaggtcagagtaccccgctatgggcagaagagcagcctcctggtcgacctctccccgctcacagtgcaggaggcaggcaggaagcaataacccagggctgagagcccctcatttccccatcttcccaccaatgctccctccccacaatgtacacggactcttccaactccacatgtggagtctctggcagcttttcaattttggttgacacagatggaaattaaccaaactgaaattatcacccacttatctgaactgaggctataaccgcagtttttcttttcttcactgttatgtgtctaaaaccaatgtacagctaaattttagtacagcattaaaaatccctctctgcattcacaggtgggtgacactttaagcccattagctctgtagaactgctctatcgtagaggtgctagaatctgatgaacatttgagacatttgctagcataaaattctcagctcaaacaatgtaaggtatcgagattcattataatgcagcaattgcatgattcattttatgtgcggctcaatttcttaggtctaggctgtttacatgatcaaaacgagggacatatttttcttcttttatgaagctactcatactcaataactgcatatttttagccaagcgctgtggctcacatctgcaattccagcactctgggaaggccgagttgggcagatcacatgaggccaggagttcaagaccagcctgaccaacatggtgaaaccccgtctctactaaaaatacaaaaattagccaggcatggtggcacgggcctgtaatcccagctacttgggaggctgaggtaggagaatcatttgaacccggaggtggagcttgcagtgagccgagatcatgccactgcactccagcctgggtgacagagcaagactcttgtctcaaaaaaaaaaaaaaaaaaaaaaaaaaagtgtcttttttgtaaggcacaccagacctagcataggtctgcttgcctgcatgagtgccttcccttagggaatctgctcaaagtctgacgacgggaaagtggggcactctgtgatcatctttgaattgagactatttaacctttcggtgctttttaaaaaaagcacaaaatgcactatagacagaaggcattaaagactgaattgaaaatagttttatagcagaaaactgagaaacaagaaaacattaaaattgcaccacagaatctgaggtttcaaagatctgtttgaaatatcttcatttcattaatttgaaatttggggcaggatatgatcttaagagtctaaacattcaagagacgagggcaagaaagccagtcacatgtagaataccaagtccaaggcacgcgtcctgcggtcaggacagtgttctaggtgtgaactcacttaccgtggggcctatgaagcaggagtgtgtggccttcgaagttcgaatgtgttcatgtgggtgtgtagcgtgtgaatcggacatggaaaaaaaaaaatcccctatctgcccagtcaaaaataaatgtacacctgaaaatcagatgcaacactaacttgcaaagattcccacaacataaaaaagaagtgatgctttcatgtgctggccgtggacaatgtggaaaaactgaagcgtatacagcgctgttgtcagaacaactcatgtgcagacaggggtggatgtggcgtgccgggcagtgtggctatgcaatcagactgggatgaagagaatacgaatacttaccagagcctgagagtgaaaacagagattaaagaatcaatcattaaggtgaacgttcaccagtgaggtttacagctttggaaaacagtgacaggaagtcctgacagactagggatggacacagggcagcaggaggcatcctggacatgggctctgcttcccgctgatggtgcagccggtgtctgtgatcagcttaacacaaagctgcaactcccagtcctggacaggcccaggggatggctatccagaaagaacgggaggggtccaggaggccaacccctaggtgatacatacatttatacaacagtgacggcgagggagcagcagtcttttctggctttactgcattgtaattgtgatcgctcgcccacgacggcgtgctgctctcacaagctgcttccttcccgagtgcttcactccgcgcagggaccaccactgccttcttcactgtggtctcttttttttctggagctggtctcttgtgcacagaagagattttaatacctgcctggataatcagtaaaaccccaaatcattaaaaaggtaagaaatcataccttcacttcatttcactgagagatgaaggcggggacccaatgtcttcctgaggccatctgaagaccctgcacccatcctgcgcctgcttggcagcagttcaacacacttgcgtattcggtgggcccgcggtgggcccgcagtttccccgtgcaaaactgagaacttcaaccacttgtgctccgtgaagggcggctggcacagagtcacctgcaaccctgatgaggtgccaagttgccaagatgacaggagcagcagccactggacaggctgccaagatgacaggaggagtgcggcaatgaaccaaatgagccaaatgagaggaaaggcctgcgcgcgaggctgtgcccaacgccgagggttcaaaaggaccagccttaaaaattaagtcattcaaaggctaaataatcatttgaaaataatcaagaaaactccctgaacagtgctagttgcgctttgctggtcacaaacataaccggggcagtgacacagccaccgccgcctgagcctcacaagggccttcaagtctaagacaagagtttgcgatctctaaacattccaaataacacggagttctttccaaataacacggagtacaaacatgagacaactctgagagccgggtcttaaatgaagaccacagccttgccccgaacccgcctcccactcctacctgcctgcaagtctacgctctacaaactccaccgggtggttaccaactcttctcacaagacagcagggtgtgtcctgaagtcttatgccccccgtacactgccattgtcagcatttgctttactgcacttgtgttaattaacccctcagctaacgggcagagaagggaaaactggtgggaaggtggaagacaaaggtcaaggcgacaccacgtgtgcgcccccctacacctgccacccccacacggtctacaaaccaacagttctgcgacaaacgctctcacgcctgtgcgtccactgcctgggcggctggtcctggtccactcacctgagcaccgcatttcggaagactgggcttctctggcttcatcttcatcttttctttaggctttggcttctgttctttacctgagcttagaaacttcattgtcgctgcggcgtgtttgaggatacagtcattactgcagtacaccgagtcgggctgcgccacgtgacagcacccggggccaatacattttgaggcaccaggcgcctctatcacctgcagaacaaaacagatgacttcaaacaatgtacttgccaattttaagcagttaagtgtgtgttttgtaaaatcaccatttatagtaccaaggccacagtttcaaaatgagatactaacagtacttttaatatgaataaacattttgttgattcaagctatgaaaaagccaggtaaggcattcacactgtcactgcccgtcatgccctgcagggggcaggagtgtgaggagacccctggactgccgccctctgctctgtgcacccctctcgagggtgggcggggcccacgggacctcacatccacgatgaggctccgctagaggacccacatgcagggcttcttcagatgtaattaaggatctaactgggatgactgcaagtcaaatgggtccggctaaatcaggtaaaaacccttaaaaaaggaactgggtctttcatgaagagagaagacttcatagctggttttgaagtaagcttccctgctttgagaggattagctgtggctaggatctgagggcaaggctgccaagtaaaatacagtatgccaatgaaatcggaatgtcagataaacaatgagtaatttttcagtgtaagtatgccccccaaattgcatgaaacatacttttttttttgtttgagacagggtctcgctctgttgcccaggccggagagcagtggcacaatcatagctcactgcagccttgatgtcctgggctcaagtgatcctcccaccccagcctccccagtagctgggactacaggcacataccaccacgcccagctcattatttatttttttgtagagatgggggtctcactacgttgcccaggctggtctcgaactcttggcctcaagtgatcctcccatcttgacttctcaaagtgctgggatgacaggtgtgagccacagcacccggccagacacacttatacagtaaaaaacagcgtgagggcttctggaagggaatcccctgccaagcctctggagaccacagcccccgctgcaccgtgactgcagtcctgtgagacctgagcagcaggtccaggcttcccatggaaatggaggcataaatgtgagctccttcaagccaggactgcagtaactcatcgtgcagcaggaggaaactcacgcaccacaaacagcttgaccactgctgtttacaaagtctgtctcgatgatcaggcctcaacacacacgaacatgtccctcacacatacttaagcgaaaccttatttctcaaattaaatatttaacataatcagttttcctccacagaatctaagttttattgagaatacaatttaggtttgtgcagggtattgtcaagcacaatgacaattaaaaaaagatgttgggcgtggtggtgtgtgcttgtagtcccagctacttgggaggctaaggtgggaggatcactcaagcccaggagatcgaggctgcagtgagctgggactgtgccaccgaactccagcctgggcaacagagcgaagcctcaactgcacaaaaaacagaatcaatatatttaaaaaataaagacataaagccaatgacttttctcatgaattcccatctccattcatctctgaatgcccagatgtggcctctgatagcagcgcagcatgagccttcagcccctcctgcctccaagggcacgctcccaggtgcacggcccagccttcggacatcctcaccttgcagctaatgcagtgcaagagtgtgaaggcagagatgcttctagacacagcaatttccaatacctgccagaggacaggcagctgggtggggacaggcccgggaccctggagggaccagagtgaaaacacgccaagtcacacctgccctgtggggactggaatggagactgcaaacacaagacagcagcagaagctgacagcatgtgggaaatgtcataaacatcagggggagagaattaagtgtcaacacagctgcaagacagagaaaccactctcaacacaagcaccccgaggagccagcaccagaaccacgaggcagctggagacagcaggtgacacaggagcaccgccactcccatcgttcagaaacaattcctttctgctaatgcatacaaagcatgtaagcaacacccaaatcctcaaagatgggctgatttcaacaattaagtcattaatagtagaggaggtagacagggtaagaataaaaatagaaaggcctcacccaggtggagtgaggcaggaacccgggagaggcaccgccccacatgggtgcagcacccgtcctgggaggaatttctatctagagcgagactgaaaccagtgaggccgactgctgaatgctcgtctcagcggacaaacacttacaggctggaagatcttgagtttcttcttgccacttggatttgcagctttctcaattctaccctttatcccttggtcttcgctagacttctgctctattgttcctatacttgtacaatcggtgccatcagcatctccaggtctccatttagcttcctgctgatctgccgtttctgaatgagtctcatcctgcacttgcagaatggtgcagtttgggcagatatagtcttccccattcctttccaaaagcctccctcgagcctcagaaatgcccacacaatcgccatgaaaccattcttcacagcggtcacagcaaatcataaacctgaaattataaaataacggtattagcaatgggacgtgagtgacaagcacttttcaacacattaataagacaattggttttaacttcatgaaaaaatgcaaatatacagaaaagtagagattaagaacgtcctcatgcctttcctttgattttaacattcaaccaaatttacttcaccgttttttaagagtagcgcattttaggagcaaactctaaggcattccaccacagatacctcagcaagtctccccccaaaactgcgacaatgcctttatcccagcgccaagccaacaggctgcctatcaccgtctgacacccagtcctagcagagatcttttgagctgccccaatgtttgcactaggacacttgcggtctgcacatgcccctctgctatgtctcccaaggggcagtctagaggagcagtctcagacagaccccggagtgacggacacattctcctccatgccgtctacacagagccactggctgcacgtggctcacgtgactggggtggggcgctattcacctcctcacttgactggaaacagccatgtgtggccagtggctaccagagtggagaggtggctctaggaagtccttagccactcttatgtgtttcttttttgacaacttgttcatcttttccaacaaatcgctcatccagcccagctttgtaaccctttaaaatgaaaacaaatggaaaattctgtttgcaaccctgggatttctgtgggtgcccacacatgacccacctgttgttgtgaggctggcggcaaatgcaatacagggcgttggggtcgtaaccctcacattcaggcttcggtcggcccaagtctccaggctcctcatctttgatgtcctgagccgcctttccctccaacttactctctctgtcatctttcccagcctgggacacaaccccctgatcgttctcgggctcctgcttactgggcaggacgccctccacagtgtcactggcctcggagcccacagtctcggcgggaccctcctcccggcgcttcttccgcaggcgactctggatc

SEQ ID NO: 61845 - DNA, 1952 bp, Homo Sapiens
tattttccaacataggcacaaataactacacatctcttcatgcccactttcttcgtgtttaaggccaagtgatagaaatcaaatttgtcagtatgctaataaaacatttttgccaaggaattccctagcagcatttgcttgtatggtttgtcattctgtattctattggctcaattctgttcactctgtgcaatcttgtgagcctatcaagttaaattattcttcgagtagaaaacagcaaaagatacctgtgtcaaataaatttaacttgaacactagagcttggaaaaacaaccctgagctatctaacactctgcctactcagctagacctttgctgttatcatttatttttcttaattaaagttcttaagttcagtaatgaattaaagaagcttactttttggaattcctgtgcttagtattttgacttatactttttgtgtcttgttagctaaaatgtggtagactgaaaaatggaaatttaaatcgtttaatgagttaatttgcattcaggaataactgtccatgttaatttggccctaattattaactccattaaatatagtagtactgcatctgacctcaacctaattgtctctattgcttgtatgtttaaacatttcagtgaggattttatttaggccttttctgactcttacttctaccttctctctcttcacctttcttgacccgttgaagtagaataacaaaaagatggtaagtgaggttacacacatgctctgtttgttttccacttttgcttgatgggacagtagttgttgttttgtgtccctttagtattggggagggggggttatttccatatttttattttaagtactttgatttttaacctttttcattgcttcaatttgatagcaactaattaagtcctatactttcctgattgcgtacaatggaccaaacaagaactaattactaacatagttttgaattgttttccttgtttttcttgtagatgaatgttataattaaaatggaatgtgttgtgcataatattagaaaccagatggctttatataggatatgtgtgatccaaaaaattcaagtgaagttgttacatttgaataaattcactttattgaccagtattaaattgaacattgactgtcatagcctgtatatatatttgcatctagtgtggtatcatatgtgtacttaataaactgagtaaaattttaatatgtaaataaaccatagatagaaaaagagaattctttccatatcatccttactgatgagcagatttcacaacgttatctgaggataaataagaaaaaggtaaagcttttctataaacaacagatttcccccccaaacattgtacagtgtgtttttctttataactataagcttgctggtcttatctcagacatttaactcttcattgtatttttctgtgatagtctaagtgcttctgtagtagatacttttcaagtttgtttttaatattgtttgtaagaatctctgacaaaaatcaggcacttctaatatatattttaactagtaatagtaactttgtgaagttttcttttgaataaacaaaaacatttaaaagaggaaatttatcctaaataaaagatcataacatttgtgtttatattctaatgagattaagaaaagggtgtgcttgctgggcacggtggcttgtgcctgtactcccagcactttgggaggcccaggcgggtggatcacgaggtcacgagttcaagaccagcctgacgaacatggtgaagccccatctctactaaaaatggaaaaatcagccaggtgtggtggtgtgtgcctgtaattccagctactcaggaagctgaggcaggagaatcgcttgaacccgggaggcagaggttgcagtgagccgagatcacgccactgcattccagcctgggcaagagtgagactccatctcaaaaaaaaaaaaaaaaaaaa

SEQ ID NO: 61846 - DNA, 1332 bp, Homo Sapiens
cctaaatgcccatctcgttggccttggttcggctagtggtatggaggggtgctgcctagcactgacctgagagtgtgtgtgacccactgacccaatggacatcaaaggccagttctggaatgatgacgactcggagggagataatgaatcagaggaatttctctatggcgttcaggggagctgtgcagctgacctgtatcgacacccacagcttgatgcagacattgaagccgtgaaggagatctacagtgagaactctgtatccatcagagaatatggaactatcgatgacgtggacattgacctccacatcaacatcagcttcctcgatgaggaagtctctacagcctggaaggtcctccggacagaacctattgtgttgaggctgcgattttctctctcccagtacctagatggaccagaaccatccattgaggttttccagccatcaaataaggaaggatttgggctgggtcttcagttgaaaaagatcctgggtatgtttacatcccaacaatggaaacatctgagcaatgatttcttgaagacccagcaggagaagaggcacagttggttcaaggcaagtggtaccatcaagaagttccgagctggcctcagcatcttttcacccatccccaagtctcccagtttccctatcatacaggactccatgctgaaaggcaaactaggtgtaccagagcttcgggttgggcgcctcatgaaccgttccatctcctgtaccatgaagaaccccaaagtggaagtgtttggctaccctcccagcccccaggcaggtctcctgtgccctcagcacgtgggcctccctcccccagcacggacctctcctttggtcagtggtcactgcaagaacattcccactctggggtatggattcctcgttcagatcatgaagtatgcagaacagaggattccaacattgaatgagtactgtgtggtgtgtgatgagcagcatgtcttccaaaatggatctatgctgaagccagctgtctgtactcgtgaactatgcgttttctccttctacacactgggcgtcatgtctggagctgcagaggaggtggccactggagcagaggtggtggatctgctggtggccatgtgtagggcagctttagagtcccctagaaagagcatcatctttgagccttatccctctgtggtggaccccactgatcccaagactctggccttcatggtagagcttgacccaagaactactccacattcggatggcccagactgactccatcccctgactttccctttgacttcaccctgtttgtaaataaaacaataaaatggaaggtgctgtgg

SEQ ID NO: 61847 - DNA, 2209 bp, Homo Sapiens
aaaaaaaagaaaagttaaaaaacaaaaaacaaaaaaaaacctccaccaacaaaaaaccagccaactgaaattccaaaggtctctagtccacaggtggcactaggggtcactcagaaaataaaaattaaaaagaaaattacttaggaaagtctaaagcactatattgggtacttcattatatctgaagcaagttgatgatggtgcccagaaaaacaaggtagggaagctgcacatttataaagcgtattagaatattctttgatttatgcactattcgaagcttgagcctgggaactaaggccatacaacaaagcaaggattaaactatcaacatgtgggacccagtcagctttcccagcaatcattgaggccactgtgactttccttattgttataaaatgtagatatttagccctacctcttaagacaagatagaactcaccacaaccagttttcactactgtagtatctagtggctttcaaatcaggtaaactaggtgttttatcccagtctggcctcatgctaacttcaggcaaattacacaacttttctcagtttttaacttgttaagtggaaataatagtcattgtcccagaggttattgagtagataagataacatggaggagtgtttaataagtgttccctccctccttcccctgccttttagacaaagcaatcattggagtaaaaactggctttggcatgatgtgggaagagcagagaaggcgtgggatgttttaaattatatgtaaaatacatttttttatttttttgagacggagtctccctctgtcacccaggctggagtgcagtggcgtgatctcggctcactgcagcctctgcctccaggttccagcgattctcctgcctcagactcccgggtagctgggattacaggcacgtgccaccacacccagctaatttttgtatttttagtagagatggggtttcctcatgttggccaggctggtctcaaactcctgacctcaggtgatctgcccacctcagcctcccaaagtgctgggtttacaggtgtgggccactgcaccaggcctaagatacatgttttttaattacttgtggattgaaaggattattattgccctcaacagtgctgtgaataactggccaaaatatggacaaaagaccgtccgtaagttactagctgggtgctaggctggaatcgattcttatttaagatggcctagtaggcaggcctccaaatttgttttcattcctttaccttctacatcttgcctttgaatacacgtttaaaatgttatttctcccaactcaaaccccgtcactgcaataaaacttcctttacttttagaaggatctaagttccaagaaaaaaagaaggaaaaaaagagagttactctcattttcctatttcatagacagttttgaaagcctttagtgtttgggtggggcccagtcacaccctttgcaatctgcagaccagtggtttaaatttgtcatccttgtgggctgtaaaatgaaaccatgtaccaaagaaaaatagtgaatgactcactcacatgtgatcttccagcgaagggaaggattcagtaggaatgtgccacaaggctggcaggtcccttcataataggctcaggtggcctgttctgggatgtgggtcaatgttaggaacctgaatggaggccgccaagttgtggtggggtctgaaggagagcttcagttaccggggtgaattcaccacaatgcaacatccagcagacccagagaaactctctctcagcacgacaagaaagggaggattcctattcaccaggctcattaaacctgtacgcacacacacatgcaaacacacacgtgcagacacacacacgtgcagacacacacatattgctaatttatttatattaagaaatacagtgccaggcatggtggttcacacctgtaatcccagcacgttgggagggtgaggcagacgatcgcttgagcctaggcattcaaggccagcctaggcaatgcagcgaggccttgtctagaaaatttaaaaaaaaaaaaaattagctgggcgtggtggcacgtacctgtagttccagctactcgggaggctgaggcggcaggatctcttgagctaagtagttcgaggctgaagtgagctatgactgtaccactgcactccagcctgggcaacagggcaagaccctgtctccaaaaaaaaaaaaaaaaaaaa

SEQ ID NO: 61848 - DNA, 100167 bp, Homo Sapiens
gatcatcacccctgaaaactataaaacattgatgaaataacaggaagatagcccatattcatgaactggaagaattaatagtgttaaaatgtgcatacttacccaaagcattctgaagatttattgcaatctctatcaaaatttcaatgctattttttattaaaatagaaaaaacaattctaaaatttgtatgggaccacaaaaaaaacttgaaaagccaaagcaatcttgagcaagaacaaagctggaggcatcagacaaaatgtcctataaagttatggtagccaaaacagcatagtattgtaataaaagcatacatacagatcaatggaacagaatagagagcccagaaataaatccatgaatttacagtcaattaatctttgacaaaagtgccgggaatatacagtggggaaaagaaagtctctttaacaaatggtgttggaaaaactggatatcataatcagaaatactaatttgcaccctatcttataccatatacaaaaaatcactcaaaataagtttaatacctgaaactataagattcctagaagaaaacaaaagaaaagacattggtctggatggtgactttgagcacaggcaacaaaagtaaaaataaactaatgaaatgacatcaaactgaaaagcttctgtgcagcaaagaaaacaattcctaaagtaaagagacaacttgtggaatgggacaaaatatttgcaaatcatatatctgataaggggttaatataaaaaatatataaggaactcaaacaactcaatagcaagaaaacaaacagacatttctctgaagaaaacatacaaataaccaacaggtatatcaaaaaatgctaaattgctgatcaccagggaaatacaaatcaagaccacaaagagataacacttcatacctgttaaaatggctattgtaaaaaagacaaaagcgaagtgttgatgaggatgtggagaaaaaggaaccctcatgcactgttggaggaaatgtgcattggtacagccactatggagaactctacggtggttccttaataaattgaaaacagaactactatatgatccagcaatcccacttctgggcatatatccacagggaaatgaactcagtatctcaaagagttatctgcaatgttccttgcaacattatgtacaacagccaagatatgaaaccaacctaagtatccattgatggaaaaatgaattttaaaaactgtggggtaattaattatagatatatctctatctatgcctctctctcttttcctccctccctctctctctctctatctctttctctctctctctccctctctctctcacacacacacacacacacacacacacacacacacacacacatatacacatacacacatactggaatattattcagcctttaaatagaggaaaaatctgccatttgtgacaacaaaggttaaactggaggacattatgctaagtgcagccagttagacacagaaaggcaagttttggatgatgtcacttagatgtagaatcttaaaaagttaaactcataaaagcagagtggaaaattggttaccaggagctggagagtcgggggatggcgagatgttggtcaaaggttgcaaagttcagttatgcaggatgaatgaggactagagttctattgcacagcatgcaaactataattaatgtattgtagacttgaaatttattaagataacagatctaaatgttcctatcataaaaaataaaactggtaactctgggagatgatggactgtggtaatcacttcacaatgtatatgtacatcaacacattacattgtacatcataaatacatacaatttttatttgtcaattttacctaaaatttacctttcaaaattcacaaaatgagtaaaacagaaatttgaatattttaaatttcaagtttttttaaagttaatagcattcatacttctcaagttattgaagattaaaactctactaacagccgggcatggtggctcatgcctgtaatcccagtactttgggaggctgaggcaggtggatcacctgagtttgagaccagcctagacaacgtggtgaaaccccacctctactaaaaataccaaaaatagccaggtgtggtggggcatgcctgtaatcccagctactcaagaggttgaggcaggagaatcacttgaacccaggaggcagaggttgcagtaagccaagattgcaccactgcaccccagcctgggcgacagagtgagactccatctcaaaacaaacaaacaaacaaacaaacaaacaaacaactccactaagacttttgggacaacctgtacctacctgacctgcctttccatctttaatgctcttctgtgctccccagccccacttcaattgcgtactggacaaagtcatgactgccaagtagggaaccccaggatctccaggatctggcatctaaccacatctccaaccctacctcctagaactctttgcctctactctccctccactgccattggagccccacagattctgagttgcttattgaatctgcatctttgccagtgctatgctttttaacaaaacgcaggctccctgttccttccatcctcttctttgcaagtttcaactcacatatctcttccttcaaatgagccttccctaaaaaacaatcttccctacccttccagctgtgctccctcaggatcctgtgcacgtgtctgtcctgggcttaactcacaatgtcactgccctatgattctgtctttatgagaaagtttctccttctccactgtgagatttcaagaaacgggctcagaagtgagagaataagtgaaggaggaaaaaaaaaaaaaagactcatgaatttaagaagcaaacatcaagggtcttagtaattgctattatttgtgtcttataattggcttgaccaactgagtagctggtcaccgttcttccatttattagttgtgacattgggaaaaccctcttacttctcagtgtgtttcttgtctctcaaataacaaaacattcagcccctgttggcatggtaaatttggatctgcaatcaaatgaaattaaggatgtgaatatgctttcacatctaagctctacacttgcaagatgtttttactgcaagcttctgaatcacagtataaaaacatgaaatttggaaacagaaaaggctaggagataacaaagttgaaatacttcattttcaatggcaaatacatgggatcaacccaaatgcccatcagtgttaggctagataaagaaaatgtggtacatatacaccatggaatactatgcagccataaagaagaactagatcatgtccttttcagaaatgtagatttctgaaatctggagctggaggccattttccttagcaaactcatgcaggaacagaaaaccaaataccacgtgttctcacttataagtgggaggtaaatgatgagaacacatggatacatagaagggaacaacacacactgggggctacctgagggtggagggttgggggaggcagaggatcaggaaaaataactaatgggtagtaggcttaacacctgggtgataaaataatctgtacaacaaactcccatgacacaaagtttacctatgtaataaacctgcacatgtaccctgaacttaaaaagcaaaaagaaatccttcattttattaataaggaaatgaaatatgagtgaaaagagacttatccaagatcacgcaatgaggcagatttagagctttctcaaacctggggctactggctctttccaaaacctcattcttattttttgtcttatttttcttctttctttctttttttactttcttattctttcttcagcacagcccttcagctctttctttcccccaaatagaagaatcactctttttcccaccaaatagaagaatagccgtagttaagtgccgttgatctttgttgactgaaaatctaactttgtgcatgcctacaccatgtccccagctgccgtgtacttgttagcatggatacttactgggccaagaggcacacaggaagcccctgaaagtatttactccaaccagacccagggaaaaatgaaactgggttgtcttttagggatattgtctttcagggactaagttaccatggcaagcagagatctactgccttggcttacaaactgttcccctgtgaggtcttccacaggcaaattgctctataaatctatgttgtttaattttgagtaaagggatagaaaggttccctacgagaaaatgccggggaaagaaagaaacccaaaactgagttttccaaaagactagatttaaatctccttagaacattgttacttcttcgttgctcaaagagtgtctttgtaagtcaggtcagcggcggctgtcacacgctgtgggggaagatgtgtggcatttcatcagaggggcagctcaagcagcagactcagatcaggaaattagaaatgtttccctgcctgcccaagaaaggctagattcacagttttggttcagacgtgtcccagaattttagccaaccatggaagtctttggagctgaaaatcaagctgtcaaaatgtcttttctaagcatctgctgtgtctagtcctgtgtcaaatgatgacagcgatgttatcatctccactcacatgctttcctgtgccagtcatcccactgcgcactttgcgtacatttgctaatattataatgaccctttgagataaatattattattctcatttttcatacaaagaaagttagcatcctcaaaccaaacagcttgccatcgttcatatatggtcttttgtacctggcttctttcaatcagaatgttttcactgttgtagcatgcatcagtagttcattccttcttattgccaaataatatccaattgtgtaacccatttttaaaatctattcatcagttggggaacacatgggttgtttctactttttggctatcatagttaattctgctaggaatattcatgtacagtttttgtatggacatgtgtttttatttattttaagcatatgactaggagtggaatcactgggccacatggaaattctataacattttcaggaactttcaaacatatttccaaagtggttgtaccattttacaatctcaccagcaatatattagcgttttaagtttttcacgtctttgctaatatttgttattgtttgattcattgataatagccattccagaggatataaagtgatatctcattgtaattttgtttgtttgtttagagacagtgtctcactctgttgcccaggctagagtatagtggagcaatcatagctcactgtaacctcaaactcctgggcccaagcaatcctcccacctcagcctcccaagtagctaggactacaggcatatgccaccatgcctagctaattttttaattttttgtagagatagggtctcactatgtgcccagggtaacctcaagctcctggtgtcaagtgatccatccacttcaacctcccaaagtgctaggattacaggtgtaagccactgtgcctggccaatttgagcatttttaaatgttctcattgatcagttaaatttcttctttggggaatgtctattcaaatcctttgcccattttaaaattgggttatttgtatttttattgttaagataactcttaaattttatttattttttgagatggagcctcactctgttgcccaggctggagtgcagtagcatgatatcagctcactgaaacccccacctcctgggttcaagcgattctcctgcctcaacctcccgagtagctgggctttcaggtgcatgccaccactcctggctaatttttgtattttagttgagacagggtttcaccatgttggccaggctggtcttgaactcctgacctcaagtgatctgcatgcctcagcctccaaagtgctgggattacaggcgtgagccaccgtgcccagcctaagataactcttgagaagtcttacatattttggatatagaccctttattatatgtataatttgcaaatattcttttctccattctgtaggtaaatccacagagacagaaagtactaatgagtttcaggaggtaggagggaaagaggagtatctgctaatgggtatagggcttcttttagtactgataaaaaaatttctaaaattagtggtgaagtttgcacaactctttaaatatatttttaaaacatagaattgtgtactttaagatggtaaattttgtggtgtgtgagttatatctgcataaagttgttacttttttttaattgaacagcttggaagtggtaggacttggactggaatttaagtctaccaaactctaaagtctaactatgttacacagccatggggagagggaacaatgttggacagaaaaagtacagagaagaagaggtggaatacacagacatcaagctactcacaaaactaattgtggagatggatctagatgatgcactgcatttacatatataccctccttcctgaatgacaggaagagattatttttaataaaaataaatttaatgtaatttaagtaatgtcagaaaggtaggaagcattcaacaaagaaaagcccaggactagaagccttcatgagtgaattctgctaaacacttaaagtaaaattaacaccaacatttattaaatgctccagaaaaatagaagaagaaacacacctaacctcatattatgaggccagcatcaccctgatactaaagccagaaaaaggcaacacaagaaaagagactacaggccaatatccttgatgaacacacatgcaaaaatcttcaataaaatactagcaaactgaattcaacagcacattaaaaggatcatacaccatgatggggtgaaatttatccttgagatcaatcatggtttgatgtacaaaaatcaatcattgtgatacaacagatactacattaacagaatgagagacaaaaaccacatgattatttcaatagatgcaggaaaagtattttgacaaattcaatatcctttcatgataaaagaaactctcaacagaataggtatagaaataacttatttcatcacaatagaggcatatatgaaaaacctacctctagcatcataatcaatggagaaagactaaaagcttttcctctaagatccagaacaaggcaagggtgcccagtcttgccactgctattcaacatagtactggaagtcctagacagagtaatcagacaagaaaaagaaattaaaagtatccaaattggaaaggaagaagtaaacttatctctgtttccagacggtatgatcatatatgtagaaaatcctaaagattcactaaaacaaaagttgttagaactaataaacaaattcaataaaggatttgcaggatacaaaatcaacatacaaaatcagtggtatttttatacaccaacaaactatctgaagggaaattaagaaaacaattccatttattaatacattagcaatggcagcagcaacaaataaaatatttgggaattaagcaaagagatgaaagacctatataccaaaaattataaaacattgatgaaggaaatctaaaaagacacaaataaaggaatagttatcccatgttcatgaattggaagaattaatattgtcaaaatcttcttactacccaaagtgatatacagatttaatgcaatccctatcaaaatcccaatggtatgttttacagaaataaaaaaaaatcttaaaattaatatgataccacaaaaagccctaaatagtcaaagcaatcttgagtaagaaaaataaaattgaaggcatcacaccacctaattacaaaatatactacaaagctatagtaatcaaaagagtttagtactggcataaaaacacatagaccaatggaacagaatagagaacccagaaataaacccacatatatatgattaattggcctttgtcaggagtgtcagtaacacaaaatggaaaagaacagtctcttcaacaaatggtgatttttaaaaatctggatatccacatgcaagaaaaaaatttaattagacccctatttcacaccatatacaaaaattaactcaaaatggattaaagacttaaatgtaaacttgaaactgtaaacctcctagaagaaaacataggaaaaaccaatcttgacattggtcttggcaataatttttggttatgaccccaaaagttcaggcaacaaaagcaaaaatagacaagtgggataacatgaaacccaaaaacttctgcatagcaagagaaacaatcaacaaaatgaaaagacaacatatgatataagaaaagtatttgcaaacctacatccaataagggattagtatccaaaatatagaaggagccactacaactcaatagcaaaaataagcaaaaagcatgattttaaaatgggcaaaggacctcaatagacactccatgaaagaacaaatttaaatggccagcaggcgtatgaaaatgtgtccaacatcaattatcagggaaatggaaatcaaaaccacaatgaaaccctacctcacagctgttaagatggttacttatcaaagaggcaaaagatggttggtcaggatgtggagaagaaggaaaccttatacattgttagtgggaatgtaaattactacagccattatggaaaacagtatggaggttcctcaaaaaaattaaaaatggaactagtatatggtacagcaatcctacttctgcgtgtatatccaaaggaattgaaagcaggtttgtaggccaggtacagtggctcatgactgtaatcccagcactttgggaggcagaggcaggtggatcacttgaggtcaggagttcgagaccagcctggccaacatgatgaaaccccgtctctactaaaaatacaaaaattagccaggtgtggtggcacactcctgtaatcccagctactagggaggctgaggcgggagaatcacttgaacatgggaggcagaggctgccatgggctgagatcgtgccactgcactcccacctgggcgacagagggaaactcagtctcaaaaaaaaaaaaaaaaaaggccaggcatggtggctcatgcctgtaatcccggcgatttgggaggctgaggtggttggatcatttgaggtcacgagtttgagaccagcctggccaacatggtgaaaccccatctctactaaaaatatgaaaattagctgggcatggtggtgcacacctgtagtcgcagctactcaggaggctgaggcaggagaatcactggaacccgggaggcagaggttgcaatgagccaagatcgggccactgcactccagtctgggcagcagagccagactccatctcaaaaaacaaacaaaacaaaaaacaaaaaaacccatgtttgcaaagagatatctgtactcccatgttcattgcacattattcacaatagccaagatatggaaacaacttaaatgtcctttgatggatgaatgcataaagaaaatatggtgtatgtgtacaacagaatattattcagccttaaaaaggaaggaaaccctgccaattgtgacaataagaatggagctggaaggcattatgctaagtgaaataagcaagacacagaaacagaaatactacatgatctctcttatagatggaatctgaaacagtcaaacttacagaagtggagagcagaattgtggttgccaaggactgtgggggaaggggaatgaagtgatgttggtcaaagggtacagagtttcttttatgcaaaatgagttatttctagagatcttaggctctgcttctggggcaatccaaactaagacaggtattaaatacaaatttaaaaggtttatctttaaagtcttgcaattgaattgggaagatatttacaattttacacaatattaggactcttaaatcagccatatcttaaagtgtttaattaagttttaccctctcattagccattgacaataaatcagtgtagattggtacatcatgggccatttaacattccttggcatttatttgcaacagctcattattatccaaaagtcagctgctgccaaatttcctctccaataggcaaagaaattcccagttggaaggtgagctgactaccaactcaggctgcctgcttattgggtttcatgcatccctctcctcccgcccttcctcaactgggcaatctacaggacctccaaagtgccttctccttggggaaggatgtatatttctcctaagagtggttcagaaagattaatgctaaagaaacttccccagtttctccctctttatcgatttccatcttctaaagatttcagcactttgaagcttaatcaatttgtatcacagttagttccatgtccatgttttggtcttttagttctttaacgaattcctctccttttgaacatgaaagaggcagatacttagctttaagtttccatctgccttcaagtcccattttgttcagagaaattaatataatctggggaaaataaacctaaaattatttggaaataggactcatgtaatttcttatacaggcaattttttgctttgacatccagggaactttgaatgtttgcctgagttcagcttgtttggaggtaaggcatctaaactgaccctaatttaagcaaaagaggggtttattgaaaatatgcttggtagtttatagaactaaagagcttaataaaccagtctctggaagtatgtagtcaggaaagattcagggatctcacagacagaaattcccagacttcatcattacactgttaccttcatacaactccagaaccaaccatcttacctccctgtgcattcccactcagatgctcccaagagaaggaatttggcctagtttgggcatgtgctcaacacctgtggtcagtagagcaggagtgtgggttatcctctgatgagtttctctaccagaagagaatattggtggcagggcatgaaggaaagggaggggggcctgcaattctcccaaagaaagagatgctgggcagatggaagccatagatatccactacatttattcctcagctatccatttgtccatatctccattcacagaattttacaaatgctgccatctaacattacaaaatcataccacgtaaaccttcaactgtactccttcctgaaagtctcagccagctattgcacctagaatcaaggcctccaggcccctgttctcccaggatagaatctctaagtgcatctcatatctctttaccatgtactatttcagtacatgctggccctgacttccaactgccagcactctttgcctgtaggctctctctggccactggagacttctttgaccatttttggggtagggaaggaaatgtctaaaagttatcaccactttgggagcagccctcaaccaatgactaaaggaactaatagacaaatatatgtttttcctcaccctttctggaactattggaagaactcttaggtgtatattctacagttttccagagtgcttaatcctttgggattatgctccagttgctcacactgataatatgcacagtagtgtatcctttattgcctgcactttctcttcctcaatctcatgttcccactgtcctactgatacttcctagagtcacctcttaaatggcatgaacccaaattcttgcctcagtgtttgcttctatgttattgggtattttttattcatcctctaggtctgccataataccatctcacaattttgtaacctatggactaaaagatagatttcaccatgactaactggtctttatgcagctggtcactatgccgtagctattatgtgtgaatcctgcccatttgatgttgttttgcccttattcagtctttcagtcagtaggattccttccaagtggagtaaccaatgtttcactcctgaaagcctctaattcctcagaagtccttcttttgctttttctgtgtctttaacaggacattccaccattttatgaggtcagctacttctgggttatagggaacataatgtgataagaccagtgtatcccatcagctcattgtcttccattttgcacactgaggtgagtccctatttaggataagtgtagtatggaatagaagccataatagtgaacaaggctctcagtacatccgtgtgtaagaacagaaaactcagctcccagacgtgtttattaatagtttgataagaaaaataatgactgcatgttctgtgatgaaaagggtccagtggaattactggctaccaggtattcagtatggcttcatgtaagggtcttgaggataattgttttgctgccacattggggtgtcagcagtggtggcaagggaaagtttatttcgctatagcttccctggtcatgggcaatgtgagcaacaccacaggtggctggggcaggtggatgactgacatccagaggagataagaccatccttgtttggttattaaagtattcttctgaagtgagggatttctagtactatgtatgcaggatagaaatatgctcatattttggacccacatatgtttcctgaacttccttatagttcatgtttgaatcattctctgagttcctaaccttcacccaaaaaattagctactgcccaactgtctgtgtaaatccttacaattgtttgtctctatgtccaggacaagtgggaaataatatatactgtaatcattaaagttctgcccacagaaaaatttcccattttttattatgcttcaaagctacatctgagtagggctctaataccactgtaatccatggtatattgtacatagtcacctgcatagtcacctgtacacaaagctctaattttttcctcattagttagccaatcataaggagctcctcatgtgtccaggtgcagattaagggaggggagcagagagacaggaataggggttctgagcgggtttgcaacccacaacttctgaaactaacctgcacgttcaggacctgttgaggcttgatctggcatgtatctcttccccttgatgacagagcacgctgaagatgcctccctttatgatggattgaataaaattgcatccagatataatggactgctcggaactcatggccacatgatctttcagatgtttaatctcaaacacagcacaatatcagggccaaagctgttacttaagggaaaattgtcacttactggaagtctaattgccttgatccaaaatcctatgggtgcactatagttttcatattggaacttaccaaactctctatatgacctccgtaactgctacaaacattttgaagactattggatccatcaaataatataggtcaggtgaatccagcctatattacctggagccactgaagatacatcctcatgggtgctgggtgccacccagaactggcatctatgttcacaggagagattgttctcttttctttctctccataatgtctttgtcttcttttgtatcaaaacaattttttcatcatattttcttattcatattaaaattgaaactatattttactcattgaagagtaaacaatttcaatctatgaaaaaatcttacacatttatttaaattatatatctgttataaaaaatataaagtcaacaatttattaggttcactaatgtttaatttacaatacaattttgctttaatgctctattttcctaaatataatgaactaaagtaatgatgatagaaaattaagtagacctgcttaaaatttataaaaagttaaaaaataggaagaattcaagagtaaagaaagccatctggactggacctgaaattttctttttggaagatttttaaaatcacacattcaccttctttaaacagatgtatgatactgagatttttttctattttttatcaattttcataaattgtggttttcttggatttatccatgtcatctctattttcaaatttattagcataaagttgctcataatatcctcttatctttttacagctttattgaggtataattgatatacacaaaaactgcatatacttaatgtatacaatttgatgagtttggacacatatacgcacccataccaccatcaccacaatcaaggtaataaatatacccatcaacccctgaagttccttgtgtctctgtgctttagtgtgtgtgtgtgtgtgtgtgtgtgtgtgtgtgtgatcatgtatcatgagatctactctcctcaatgtttaagtgaaaacactgtattattaaccacaggcacaatgttgtacagcagatctctagaatttattcatcttgtataatggtgactttatacccactgagcaacaactctccatctcccccttctctccttccctggcaaccaccattctattttcggcttctaaaagtttgactattttagatttctcatataaataaaattatgcaatatttgttattttttgactagcttattttactttgcataatgtcttccaggtctacccatgttgttaacaaatttccttcgtgtttaaggctgaataatattccattatatatacagtgccacattttctttatccatttatctgtcagtagacaattgggtagtttcccaacacaaatgccttggctgttgtacataatgctacaatgaacatgagaatgcagatatgtctttgagattctgactccaattattatggatgtatacccgggaatgggattgctggataacatgctagttccatttttaatttctttgtgaaggctccatactgttttccatagtgactgcatttcacatttctaccaacagtgtacaagagttctgatttctccatatccttgccaacacgtgttatctttaatttaaataagagccattctaacattgattaagatgttacctgggggattgtcataagtggcctttattatgttgaaatacattcctgctaaacctagttggttgagtgtctttatcatgaaggatgtggaattttatcaaatgctttctctgtatctattgagatgatcatgtgatttttatctttcattctgttaatctggtgtgtcacatgtattgatttgcgtatgttaaaatatccctgcatctcagggataaaccacacttgatcacggcatgtgatcttttcactgtgttgttgcatttaatttgctaatattttgttgggaatttttgtatctttactcatcggaaatagtgacctgtagttttcttttcttgtagtgtctttgtctggccttggtatctgggtaataccaacctcataaaatgaagttggaagtatttgctcctcttcaatttttcggaagagtttgagaaaaaatggcattaattcctctttaagtgcttgatagaattcaccaatgacatcatctagtcctgggcttttctttcttgggaagtttttgattgctgattcaatctccttactcattattggtctgtttagattttctgtttctccatgattcagtcttggtaggttgtatgtttataggaatttctccatttctactacgttatgcaatttcttgatgtataattgttcatagtagtctcttatgatcctttttattcatgtggtgtcaactgtagtgtttccattttcattcctaattttatttatctgagtcttctttccttttttgttagttaagtcagtcaagggttttgccaattctatttatcatttcagaaaactaattcttagttttgttgatttttttctattgtttttctagttcccattttatttatttctgctctaatctttactaactttcactaactttgggtttagtttgttcgtctttctcgaattccctgaggtgtaaagttaggttgtttatttgagacctttcttcttttttaaggcaggcatttttcactatgaacttccctctcattactgtttttgctgtactccatagttttagtatgtattgttttcattttgtttctctcaaggtatgtcttgatttctcctctgactcatcgaatgttcaggagtgcattgttaaatttccacatttttgtgaattttctaatttaccttctgttgttaatttctgatttcataccattgtggtcagagaagatatttgatatgatttaaatcttaaatatgtgaagacttattttgtggtctcatatgtgatctatcccaaagaatgttccgtatgtgcttgagaagaatgtgtattcctctgcagtttggtagaatgtactacatcaagggagtccaatcttttggcttcgctgtgccacattgaaagaataattgtcttgggccacacataaaatacactaacaataacaatagctgttgagctaagaaaaaaattgtgacagatctcataatgttttaagaaagtttatgaatttgtgttgggctgcattcaaagccatcctgggctgcatgtggcctgtgggccacgggttggacaagcttgctctacatatatccattaggtccatttggtgtatagtgtggttcaagtctgatgtttcctcattgattttctgtctggatgttctatccattgttgatttgatgtgttgtaaaatgtccattagatttgttttaatcatgtgtgataaaatacatgggcacagaaatgactatcatgaaggaagatttttgtattaatatctacagttccatagaagcagaaggcacagcatgccacagagaaatacatggggaagcagcagggtcagtcaggagcagagggagtgagggggaaacatgggcaagagtattgtgttggttgtgtgtgtgtgtgtgtatgtgtttgtgtgtgtgtatgtgtgtgtgcatgtgtgtgtatgtggaaagagatgccaaggcagggtaagtgtgctaagtaggtttatgattggctaattggaataatttcagcaggctctagggagaagggccgcccctggttgtcagaaacctggacctggggtgattggagcagggaaataatggcaaggcatgtgagagctcaacaaagggggttgttgaactggtttatttgcatatgaaaggaacccttgcaggtaagttcttcactatgtctaggaattgggtagccctaagaggaaaagtctattcaggatcagccctaagagagggaagtctctgagatgggaaggctctctaagatcagcaaggccccagatgccaaaatgttagaaaataaaaaggcatgattaatacatatctgatagatttgtagcagcatcaaatttttttaactcctaatattggtatttgtgccgtctctctttttttcttgcttattattgctattgcttagcgtttatcaattttattgctcttttaaaagaacaaacatttgtctgtgtactaatacattcccaactttttatggcataaattaatggctacttgaattccatctggtggagtatgaactctagcacagtgagtaataatgagtcacttttattggataccactgaatgcaggactttactgtgatcactgtgtgggcagtgataacaactcagaaataacatgcagagataacaacctcatcctccgctcttctcatagacacacagaacctttagaaattcatcactgtggcaatgtcttcacagagtggtccttggagaaccagcataagaatcacctgaggaccttgttaaaaactcaaattctacatccccacctcagacctaccaaatcaaacatacagctagtaatatgcatttttggaaaaataccttagtgaatcttttgtaagataaaagttttagaatcataaaaatttcagaataagaaatctaatggaaaaggcacagacctcacaatttgagtttgccttatttaaatgagaaagatatgacatggccatataggaaaatgcacataagtgtttgcagaaatcccattgctaggaactacatcatggttctgaatctattgccaatcctctgaccttggccaccttgctggcctccacatccctggggtgcttggtacaaatcttatttgtcaagttcaaatggctgaagctttaaaaactgcaatcagaaagctgaggctgctggatctgcttcaagttccccaatcaagagtctcaattttaatcctggaagcaattgattataaagaagcctaacgagatctgagttttagtggcctccattaattacctaaatggagggtgagacttcacttggacaaggactggcaccaaatcctgcttcagccttttagagctggctcataaatcagaggataagaccaaaaagaattttaaaattggacagaatcatgatcccatccaagagccatttttatataatcctatccctgcttggtaattactaggctatgacaattaattacttgctttggattaaaacccattcagtgctagatggatcatattttagtctggtaagataaattgtactacattttacctgtgcagaggtatcagtagatggagaatgataagctgaacaaaaatggtttattaaaaatagtccagggacaattagtacctaaacagcctgcagattcttttttaaaaggggtttttactgactcatagagagctggagtttctaaagtctttacaaaagaacagcttcattcagcttctatattgagaacatagaaatagtagttagtgcaggcaagtccagttttcagaaaacttgaaatgtagaaactcagatttgcaaactttgtaaataaggggatactcattacaaagctgggctggcttcctacccagctcctgttccctgtagatatattcactaagccattttcctgctgaatcttgaaataatgcatgtggggggatttcaagagccctcttatgtctccaaaccatatcctataaccacccttatgcctcaatctagtaataatagcaacaacatttattaagcccttagtagttaccaaataatattttcaataattttaggctttatttcattacatcctcacaataactctatgaagtaggcactattatcatctgcatttcacctaggagaaactgaggctcaaaatagctagttaaccttcccaggatcactgtatcagttctattgctgtgtagcaaactaccccaaacctactagattaaaagaataaacatgtatttggctcataattctgtggatcagcaattttggctgggctcagctgggtggttctagacttgcatgaggtctctgtggcatgtgtagtcagatgcacatcagatgtgctcatcttgactgggttcttacacaagtccggagccttaggtggaacagctgagctgacttgtctctgcccctgtaggctagtgcaagcatgctcacatggcagctaaacaggattccaagagaggaagctgaggtatgcaagtcctcttgggctgtaggttagaactggcaccgcatcacaattctgcccctttcttttgcccacagcatgtcacaggctagcccagattcaaaagatagaaaaatagattcctcctcttgatagaaagaactgcaaaattacattgcaaagaatgagaatatagggaggtgtggagaattgaggctatttgggttttttttttttttttttttttttggccatccatctacctggttatataatcggtcaattgtagagccaacattcaggggatcccttgactgcacagccagcaccccgaccactttgccatactgccttcataacaatggtttatcttctttctgtaactgggccttggttttactatttgaataaaccctctactttagttaacctgctgctattccaatttttccaggtctttagatctgcctgcttttgacctttgccccaatgccattctgcattagagcgctgctggactctgctaaaagacctacccaaagatgacggtcttcctgccaagggctatgccctgtgattggcccagacaacctactttgccatgtgtcaccaaattccttgcatatactgctctgtcacctcccagcacctccacaatttggcctagcacttcaatgcacttgttcacttatccatggattcgaccctgtctaccactgagcagctcctatagtctttcacttcgaaaagtgatccattgtaacaatcttctaaatgactagtgccaccccctgtttaaaacaggattgtatttcctaaaactcaatatgcaaagtttctgaaacatagctactgcattgagtaagacccactgttaactgtgaattcaactcgaaatttttctctcctctttggagtcaggcattgtagccagccatagctccctatccctgaccttaccctagttgctccttttataccttttataccacaccaggactgcctctacattcttccctgaaccctgctgtggctaagaatcacgcggctgtaaccactggacaagggatctcattatcctcaagatagtgtattaaaaccagatatttatctgtagttggtgtatttgcttttttgcagacactgttagttttggaaactttaaaaagtaaattgttagacacattgagacagagcagagccatggtaggtcaaccacttcactgagtatgtcacctttgacaaattgtttctctgttcagcacttcagttttctcatctacacacggaaattattagattagatgattgctcaagtctcaccaagttttaacattttctttctttttccctcccttcctccctttctctccctctccctctctttctttctctctctctctttctccccttctttctttctttctctctctctttttctttctttctttctttctttctctctctccctctctttctttctctctctccctctctttctctctttctctctttctctctttctctctttctctctctctctctctctttctttctttctttctttctttctttctttctttctttctttctttctttctttctttcacttctttctttctttctgtcacccaggcaactccagtgcacaccactggagtatagccatatgaactcactgcaacctctgcctcccaggttcaagccttcctcccacctcagcctacccagtaacagggactataggcatgaaccaccacacccagctaatttttgtttgtttgtttggtagagacagggtttcaccctgctgcccaggctggtcttgaactcctgggctcaagtgatccacctgcttcagcttcccaaagtgctgggattgcaggagtgagccacgatgcccagcagttttaacattttctgatttgaaatatttgttcagcacctactatatacatggaaggatcagagtcagcagcagaggagctacttgagtacaacacaggacatcaggtcaccctagcaggaatgttcataaagccattagcctgcagcatgtctgaggccatactatgcacccttgctcatatcctgattaatcatccacatcctgtgataatgccccacaacatctgcagtattgcaggtaatatttctgaattcttcccattgcagattccagttgcaaataacagaatcctctctgtctcagcatttttaagccagggtatgtctaccactcttcccaagacatgaatagttttaagggaatcaattggtataatctcattttccatatgtactttcataaaactgttctacttggagttggggtgttttgttggttttctatttctaccttctcattgaaaactgttaattacttttcaaaagaaaatcataacattttattaattttatttgagcataaaaatacataacattaattaattaattaaatgttatacaccaatcctatggtgcattgatctaggatttagaaatttccagggtatcaatcaaagtacagtttccaatatttgtgtcaaggaatctccttgatccaaggaatatcaaggctggtacttcttatattgcatgtacatctattaaggaatgactatggcattagaaacaggcttttggcctgtgttgaggtgccctcttacatcgtagactggggagaaatgttataatgacctcaccacctgtaactcttcactcttggtaaagaatgtatcaatacttatggaaagtgcatatattatagactagggagaagtgttataatgatctcaccacgtgtatttcctgactcttggtaaaggatgtatcaatttttatggaaagcaacctaaggacaaaacaaaaagcctatacataagagctggggaagctggaggcatctgatttcacccaggtggcaagctctcagcgaggatgcatgctttatcctatctgcccttctatcttggacatagaattcagaagttaaatggctgtcgtaggaatgcataataacatgcttatttgaattgaaaaatggagtcagagtatttctgacagaaattaggtctgacttggctcattaatttgaccgtgaacactggctttgtcaattaggatatatggcaggcatttttcataaattgaatgagcttaatctgcagctctaagattttgaataaaaacattatgtaaattacatcataaaagtattttaccacaaaaaatgcattggtaaaagtgtattgaaattaagaatattttttattcctccaaacctttctgaattatgaggttaaatacagtttctttaagtgaaagagaaacagctataattaatagtcatttgtaagtctggaaatgattgcccagcaattgagaaagtggatgaatctgatgactcggcaacaattttcttttttacccccctttacagattaggagattcttacttttttgtttaaaaaactgaaggaaaaccagtagaatttttcaatagtcattaaaataattttaagagccattttattttaggaaggcattcagagaattgaatgacactgctatgacaaaattcctttcattcccatctacttatttatgtaaataaagttttttagtggttacatatataaaaattaaaaatgaaatagaattgatgatgaaactctctcattctagtagcagtaacattcattcatgtgaacataacctaaatggaaaaaactagcttcattcatctcattgagagaaatgtttccaatagcatcaatttttatgtttaataattacttatttaatgtgtaatgtatttatactcttttgattaattatatatactaataattgtaataataacaatatataggtaaattctagaacttgaggatttttatgatcacagaaaatatcaaacaattaaaatttcattttataaactttttttggcaatgaaatatattagggctaacaatacaaatatttgagcataaaatacatacttatgaggacataatttatggtagatatgaaatggaaatataaactcaaggaggaaatataaacattataccatttctaactgttaaggaggactttgtgtacttttaaaagtgaacaattaaggataataaatcaccatggtagctagattccattggatacatttaaaagaatgatggggctattatattttgaaatctcaatgcaacatttacaatatgctagaaattacatcctttttattttatttattctattaaaatttataataaaaaatgtagttgtccacttaaagatatgcaactgggtccatgttctcttcaaatccaaccaggtcagattgccaaatccagattctcattgccttggaaatctgttgtctgcagccatttctggtgcccaaaccagaactgatccgggtttgggtgcatgcaagagatccacattaggtagtgtcaccagcaagggacttgaagcaggggatttggtgctcccaaaattgtttgaaaggtcaagagaaaatactctagactgagcatccagttgtttctgcagagccactttatcctgttgcagcaactgatagatcagaaaactcctaacactgtcacttattgaatgagcatctaacctgacatgaccaggaaagctatactactgctctaaaattatgccacttctaccacaatccccaccagcaaaagagactccccacacccttccttttctttccatgtctctgggttgcacaaattcacctaattggtggagcctaaacatagctggaactctaactctaaggtggtgcagaaattattgtttctagcttttcagcatttatgtaatgggaagggttgtaatggaggcaagtgaaccaccatactatcttccataagtaaggactttcttatgcatagaagaaaaggggactcctgatatgttattcaggggattccagatgggatcagggaattcccaaatctgtctgctgcttgtcacactgcctgtcagcccataatggagcactattattgatgctttccataagccccttattaacatgtaaacattcctataagattgaacagataaaggtctaatccattattaacacctacacaaatgtcagttaccagttgattgagagagaggtatgtggtggggagtggggaagaaccctagaagatggtaggatgtctaagtaggaggcaaaagactatcaaaggcaaattgctcacctacacaaatgagctcctggacatttctgacttcttttcgaacagaaaggccagttgtgctgtgacaaggatgtacataacagagaggcaagatagcaagcacaacgaaagtttctcctgtctcccagcaagccctggctctccagctctctcccagcaaacaaatgcaaggcagaattcagaatacaaatgtcttctgatgtatccttctccaagggcaggaggactgtagagattcacatatcgattgggagcataataatgcaataaaaaattcaaagacaagccaatttctcagtgtttgcaaggactggcaagtccagcaaggttattgatgaagaaattaagcagaatgcaacgcagcctgctccagcctcaactctctcataaaaaaatctacaccagaagcatttctcacatgacgtcagcatgctccagtaaaggtgtacactcctggtggtttttgctagacggatactgattgcattccaagggatgctgtggtgacaaggaacacgaagtctaggttctggtctaaaatctgacactacattgctgtgttacctaaaacaagtcacttgacaactctgggtttccgtttcttcattggtaaggcagaaataataatattaatcttgcttgcctcctaaagaaaatggccttaactcgaggtccaaggataagtttcaggcattgttggagccccctgaaattatagacaaacttttacatttagatggatatactgaagataatttcccacataattctaaactggataatcatatgcaggaggaaaaggggtccatggctcttttaaaaaagttaacaactaatggccaagagaatcaatggaaataagttaatcggtgagaactgctccacaaactcttgaagaaaataagaatatttcattcaagtttacaaataatagccaagacccacttgccttattagtacagtatgtaccatctcccttctgggtttttctgtcctatttgtgtcccaaatttgcagtttttacttgctaagatttttcagttcatatatacaaccacctctcagatcaccaaatgattttaagaatccagactgggttatcccactttatgggcccctcacagttccaaggatccacaccactggtcaggcaagtttccttttagaccttaaagtccattttcactcccttttcttggttattctaactaatcacctgcaactctaagggaggctactcttatgacactagagaactctaaactggtctttggaggaagcttacgcttgatgtaatttctctttgctgttagatctgacataattacataattgaagctgcctctcccttctaaaccagaccaattatgatttctttatttgcaataagatgcaatttagggcatcaagaaagggaattatccaagaatctcatcttccctttaccctcagttagacgcagagttcatgcagtctctggatgctgctcatgattctttcggccctgtctaggcgtggatggattcactcggtcaccgaggtcgcctttctactctggtgattataaacaggaaatgatagcagaattactcataagctttagccaaagctttgttgggcttaggctgctgttccagcaaattcaatgtatgtcttgaccctttggtaagactatttctgggataaaactttttggctcatggcaaaatttgctcaacatttactccttgaccaagtcaatgtacgcctctatccaggataattgccattaaaatagacatttcatttatttggaacacagagacaagtctctacctaaatgaattttggatatatacctctcaacaagagacctagaaaggttcttaagcaaagactatattattaagtatattgaaatttatacagcagtgtaaacatactgatatcagtgagcttggttagcttctaaagagccaaagccacaattagccaataacagcagagaaaataaatatatgtcaacttccaggaagtttagtactcatgtgaagattctttctatgacccctcttttaatcccctttctggtttgtagcctgctttagtgattttaaggtgagttcatgtcacacctcttatcagttattttacgtatatatacaacacacacatactatatatacatgtaaaatagataaaaactttatgtgtgtgtatgtttgtgtgtgatccttggaaataaactttttatctttttaggtacccatagaatatttataaaataactctatattagaacagttgattcaaataagacacaattagagctgtaatcaaataccattctctgatactaatgcaatacatctagaaatgtacaataaaataaaaaatttaatttttttcatttaaataattctgaactaaaaaagaaaatttcagaactgacaattgtgtagaatatgaagatatatgataacatatgagacatagctaaagcagtgttcagaggaaacttttagccttcaatatattaataattgagatcaaatgaaaataaataaaggtcccagtcacaagtattgaaaaatatcaaaataaacctaaacattacatattgaaagaaaaatttaatataaaacagaaacataaatttaaaatagaaaaacaaaaaataataaaattaataaattactttattaactaattgtttgaaaaaatgcgaaattaaataaactgtcagctatcttagtccaaaaaagtgggggtaggcacaaatatggaaacaaatcacagtatgaaacggtcactgtaaagaggcagcccaatgcactatatttccaagcagtaccatctttgtatctaggggtaaccacatgactaattctagccaatggcacatgagcagaagcgatatgtgtgtgtaaaaggatttgcaccagcaattcacaaaaaagaagtgcaaatggttttaaaacaattgaaacaacgcctaatctcacttaatataaatgttaatttaaactactacaacaaaatgtactacttttcaccacccacattgtcagatatcaaaacatttgacaattgtaagaataattactagtaattatagaacatgtactatgtgcccggcactgatgcaaatacttaacacatctttagtgctcacagtaactccatgaggtgaatctcattattacccccttttacagatgaaggaactaaagtacagataatttagtaacttgcctatgggctcatatgatattggcaagtgtgtggaaaatggtcattttcatgcactgcagtggaaatgcacattgcaaaaggcaacttggctatatctactgaaattacaaatgtgtatattttcgacccagcaattctgttatgaggaccataccttacagatctacttactgattgggcaatgttcagtgtacaagacattaactgcaatgttgtttttagaagaaaagccttcaaataagaacattgagaagagttgggatggctactcagggctgcagctggtataaagctgtctctgttctatggctggaggacacagaggagagcacacagcaacacctgcactgcagtatctcctgctaatatcatacttcataatgagaaaccacatactttctccttaagatggaaaacaaagaaaggatgtcttctctcatcagtcctattcagcatgtactaaaagtcctactttgtgcaaaaaaaaaaaaaaaaagtaacaaaatgtatacagattgggaaagaagaaataaaatggtctttgaaaaaaacacctataatcaggagctttttgttgattcccaaaaaaccaacaaaaaaaattattgattacagcaaagtcacagcatacaaagttaatatataaaaatcaattaccttcctgtacaccagcaatgaaccaattgaaatttaatattaaaaatgcaatatcacaataccaccctaaaaatgaaatacttaggtaaatatgtgtataatctatttgcagaaaactataaaactctgatgaaagaaatacaagatctaactaaatggagagatattccatgttcatggattggaagattcaatatagttaagatgtcaattcttgataacacctgacttgatctatagatccaatacagtcccaatcaaaattccagcaacttatttggtatatattgtcagactaattctacagtttatagagaaagacaaaagacccagaatagacaccatgatactaaagaagaacaaagttggaagactgacactaccagaattcaaaacttactataaatccacagtaatcaagacagcgtggtattggttaaagaacagacccatagatcaatggaacaaaatagagacccctaaaatagattcacacaaatttagtcaactaatctttgaaaaaggagcaaaggcaattcaatggaaaaaggataattttttcaacaaattgttttgcaacaattgaacttctaaatggaaaaaacaaaaaaagtctaagcactgattataccttttacaacaattaacccaaaatgaatgatagaactaaatatgaaatgtaatactttaaaacatctagaagaaaacataggacaaaaatctatgtggccttgagtttgctaatgagtttttagactcactaaaagcataattcattgaaagaaagagtttaaattagactttattaaaattaaaggcttttactctaaaaacgacactgtgaagagatcaaagataagccatagactggaaggacttatttttaagccatatacctaatatgggatttgtatccaaaatacattaaaaactcttaaaattcaacagtaagaaaacaatcccatatttaaaatgggcaaaagatctgaacagacatctcaccaaaaaagatggcaaataaacatatgaaaaggtgtttaatattatttgtcattagagaattgcaaagtaaaccaacatgaaatgacactgcgtgcctattagagtggctaaaatagaaaatattgacaatattaagtgctagtaaggttgtagagcaacatgaactctcattcattgttggtggaaatacaaaatagtaccacccctttagaagagagttttgcaggtttttctgtagagctaaacatagtcttattatacaatacaacagtcacaatcctaggcattcatccaactgatttgaaaacttatgtccacataaaagcctgtatgtgaatgtttacagcagctttactcataatcactgaaaactgaaagcaacccaaatgtccttcaataggtaaatagataaactgtggtacatcaatacaatagcaataaacaggaataaacaagccaagcaaaacatgtatggattaaaagcacattgttaagcttataaagccaattttaaaagcctacataatatatgattccatttatatgacattctggaaaaggcaaaactatagagatggtaaacaggtctgtggttaccagggttcagatgagaggaaggatttgaataggtggagctcagggaattattttgggagtgactattatgtatgatgctgtaatgacagataaatagaacttgatacaaagagtgaacattaatatacacaaattaaaagaaaattacttaagaggttgggagatcccatgatgaaatgcagactatgaggaaaaaaagtctaattgtattacaaatgtgtgaaatacccttattgaagggtgcgtttgggcagggggagatgctgacctaagtaaccttggaaatgagtggagactgtaagactaaaggcaaaagggattctatataagcatggtactgtagtcgataaagttgtttcccaaggggttatgggttcacaattctgatactggttgacatgtatactggtactgaaccattaagtaattagagggtggatattgggagtcagatttcttcctgttagtgtaggagattgctgacatataaaggaggaagaatagaatgattcatgtggtgttaaagttggcaaaatgagcaaaaagccacattaagtcaaagggacacaggagccaactgaagggctcccaatggctggaatatttttagcttcttttttaaaattaaactctttgttttgagaaaacggtaggttcagatgcagttctaagaaataaggcagagtgatcccatgggtcctttgtctgtttcccccagtgtaacatcttacaaaactatagtacaacagtacaatcagcatattgacattgacacagtcaagatacggaacatttttatcacaagtgtctttcatgttgcccttttatagccacgtctatttccctcctactcccattctctccttaattcccagctacctactaatttgttctccacttctataattttgtcatttcaagaatgctgtataaatggagtaatatagtatgtaaacttctgaggttggctttttatcgctcagcataactgtctggatattaatccaggttgctggatgtatcagttgccatccctttttatcactgagtagtattacatggtatggatgcactacagcttgtttaatcctcatcattgaaggacatctgagttgttttcagtttggagttgctataaccatttatgtacaggttttcatgtaaaccaaagtcttcatttctccgggataaatgcccagaattgaaattgctgggttatatgacagctgcatgtttagtttttaaataaattgtcaagttatttcccacagcagctgtattattttatattcccaccagcaaaatatgagtcatccagttctctgcatcctcaagctagaacaatttgagcaacaaattcaccccaaactgtaaccagagagtccaagagctgattgtggtagtcgatactggtgggcctcccagagcaaagagcaaggtggaaaaggatagtaggtatccaagtagcacacaaaaaatatccagcacagagaagttgtgtcaatcacctgaaatgttcatcacaatccactgcatccctggacatcagacatggcttttaacttcaagaagtttacagtttcaggttagggataagatatatgcgtgaatataaccatcatcaaggcaggaggtaatcagagtcacaagagaaccccatgaatcaaaaagtggcagattagaggagacatcatgatgaacatatcagatgaatcaaaccttgaagaatcactagactctgccttgcctatcaggaagggaacacattcacatacttatggttagcttacaagaataattccctaaatctgctttgcatgtatggtttataaatattttcacactcatatcttatttgatcaccattttatgtagatagtgtgtatcagtcagatattgatatataacaaaccacctgaatgcaattcttatgctaacgacccagagttacatcaaatttcacagataaagagcatagtcttccaaaagactacttcacttcagacaccatcagcaaactccagggttcccagaccattcacacttctgatcaactggctacaaattcagggattccccctaccctctcaagtgcaagaatttgctagaataactcataaaactcaggaaaacactatacttataactataattttattataaacaatacaattttgggaccagccaaaggaagagactgatagggtaaggtctggaagggttccaaccatgtaacttctgtgtcctcaagatgttactctcctgtcacattgatgtgtatcaccagccagggaagctcaccagacctttggtgtccagagttttcctcggaatttcattacataggcataattgattgactcattggccacatgattaaacttgatttccagaccctctcttttatcagaagatcaggcagatatcaccaaagctccaaccctttgattacatgcttggtctttctggtatgaccagaccccatcctgagtcatctcattagcataaatttacctgggatccaagggacccaccatgaataacaaagacactcctatcactcaggaaattccaaaaatttagagattctctcccagaaatgggaaataaactagctaaattttcagttataaaacgtcacttcaatactcagtagtttaaaacaggagttatttattctcacacacctatagcttagctgatctaggataagcatgactgggcccagcttcaagctatggtagggtccaggtcaactctatatgtctcttacctttgaaccaggagatgagataggacctattcatagaagaatcaaaagaggacaagcccaaagcttcaagcacagtacaagcctctgcttgcatcatgttcactaacatcccactggcccataaagttatctagcttaactcaacatcaaaggaggtggggaagtatgttccacttataattggaggtgcaaaggggcaaatatttcctgaaaaataatctgaactatcatataagagaaatattatgtactcttttagcccctttgtggcagaagctgtgtgctaaagatgatttctaaatatccaggaccaccatactatgcccctaaccactggctgtttatatcttaagtgtcctccatagactagtatcccttgggcttgaggctttgatgaaaccaaaatgggtcatatattagtctgttaccaagtcttcacaaataaatgtttaccaaagtaattaaactctcagcttatcagcaaataaaaaacagccatcattggaaaaaagagcccactgatcttcaacttgtggtctctctttgactttctcccttccttttttcactctccttttcacagtttgcccttaaaatccttctgctctcttgatctccagacatgaatcatgctatgtaatatgaatgataatgagtgatggtaataattgaaaagatgaaaaatctgcatttgtttcttatctagaaagataccaaaacagctgccagggagtgttcagagactctacagcccattccataatttatgaatgtgagaatgctccccatgaacagcctggatgagtcagatgttttaattgggctgccttaaatttagaaccaaaggagcttgattcctactccactgggtagtctcatgaagggtgttccagccagagaggagccagagttgacacttacatacacaagtgggtagaataaagtacaaatgttgttaatgtttgtaagacactacattctggttttgttctttgattttaaggttgaagaattttcagagaagccttattagggaagacttctcttttatatgaaagttacctcattgtgtcctctcctaggcaacaataacttgagtgtgaaaatcagctgggatcccacattgctaagcatttctgaaaagggatctttaatgtggcactccgtaaaagagttaaaagatttgttgaaaaatgaccacatccatgctctgtgaaaaagaaatataggcaatttatgaattttatattcatgacataatgtataacaggtttattcacattgattcattaagtaagtgtggagtgaggcatgtgtctggtactgtccttggtgctgatgccagcgacacgagcaagaagagtttgtgtctcacggaactacagcctagtggaggagacagacattactcaagtgtaactggatattaaaattgaagtttcaaataaggtatcataatacattccaaaatgagttgtcagatcaacatttgagttttaaaagtttctgacaagccccttccctaaaggagaccaaaaaatgggcattgaatagttggagaaaaggagaggatttgaaaggaggatttcttacaagcgagcattgtcataagcttccccacaataaggaaggatgaaggtgcttttctcttcatccaagccccaaaaatgagacctttaatgtgaccacttggagatctgatgtgtattcctgcaattatagggaacagtaatgtatttcacaggtctgaggactctaaaggtagcctaagctagaagagggagggaaaagagagaattgtgctatttttgaaactaattgctctccctttcaaaaatatgtcaaatgtacaagaattcaaggcatacaaatttcatgtgtatcaattatctattgcacaaaaatgctgcataaaaaacagccacaaaacttctgtggtgtagaacataaaggatttattttgatcaaaagtttattggccacctaggatgttcttcttgtctttgctgggattggctgatcttggctgatcttggctgggtttgctcccgcatctacagtcagctggcgggtttgctgtaggctggatagtccagaatggccccagttaaacaactcatctttcttccgtatggtcttattctttagcaggttagcatgggcttctttatgggagtcagatccagtttccaagagaaactgtgaagaaattgcaagcaccatgaacagactattggtggaaatcttgactttaagaatgttgatggtgagtgctgaatagaaagtgagaaacatgttactgaaaatgggagaaagggagatccctgttatgtactggcaaatgcttatcaaaattgtattctgtagtcatgtagaaaacataacatgtaagtgataaatttggacgtgtagctaaggaaattcccaagcaaagtgttgaaggtgttacctggcttctttgtattccttatagcaaaatacaagatcagatagataaattgagggaagaactattaaacaaaaaggaattggaaagactttggaaattctcagcctctccagatgtcaaaagatgctaaaagtccaaaatggttgctgaaagtgtgaagtagagaaaagtctgagtttgtgactgtatgaccctttgctgaaacctcagatctcatctaaatatttctagttgagaaggacaatatcaaaaggtcaaagtactcgactacacagtaactttccaagcgataaagagtgttcttcacagatattctcaatcaaaccaaagggcctcaagaagtttaaaatcattgtccttcatccatctcagcagaagccaaaattacattatcttgaaaatatttgtgatgtggctcaagcataatggaataaacccttaagacatccacaagagattcacaaagttcttgagaacattatatcagcagaaacactaccaacttgattgaagtggacagagacaatgcaacacaaaggaaggctttcaaacctccaaatttccactggttcaaagcaggctgataaaactactatgcttcaaccacttgctatcttttatgaaaaatgaatcacttatagggcagaaccaagaaccagaatgcagagccaagggcccacagagcaaagccaagagccatggaggattattcccagggcttgaaacctaaacaaggaattttggctaaggttttcctggctaaatttcaaagctgctttgtaccagtgacttcatttttgccttccattccccatctaccaacccttttgaaccagaatgtccataactattaatctacgcatggtcttgccatcatatgttgagacagttgggagcagatgacttgtccctttagtttcacaggtccacagatggaggagaattgtaacccatgaatttgcatactccatgaaatttcataaatcatcatcatttgatttaaattttgagaatttagactttgaccaaatgagatttatttttttattgtggcaagaatccttaacatgagatccaccctcttaaatgtttaagtacacaactcaatattgctaatgatagacatgatgttgtacagcagatttctaaaatgtattcatccaaagaagacatacaaatggccaagaggtatataaaaaatgctcagtatcactaatcatcagaaatgtgcaaatcaaaaccacaatgagatatcatctctcacttgttgggatggttgttataaaaacaacaacagaccaggcgctgtggctcatgcctgtaatcccagcactttgggaggctgaggtgggtggatcacctgaggtcaggagttcaagaccagcctggccaacatggtgaaaccccatctctactaaaaataaaaaaattagccaggtgcggtggcatgcacctgtaatcccagctactcaggaggctgagacaggaggatcacttgaacctgagaggtggaggtcacagtgagccaagatggggccactgcactccagcctgggtgacagagtgagtctccatctccttatagagagagaaaaaaaaacgacaaaatgtggagaagttgtaaccattatacactgttggtgggaatgtaaaatggtgcagctgcagccactgtggaaaacaataggtaggttcctcaaaaaattaaaaatataaatactatgttatctagcaatcccactccttctgggtatttattcaaaataatgtatatcaatatcttcttcaagagatatctacacttacacgtttattgcagcattattaatattgtagccaagatgtggaaagaatctaagtgtctatcaatggataaagaaaatgtagtacacaaatatacatggcatattattcagcctttaaaaaataacaaaattcagccatttgcgacaacatgggtgaatctggaagacattacactaagtgaaataagccagccataggacaaatactgaatgattccacttacatgaagtgtctgaaatagtcaaactcacagaaagagagtagaatagtggtcatctggggccagagaggagaggaatatagaaagttgctgagctaatttggatgtaatttttaatttgagttgatgctgcagtggattgagactcctgaagaccttgggaaagagtaagtgaatttagcacatggaagagatgtgaatttgggggaccagaggtggactgtggtagatagaatcctgaaataaccccctaagatatttcatcctattatccttggtattgtgactatgatgagatagcatacccataattatgtaataatacatagccaaagggattttttgatgtaattcggttactgattagttgactttgagtaataacaaaagagattatatgggtgagcctaatataatcatatgaacactaaaagcagagagttttcttcagctggtagcaaaagaggaagtcagtttcaaagcatgagaacttgacacacaactgctgatgtgaagatggaggtcacatgacaaggaatacagcggtctctggaagcagagaacagctcctggctgataaccattaaggaaacaaggacctcagtcctacaactgcaaggaattaaatttgtctaaaaaaacaaataagcttggaataagcttcttccccagataacagcccagcctggctgacaccttaactctagctttgtgagtcccaaagcagatgaacaagccaagcccacacttctgacctaaagaagtgtgagataataaatggctcctgttttaagccactatgtgtgtggcaatttgttacacagcaataagaaaccaggacagcctctgaaggcctaggctcagaactgacacactgtcatttctggagtattttactggtcaaacaagtcagaaggccaggccagattcaaaaggtgggaagatagaactcaccccaggaacattgcaaagggcttagattcatgtaggtaaaaacagctggggacagcctgccacacaaaataggaatgttgacttggggttattttgaaaggaaacctgcttaataagagagtttctgccagagagtaaggagaccctaccagtggggtgaaaagctgggaaaccagaagccaagggagtggtgggagaaaacagttaaaggagggtcatgagatgggtccacctgctgcaaatatccaccaggcccagagaggccaaagccatttgacagtagtgccagtaccagtagaactttttggtcttcccccgctacatggtcatatccaaaagggtgggctaatccctggacaggcccactgagcttaggctctcctaggtctttaattcatttgcttgtttatggattggtcatttttatataagagcaattgaactgggcttgtttgatttttgccaatattgtgtaacccagatggcaccagtgacatagtaaaacattgtgcccagaacttggaaattacagctaggtggtttaggttgctagatgcagtttttcaaccatatcagataaagtggaagttctgctggagtttgagggtggcatgattgaagcatgaggggcttgctaaaccccacccccttgacttctgcttctcccacagtctggcagtactctgaactggaggagaagagcaccgtaccaacaaagtgcatttctcaagaattcacaagcccaaataaacacatcagggactatccttcagtctaatgtttcctgttgataacataggcctagagaaaactgttacttcgataatattcgtgtgtcagagctctgtatttgccaagtctttatcaccttcctctgtaggacaacatcaaaggatcagaaacagcttctacctactagagaaggtgagctgttccctgaaaatacgtcacaaatcatgcttattcagcccaacagttacatgtttgataggtatgaactcctctgcacactcaaggtagaagttttttatttcttaaactggttggaaccagctcccctaaactggtagagagactagtaccacattttggaggcttcactgacatcactcattaaagaacccttgagcttacacagtgcaaaatggcagaaccatcgaattccacttcaggctggaagagctctgtctggtgtctgttgaactgatgttatctttactgccattggtttgtgctgcctgtattaggctgctcttgcgttactataaagaaatacctgaggctgggtaatttataaagaaaagagatttaattggctcacagttctgcaggctgaacaagcattgtgccagcatctggttggcttctagggaagcctcagtgagcttttacttatggcagaaggtggagccggagaagtacctcacatggccagaggaggagcaagagagagagtggagggggtagggtatatatttttacacaaccagatctcacaagaactcactcactcactcaccaagccataagggatctgcttccatgacccatatacttactaccaggccccatcttcaacaatggggattacatcaacatgggatttgggaggtgggacatccaaactatgtcactgccacgtgctggtcctccaccacatattcagtgcactgctcagctatagaagcaactgcagccatcagtggtaagctcagcaacagatgcactttactgagacttccaggccactgctaccattttccatccctcacagacacccacagagcattctccagaactttgccatctcagaggtgatggctatgctagagtgcattaggcatctgcctttcaaagaatctacttccaagtcttgatttcagccccatgcacatacacttgtaggttgggctattttattttctaactctccaaattcaaaggttaattccccctctcagtcaactcaataagattcattgccctgataagccaagaacgggatcttaaacttgaaaataaaaatgtttgaacctccttttaaagaaaaaaaatttcccagacttccaggattcaattatggaatctacacaaaagacatgctataaactgtcagccattcggctgaaatgaaattattgctcccactacgattgtaatgaagactgccacaagatctttttaaatttagcataaccttgctttgcaatcaaattcttctaccactttgctccattgttgagcaaactgccaccacgcagtgcaccagaatactcaccagcttacccctgctgtgaaggatcacttataaattaaatccacctcattctttagttggcctgataccagcaggatcataaacacaatgaataaggacattgaaaaatcacaaggcaggactcagttatcttaaaaatccataaaatgtttgcattaatatatttagctactgtctaaatgaaaacctccaaatttttcatttccaaagaatcgtatatatcacagaaattatcatagttaaatctttagcagttacctccattctatgtttgataattttctctttttttgatggagtctcactctgtcacccaggctggagtgcaatggcgcaatctctgctcactgcaacctccgcctcccgggttcaagtgattctcctgcctcagccccctgagtagctgggattacagccacacactaccacacctgactaacttttgtattgatcattttctaataatatcaagaaagggaagtacaggatgtgctatgatgtgttcttactgtgcagcagccacccaacttcagtggtatataatgataagcagtcattttgctcacacatctgcaggttggctgggttttacctgatctaggttggactcaattgggtgtctctaagcagcaggttggatccagttctgctccatgtctattttatcctctttggaccagtggaccagccatggcatgttctcatgaaaatggcagaagcaaaaaggaacaagaagaggcatattaggcttcttaaatccttttgggaaccagcatcctgccacttccactggccaaaagcaagccgcatagtcaaatccaaagctaatgggctgggatgcacatttcaccttaaaggcaagagttgtgaagtcacatggtgtgttagtccatttggattactataaagtaatacctaagactgggtaatttataatggaaaatggtttatttggctcatagttctgtaggctgtacagaaagtgtaccacctgcatctgctcagcttctggtgagggcctcaggaagtttacaatcatggtggaaggcaaaaggagagcctgtgtatcatatggccagagggagcaagagagaggggagaagccagtctcctttaaacaagcagctcttgcatgaactcaccaagcaagaactcactcattaacatgaggaaggcatcaagccattcatgaaggatccatctccatgacccaaacacctcccaccaggccccacctccaacactgggaatgacatttcagtgtaagatgtggagggaacgaacatccaaaccacgtcacatggcaatgggtcaggatacagggaagggtgaagagctgagacggacaattccatctgccacctatgaccagggaacttcatctattctggggtggcaagaaagcctttcctgaggaaatgaaattttggctgaaaagtgggaggcgggcagggagcaagggttaccatgtaaagtagaaggaatagcattcttccatagggaatagcatctgccacagtcttgaggcaagaggaccatggcacattaaaaaagggtggcaaggatgatgagaaacaaggcacaggagaggaagcaggaaggcagtcaggagcccgagggggtggggccttacaggccatgccagtggcttttgacctttatgggcatagggaaatcattgagaagttttaaccagagaagtgaaattttgcatttgaaaactattttcagctttatacagcagaaacatcaactcagaatggcttagacaataagaaaatgtattacatgactaacacaaaattggagcccctccaagtcggtaattcagtaactctgaaacaacgcaagggacaaagcattccccagttgcatgtcatcatttacaatagatcagctctgtcctctccttaattcttttaagtcccaagatgaatacataggttccagacgtcacatgcagaaatgacagtgtccaggtgaagaaatgatcctcttctccctccttttcaggattaacaaaaaactttcccagaaacctccaggggaagtgacatctcattggtcaaaactaggttacaagcccacccttgaaccaatcccaagtaagaagaatgagactgccatgactgacttggaccaatcaagacctatcagctagagtcgttacgtaacaaagacaaaactgtgagggggaacggcttctttcagcaaaactgtgatgtccactaggaaagagggacttggcacatggccaagcccagaattaagggtagaaaaatacaccccaacttcagtgggaaggaatgcagagctacatagcaaagagtgaatacagggaggggtaaacatttggacccattaattcaatatgccaccatacttctaaacattcccatcgactggacacacatacacacacacccccacacacacggcaaaattatcccattctgtggcattgaacacatagcaaattgtgtatatttctcacatgaaacatgattgcataccaccttgtctttattattgcattagtctctactgctactataaaaagttatcacaaaccaagcgtcttaaaaaacatatatttattatccaacaattctgcatgtcagaagtctgacatgggtctcactaaggtaaaatcaacgcgccagcaggactgtgttcctttttggatcctctagagcaaaatccatttccttgcttattctgattgttcaaagccaggttgagctcctctcacattttgtatttttccttccttttttctggttctcacatctctccaatcttgtgtgccttcctcttctttttttttttttttgtttttgtttttgtttttgttttgttttgttttgagacggagcctgtagcccaggctggatgcagtggcgtaatcttggctcaccgcaacctctgcctctcgggttcaagcaattctgcctgcctcagcctcccaagtacaagtagctgggattacaggcgcatgccaccacacccggctaatttttttttttttttttttttttttttttttttttttttttttttttttttttttttagtagagacggggttttgtcatgttggccaggccagtcttgaactcctgacctcaggtgatctgcccacctcagcctcccaaagtgctgggattatagccacctcgcccggcccctcttcacttttaagaacccatataatgacatcaggctcacctcggttattgaaaataatctccctgtttcagagtctcttgccttaattccttttgttttgtaacccagcatttcacagctttcacggattaggatgtgcacatctttgggggccattattgtacttacttcaaatttattaagcaactattaaatgattattcagcttcgagtgtgtctctccgagtcttttgagagcactgtgagtttagagactgagtgtaaatgttcctgtgctctccacctaaccactcagtaacaatgtggaaaaaaatgaacctggtatacaggaaagctctaatatcatttaaaagggagagttttatctaagtggtctattcctaacacaagagataaatcctactgtttaacacgtgacatggttctgtcttttacctggataactgtaccagcaatagcccaaaaggtatctgtggtagaagatactacactaaggaggaacacaaaaacatgaacattttatttgctgtcccctgtaagtacttacaaaacattttggcagagaccaaggggaaaatataacatcttaatgaaaaaggctcagtgggaacccctgaaatctatcaatgccacctagggggatttataacagagggtgaaaaaggctctaggccagtttctgggatgctagcatatatttgctttgtggtgaatgagctaatgcagggtttccaagtgcgccaaacagatgacgcacacactgtgagcttacttaccatgtcctcaggggactttgtccaagaattctccaagtctccttcacctagacgtctaaatctgctgggaaagaggggagaaccaagtgacagatggagagaaactccaggatagcacaaagcaaaggatgcagagtcagaaatacacccacggagagagggagcagaggaagaaaacgacagggaggcactgagacctcgagaggtggggaggggaagggaaaacctcatcaacacaggaaacagaaataagtaacccctaatctgctcagtcatcggttctggtaaagcccctttaaatgctgagaatcattttaaaggaaggtaaaagctgctacggttcatggagtacttagtcattccatttgaaacattttaaggagagtaatcaaaagccactgcagtgggagatacaagaattgggttcctgctccaggtcagccatagagtatgtgtgcagtcctgacagtttgcatcccaaggctcggtctcctcatctttatatgatagagggattggcccgggtcagggtccccaacttgtgatctacagccccagaattgagggaattggtaaaatttgcatagaaaaaaattttatttttgtcagcatccaactgaaattcaacatgtccttcaatgatgaatgtaggcaattagtattaataccatccatgactgtcgccaatagaaatcacagacgttttatgtcacattaaggattctgcaaatattttataatatcttttattctcattactacttaaaaactgaagattggctgggtacagtggctcgtgcctgtaatcccagcactttggaaggcaggaggactgtttgagtccaggagttcgagaccagcctaggcaacatagggagagcgtgtctctataaaaaaaatttttttaaatacaaaaatttcaaaaactgaagtttttaaacctgtgtctagatcttatttttaatgtgcattcatgaaacacatatatgactatattacaaatttattttctcttaacattttaataaatagagtttagtcaattttctttgcaattcaatgtattttattctgtttatttagtgataattttctggcacaaacatacacaaacacagagttaacaaaataaatattggactaggctgggcatggtggctcatgcctgtaatcccagcactttgggacgtcgaggcggacggatcacctgaggtcaggagttcaagaccagcctgaccaacatggtgaaagcctgtctctactaaaaatacaaaagtgagccgggcgtagtggtggatgcctataatcccagctacttgggaggctggggcaggagaatcgcttgaacccgggaggcagaggttgcagtgagctaagattgcaccactgcactccagcctcggtaacagagcaagactctgtttcaaaacaaaacaaacaaacaaaaagaaatcttggactagatgtcctctaacatcccttgaatcctgtgaattgattgacagtacaaatgtttgcagatgtcctacatatcaagccctgaagaggttaataatttgcccagcatcttacaggtagcacagagcagagacagaactggaactcaggtctcccccacagaatgtgggcacttaattacatgctacactgagaggtaagtcctctcaaccacttttttctcccaccaccacgtctaaccatctacctgcatcttaccacctgctactatagaaaaattgcctaaaatcaggtcaacttcttcactggtaaatcaagttgcatcttctcttacctacagaagaacatccctctggaaattctcctctctctctcctacatcaacttttccctcattactaaattctacccatcaacccacaaatatactattctttgtcccatctcaaaaaaaatcaatattagttatattgctgcataacaaattatcccccaaagtagcagcttaaaaccagcaaatgtttattctctcacagaatttataaagctcaggatgctgggagtggcttatcctggtggttctgatgcagggccctccatgtagtcatctcaagactcagctggggctggagaatctgcactaggctccctcacctggttactggcaggcctcggctcctcatgggttgttggctagaggcttcagtttctcatcatgtggacctacccatagggctactcaaaatatgacatattttctcacagaatgaaagatccaagagagcagaaaagcaaaagagcatctaaaatggaagctgccatcttttataacctaacttttgaagtgatataccacgacttctgtcatatgctattggccacatgcaccaacccaggtacaacacgagaggggactacacaagggtgttgatagggtttggctgtgtccccactcaaattccatcttgaattcccatgtgttgtaggaaggacctggtgggaggtaattgaatcatgggggcaggtctttcccatgctgttcttgtgatagtgaataattctcatgagacccgatggtattataagggggagtttccctgcccaatctctctctttgcctgctgccatccacgtaagacatgacttgctcctccttgccttctgccatgattgtgaggcctcctcagccatatggaactgtaagtcattaaacctctttctttggtaaattgctcagtcttgtgtacgtctttatcagcagcatgaaaatggactaatacaggtgtgaaaacaaggaggtggggatcactgggagccgtcttggaggctgattgccacaaatcctttccttgcacctacattcttctccatatttctctactccctttagagcaaaactccttaaaaagttgtctatgtcactgtctgtaatttttcttcctccattctcacttgaatcccttctattcagacatttgtctctcatgttctactcttgtcaaggtcactcaggacttccacatggccaaatccattggtcagttctcagtcctcatttcatttgacccattactagcacgtaacacaactgatcactcccttttccttgaaataccttctgcattagacctccgggatatgacattcttctgattctactcctgcctcaccggctgcttaccaggcatttcacagatacgtcaaggcgtggagggggaaatacttagcagtcacagcaaaaactaaataaaccttaaaatgagctcaacaacgatcaatttcagaaaaacattaaaatttgtaaaagagagaaaacattattaaagtttattatttggtcaaacaatgaataatgtctgaacaggcagaatactctctgaacagtttgatcgattttttgcataactatattgagaagattgaataaggaaatttggaagggaaggttgtgcaagaaagatgggatataattttgtaaaatcttaaaagtgatatacacatattatttagaaacatggaagttcttgccagaagcaacagttaaaaagttgaaagtggttacctcacccgtatgctaggtaaattggacaaaccatcacactgaaagttactagaaaatctggagaagaattaactgatgaaaggcattggcgagctaacaaactagtgaagaattgtggagtcaaaatacaggagaaaaaaaaactgagttttttctctggagaggagtgccaattctggaaaaggtgactgagagacatttaaactgtgttttcagctccaaggaattgaaaagacaacaattgaagttcaaatcccaataagcggtgaaactccaactttggttagaaccttaaaaggctataccttaagagaaaaggccagctagaagtaaacccaccctccctcttacagactaaacttagctgtaaatcatctcaatccctaaaattaaactaacgtgatctcagattactggggtcctcattcctttgccagaaaatattataaatccctcagaatgaaggtaacattatcctagtcctcaaattatttctgtaatttttcatgaacaaggacaggctgtcaataaaaaaataaccatctaaatgagggaacataacaacgtgaatgaaaaaccacagacagtagaaacatacccaaagaagttctagataacaaagatttcagatacacatttctaaataactacacttgggatatacaaggagagaaaatgtcataaattttgtcagagagttaaaaactacgaagaaatggaaattttagaaatgagaagcaaagtaactggtattcagaactcaatgcacatagatttaactgcagattagactcaaacaataaaaaatgagggaactgcatagaagtcataaagaaaaaaattcagaataaatcatagagagacaaaggaatgaaatagaggagtgggtgtaaaagatgtaagatatacaatgagaaggtttaacctacgtgtattggaagagaagagagaggacacagaaatagctgaagagatgatagctgacaattttcaaaactgatgaaagacattaagtctcagattcaagagtatctacaaaccccaagcagaataaacaaaaatgagcccacacatattaaagcacattgtagtaaaattgatacaaaccaaagagaaaataacagattaccttgaaaggagcaacaattagactgatatctcactgttgaacagaaataatggaaagcaaaacaaagtggcatctttaagtactaaaagaaaataacttccaatatagaatactatatctagtgaaaatattcaaggatgaagctgaagcgaagatatttacagacacaaaaaaaattgacagaatttgtcatcaactgaaatgatgaaagaaaatgctacaaattactatatcctaaaatagaaggaaatgatcccagattaaaagccagaaagtaacgaatggggaaaaattaattttaaactcttctcttttcacttaatgcctttattactagttcttatttttttgtattaaagttgttacctctaccttcttttttttcatttgtttggcatatttttctcattctcttatatttaaatttttggggtttttgtggcttttttctgataagcaatattattggatttctaatgcaatctgagagtttttatgtttaactatgggattttatcttaatttaatttatttaacactgatatttatgatttgtcttctttcatttttttctgtactttctcattaaaaccacacactaggcagtctcctcatctctgtgaaccatgaaatttgataccttcggtggtctgacacaattgccacaatcttaactcaatgtgcaataggttgaactacccaagtcccaatctaagatccaacctgaggtgacactgatgaacaaaggaatagagacggtaaagcagagttaatctactaacagattatcccaaatgtgtgcaaattagtgtatggtttaggctaagcatttaaaaatgcttctgtgaaccaaatcatgcaaaatgccaaatgtttactctcctttaatctcttaaagttgccaatttttatttctactttgaattctgttttatggtgcaagcatagtctctttttttgtacaaatatttatgatcaattttacccttcatgattttgtttctcaatatttttattcctctattagtcatctaaagtttttcaaaggcactctttaacttctatgcctctaattgccaaagtcaaaaaggaaattttattatttgagtgttgctttttgaaaccaccaatttagccacacttttgcttgtcttcctcccatctttgttaatataatctgggttttaaaagcaaatgactgttatgacatggttattttcatgttatataccttttagagaatggttttttatatttgcatttagctttataatcaaacataccataattgcttgacatctctattttaactattttttaacagtttcagtctttttctttgctatgattaccccaattttagctctttattttgtgcttttctgccaataagaacacatctttagatagacacattgattctgcatctttgaatccctgaaatttaggaagtattttgcgttattttcattcataaaatacacatgacctaccttccttccttccttctttccttccctccttccttcctgtctgcctgcctgccttccttccttccttctttccttccttccttccctcttttctttcttttttgagacagagtctggctctgttgcccagggtggagtgcagtggtgcaatctcagctcactgcaacctctacctcctgggttcaagggattcttatgcctcagcctcccgagtagtagctggcattataggtgcacaccaccatacccggctaatttttgtatttttagtagagacaaggtttcaccatgttgggcaggctggtctcgaactcctggcctgaagagatccaccctccttggcctcccaaagtgctgggattgcaggctttagccaccacaccaggcccaaattacatcatttatttctgacatttagagttgacagtgaaaatttagatcagcttgatgtttttcttcccttaaagacaactttttaaatttgggagtgagtggcctattggggtatttatttttcctttatcctaaaaattcaaaattgttggccggatgcggtggctcatgcctgtaatcccagcactttgggaggctgagacaggtggatcatgaggtcaaaagctcgagaccatcctggctaacatggtgaaaccccatctttaccaaaaatacaaaaaattagctgggcgtggtggtgggcgcctgtagtcctagctactcaggaggctgaggcaggagagtagcataaacccaggaggtagagcttgcagtgagccgagatcgtgccactgcactctagcctgggtgacagagcgagactccgtctcaaaaaaaaaaaaattcaaaattgtttacaatctacatttagttataggtcccttattgaatgattccaatctgcatgaaatatatctttcttcacatcaggaaaaatgaatccattatctccttaatagaacagaaatattagtgcataggaatgctcttcccactgtcacgtctccatttctgtatgtatcttactctttcacagctgccccctttgcttgtcattttcctccacattttcaagcttgtggtccatatcactaatttggctttaagctgtattatttaggcgtcatgctgcctctgaagtggggtttaaatctgcagttgtgtgtttagtttcctaataattcttccttatctcacttcaaagtttatctttttatcttgtaatcacagtctatttcttcgatgtggttctcattgcatagaaccaggcacttttcctggaagagtccacagtccttgctcctccatggaactttaagacatttgtactaactgctcagcaaggccaccagctgctgtaacaattcctgacgccctagacacagactctacatgaaaacaggagcctgatttaaatggaacttggaagtctttagcactacttatttcctagtttgctttgaatgtaccaagacctaatcaatagatcattcattaacaaatgtttattgaacacctgctatgtgcttggtattgaagatagtgagcaaaaaagcctgatctctccctcaagaagctttcatctttattcattattcaatactcacaaaaacaaatacacctcccaagacctactctctcacatcctctctgccaattcatttcatcagctattgctgcagcaaccaactgcacacaggtgggatgacagcaccttgcctcagctattaatatatcaagcaccgcttgtcttctgctccagcgtttctctggagcagttacagtgaaagaacaggaatccattcacccattctgatgcatatgtcaacctgaagaatgtggaagttagtaccctacttcaccgatagggtacaggagccaatgtaaatgctcctttcttttgtcccgcaggtggacatttttgaggttcattctacatggctctttggagagtccttagcaggacaagcctactgcagtgaccaactcattaacacactttcgattgactttccctcctgtcatgtctcagtctttccagtctccacctcctgttccctgggatcactcccccaaactatctaagctctgcttctggggaaccacagtctaaaatttagttacaaatagcaagtgtttttaaggaaaattatgaggtgttaagatagcttctgcaatggacttgatcttgtctggggaatcagtgaaggattctccaagaaaataacattgaggccaggtgcagtggctcacgcctgtaattccagcactttgggaggccgaggcgggcagatcacctgaagtcaggagttcaagatgcacctggccaccatggtgaaaccccatctctactaaaaatatgaaaattagcagggtgtggtggtgggcacctgtaatcccagctactcgggaggctaaggcatgagaatcgcttgaactcaggaggcggaggttgcagtgagccaagatcgtgccactgaactccagcctgggggacagagcgagactctgtctccaaacaaaaagaaaagaaaagaatattgaaacagatatttggataataagatgatacgcactggcagtagagggatgaggaggacattccagatggggaaatcagtattttcaaaacctttgggttagaaaggatgctggaacatttgagagactgtaagaaagtcagtgtcacatgcatccaaacacagaagggaaggtaggtgggaggggaggtggagaaaggccaatccatgtaggcattggcgcaggaacatgactaaggctttgttctaagagcaatgagaaacctctgaggcatttagacaagtgaattgatgtgattagggttggttttcaaaggtcacttctgctgctttgtggagaacctattgggaagaagtgatgctggatgtagggatgatgattacggagctagcacagtgatccaggcaagagatgaaggagctgagctgggtggttgcttagagatggggaaaagtggacagatttaagagatggaagaggttgatggaacttggtgatggcttgactatgaatcagatgggaagggatggtaattaattgaacatctcaaccaaaaatgatgaagttcccttaaagcttccatccttaggctaggcagggtggaaaaacaagaagtaatagacacagtctgacattcagagaggtaatgattcagtcataaaggtagaatgcatgaaatatctgaaaacctgctgctggcttcacgaaagtgtgttctgggtggatagaacatgaaataggagatcctcccagtcagagatacgagtattccacctaatgctctgtgatgatgatgacggtgatgatgccgatgatgacaataacaatgacaataatgatacaaaagttaatgttcaccaaatggtttcgatatgacaggtgtggtgctagtgaagaatgtggactccatccttagggaacagggaaatgtgtcgtgtgttaagaaatatggccatcatccttagcaaactaatacaggaacagaaaatcaaatattgcatgttctcccttataagtttgggagctaaatgatgggaacacatggagacatagagggaaacaacacacactggggcctatcggagggcggtgggtggagggtagaaggaggaagaagatcaagaaaaatcagtaatgggtactagggcttaatacctgtgggatgagataatctgtacaaaacaaccccatgacacaagtttacctatgtaacaaacctgcatttgtactccttaccttaaaataaaagttaattttttttttttgagacagagtctggctctgttgcccaggctggagtgcagcagcctgatcttggctcactgcaacctccacctaacgggttcaagagattctcctgcctcagcctcccgagtagctgggattacaggtgcccgctgccatgcccagctgatttttgtatttttactagagatgaagtttcaccatgttggccgggctggtctcaaactcctgacctcaagagatccacctgccttggcctctcaaagtgctgggattacaggcgtgagccaccatgcctggccaaaaaattttaatttaattcaaaaaaagaaattagtgatttgatcagatttgcactctgggtttctatgtagacaagagatcagagggtccaagttaaaaaacaaagaggagtagaccagttgagaggctgctgcaatcattcagatataggatggagctctgtagcagatgtggtcagtaacctgctcatgcccaccggctctcactgttgctgtatatacccagggcatctcactgtctgagggctttctctgactgttgaaccatgctagggttatgtgcggggcagaccagaagtcttaaggagttaatagccccaggcatgaccctcaacaagagaggggcagagatgataaatactccaggttcctcatctctcaggtgggcaccaccaagttcccagcatgactgagcctcagctgcccactaatctgctccttagtcatcctgtagggctgccttcccttccctgtctcacttccccactcccccaccagaaacttctaagatcatctcccaaataaactacttatactcagattcttatctcagggtttgcttataggagatcccaacctaagataagtccttgaccaggtggcagtggggctacagagaagcctccaatgtaagacatatcagaggttggtgatgtttcttatgggaagccatgagacagctgggactatggtttcttgtactttcaaccagcgaaggggccacccaagatccacaagagatctaggttgatggacactcaaggaaaatgagcctggtttgttaccaagacaccctagtcccaaattccattgtggagtccccagcccttgtaaattaggctagatcatagcagccacaggaactcatcttgtttctttactcaaacacacacactaaaggcatagtggttgttgtagtagttatttagttctgagtaacatattactgcaaacttagtggcttaaaacaacagtaagctttattattttcacagtttctgtgactcagaattctgaagcaacttagatgggtggttctgtctcagggtattttatgaggttacatcagatttcagctggggctgactcatctgaaggctcaactggagggtccatttccaaggtggctcactcactggatggcaagttggtgctgactcttgctggagagcctcagcccctctctatgtggactcctcccagggatacttgagtgcccttacgacatggcagctggcttacctccgaatgagtgatgagagagagctaggttgaaactatccttttgatgacctagccacaggagtcacatagcagcatttccatcacattccatagttagaggccagtcactaaaacaagctcactttcaagggaaagataattagtttacgccttttgaagggaagattgtcaaagaatttgggggcatactttaagatcaccacagttgcctaattgatccatttccctagattctcaccctaatcttgaacgtgatgatctttccaatcctatgacaagaaagaagctggaagccgaggcagggggattgctcgagcctgggagctcgaggctgcagtgaactatgatggcatgactgcactccagcctgggtgacagagcaagatcccatgttaaaagaagaagtggagaaggaaggaaggaaggaaggaaggaaggaaggaaggaaggaaggagagagagaaaagaaaagagaaaaaagaagagaagagaaggaagctggctggaaaagatgaacacagggaaatgagtgtcgaagtgaagacagaagttcctctttgaaccaagaacagatctggtccaaactgcccctccctggctttctgaggcacttcttaccacaccttagagcccaagagatcatgtttgtgaggccctccatggcaagcagcaagaatggaatcttcataattcagaaagaaaatgagtgtattggaaagttgcagggatgttaacaaaatcaaagagaaagattcttttttcttcttctctctgcttatctgttttctcaatagtgaacttacattcctgttacaagaaaaaaacaataaaaatgtttttaaagaaggactctgaaattattaggttaaaatagaaactcgaattatatggtgctgtcaagagacaaactaaaacaaaacccatttttaactttgaaaagttaaaaataaatatttaaaaaaagtcaagatttatcaggcaaacgcaaaatggcaagaataacaaaattagtttcagactacatagaattcaaggcattaaaagggaacaaagagattcattttatattgaagaaaagtagagtccttaatgaagatagaagagatatagcagctggtcccatagccattaaacatgttttatctctactctagtgacaggtgtcagagaatccctggggttcctttaaaaggataattcctattgagttataaaaagtgatgggataaaataaaattataagtggacttcatagtctcttagtaaaattcagacttgagttaaaaatgtatgtaagaaatataggcctctgaaaagagggaacaaaataggattattcctattgaatcataaaaagtgatggggtaaaataaaattataagtaggtttcatagtcttttagtaaaatgcagacttgagttaaaaagctacataagaaaaacaggcctctgagaactggggacaaaacaggacagtgaagaaaaaacatggaatcggcagttggctatctgcaaagggcacctcccactcccatgtcatgatggcctgggaatggaaggaaccagaagcaccaactgaacaggcctggagtgggctgcagctacaaccgccctgagggaggatctgactgtgtactggggtggtaagaaggaattcaggttttggacaaatgtgtccatccaggtccgtgtctcagaccttccagcattctacagcgtcctgatgcttctcccattcttgtcaggccagagaaggccaaggaaggcatggaccgcagcacagcaaatccacattatgcggctgtttctttctccaggagtcagggacacaacttgctgcatggcttcctgcaggcaggaaaacaaaagcagaaaaaggctcagtctcctagtgccctggaggagccagaataggacaccggaattcaggggtcacaacagttagagatgcttcatctgggacccagggatagaatttgggtaaacatggatggaaaaactatacccttttgttttcacttttctgtaactgaaattgggcatttccttcatttgacgatggaagcaacaagccacaggagtgatggcagaattcatggctataactaaaagaaatcccggagtttcaagtcacatgacagctggcgcagatacctcagaatgccacctccattcagatgggacttaaaaatcacagccacctggctgctagatctggttatttagtacttaaataaacatgaacatttattattatgtcatcaattttttttgagacagggtcttgctccgttgcccaggctggagtgcaatggcgcaagtttggctcactgcaacctccacctcccgggttcaagcgattctcccactcacctcagcctcccgagtagctaggattacaggtgtgagccaccactcccggctcatttttgtatttttagtagaggtggggtttcattatgttggccaggttggtcttgaactcctagcctcaagtgatctgcccgccttggcctcccaaagtgctaagattacaggcgtgagccaccacgccctgcccatcaatttggtttttgtaaaagtattttgagaactgtttttcagtgtaattgatttcctttgcagttctaaatgttttattttttaaaggtaaaattctgaaaaggtttcataagcttcaccagattgtcaaaggggtctgtggtccaaaggaggctgagacccctgatgattagatgccttgccctctccccactgcccctcaagccccttaaagaggggagtagagccagagggcaccagaacatctcaccccacccctctgcacccccaggaggagtgaaggaactacagaatacggagttttgtggaatttgttaattcagtctttttttcttttcttctccctctcctttcctgctcccacttccctcatatcacagccctccaaagtgacccatgctgagactacctaatatgtaatcatccacatttggatccgtgctcttattttaatattcaaacatgaatttgcatatatgcatatacttatgtattgacatatatgcatatacatagcgattttccagccttttcccatgcataagagaagcatcataaataaatggagaagagatggattttctgagataatatatactcaataattttatatgtaatatattgccaaaaactggaatcacaagacatatgccattcaaaatgctgttttcttctcattaatgtcgtattttttctgtagtgttgaattctatttaaaaactgtaggccgggtgcagtggctcacacctgtaatcccagcactttgggaggccaaggcgggtggatcacgagttcaggagatcaagaccatcctggctaacacagtgaaaccccgtctctactaaaaatacaaaaaaacaattagctgggcgggcgcctgtagtcccagctacttgggaggctgaggcaggagaatggcatgaacccaggaggaggagctcgcagtgagcccagatagtgccactgcactccagcctgggcgacagaacgagactccatctcaaaaaaaaaaaaaaaactgtttctaatgactgcatatatgtcacataaaaatgcaaccaaacatatttaatcatctccccattagacattaacattttccaattttttcttaaaaatgctatgatgggacaggtgcagtggctcacacctgtaatccctgcactttgggaggctgaggtgggcagatcacttgaggtcaggaattcgagaccagcctggccaacatggtgaaacctcatctctactaaaaatacaaaaattagccgggcatggttgtgcatgtctttaatcccagctactcaggaggctgaggcaagagaatcacttgaacctgggaggcagaagttgcagtgggccgagatcacaccattgcactcgagcctgggcaacaaagtgagactccatctcaaaaaaaaaaaaaaaagtacctattatgaactacgtgaaataatccttgcattatatattaggttgaactccatcaaattgatgtcttcatggctcaaaactatattatcaatttcatatgagtcaattaattaatattaacattattcctggagttatgttttctctaccacttttccatcagcccctagtccagattcatactgttctatttagtacagctttgtgatatgttttaatctggtataagtttgccctcattttaaataaaatgttcttacttatttttttcttccagggtaacacaagagaaatttagaattatttcactgatttcccatgaaagtcccattaagacttttcattaaaactattttaaaattacaaatgatatataaaagaatttgtagaatgttattttttgcggtttcctaaccaggaccataatttgatgttgtacttattaaagttttttttttcaagctagtttctcagtgaaacttttcattaaaaaagaattggagttcctactcatttttggttacatttttgcttaggcttttcatactttgttattgttacaaatgaagattttcctttctactttccaggttataattgttggcacatagaaaaacacttttctaagatattgcttttgtatccaaccacctaatttacaatctcatttttaacacggcatttgcaattgatttttttcgtttcttgtgttaaattataacatcttcaaataatgacagtgttttttaaaaaatcctcttcttttccaagtgttaaaaaatattattcctaacatttcttattaaaatgaccagaactcccaaattttcaaattaaaagagtactctgccttctggtttttgttttagtgagaatgcctgctgtgatctaaatgttgaaatcctaacccccaaggtgatagtattaggagatggggcctttgggagatacttaggtcatgaggagccctcatgattgggataagtgctcttataaaagagaccccagagagccggctatcccctgccacatgagaggacacagcaagaaggtaccatccatggggaaggaggagacttccttgtcagacaccgaatctgccagtgccttgatcttggactttgcaggcttcagaactgaaagaaataaatttctgttgtttacaagctacccagttgatggtatttcattatcgcagcccgaagggactaaagcaatgcctttattgtttaaatgtcaggaatggcattcactgtgattatagtagaatgctgttataatagtcagtataagtacattgatggtcctaggcagtggtcctctgctcctggtttacaatgagtttcctctcagtaatgatgactgagttgtaattgattatgctcaggatttattgagatgaccatatattttctttttttaaggaaaatttctattattttaattatttttatgtacagaaaactcaacagcgtacatttaacccagtttagtcgcaagttctttagccttcgccttttttagcttggtgatgcgagccacagacttgggacccaggacattacctccccagtgacagcagatctcatcgtatctgtcgctgtaattggtcctgatagtttccaccagcttagccaaagctcctttgtcttccaagttaacctgtgcgaaggcagcagtggtgcctctcttcttgtggactagaagtcccagtcttgacttccccttgataaagcagtaagggccccccattttttatgacacagggcaggcaggaagacaaccagctagaagaaagcactagctgaagagcatattttgaccaaaagcagtaaatttcaaagctagctgggtagcaactgctctgggttaaaaagttcacgtatctgcccttcaaggcagatgactatatattttctaatgtttcctatgggtttgatgtgtgatatttagatttctccatagcaagcaattctcccattcttgggttagatgctgttaggggaagggtcactctggcagaggcaggtctgcacacctgggttgttgcttttgcacacacacacccgccccattttacactgcacaccgcagaacttcaccgtttcacacattcagaaatgaaggcctccgtggtgtaaacaagttgcccaaagcaacacagcttccaggacggaaacctttggattgttggtccagtcgatttaactgtatctgaatggtgtttgattgcttgtgtgatcctggctgggaatattctcctttctggacttcagtttccccataagaccatatactcttctgtagacattcattctacagtccaggagagtacctggaagggacattaatttctctctcccttttccccacggcctatgcattattgtttcaagcccatctcccccatggcccatctacccgcagccagctctgacctgaaggccgggtcaaaggggtgctaggaattccaggtcggtgattggccttcttctcttactctatgtagactccagcctacaattcctagtagggaaagaataaccatctctaatttgcaagagctcagggtctcgggtacagacaggaactggcccctgccaggggcattcccagggcgttgctcctgggatgggcagagggaccagtgggcaggccagtaatgccaacattcagagggtcctcctgcgggcgggggcttcctggaggaggtggccctcaagaggggcttgctttcgatagtgggggtgttgtattccgtgcggaaggaccctcccgttgtgtggaggaaccgcacagtccctttaatgtggtatgctggtacagtcactccatcttgacgcctagccccacccccaaacgttttcaagccaaagcaaacagaagcaaggcccaggtttaaacttaagaggctgccttcagattttgtttacttatccagatttgcaatctttcaggacccaccaaggccagtttctttttcagactttgcactaggctatgagggcagggggtggcgggcagggcaacgtcccataccgtctaaatcgcgcccatacgctgccacctgggaaagggggcagaaaggggcggcggtgctctaaagtgaggcggagctggagggctctgaggaaatgccccggggcaccccctccccaaggcagcctggagtggacgcgcggctgccaggcttcccgcggaggacgcgaccccggcggtgcccgaggctggcgcgccctctcgcggccacgccgggaacgccgccggctgagaccctcgcgtcctcggagaagcctgtggttggttccagcctaggcccggcgggcagcagcccacgctgggtgtttgagggcagtgaggaaaaggacctgtctgcagagatcgtctctgctgcagtccttctgcagtccacgctggggaatgccctggtcagcgcgacagagtcctccgctctccccggcatcccctgtccaagcatttctcctctgcccccagctgtcagctacccctccccttgcctcttttgctcgactccttgaattaactcagcctcgtaggggtgttgatgactgcttattcctccctttacctctagcccagcaggatatttcacaactttcctccaaagcagcggtcaagatctgagttagctccacggcttgctgactctcctcatgctcgggttcctcatctatgaaacggggataactgtagtatctgcgtcctgatttggtgtaaggttagtgagttactacgtgtgtagcagacccgtgcctccacacattccctcggtgcccctccttcttcctgtgcccctgtcctctgcgtgccttctctgtggggagacagccagcatcttcttgcttctctgttgcagggctgtcccaggctgctggagcctccctggaccacatgcagcagcctggaagtgccagggatcaggggacgtatttacctatattagagttccccagagaaacagaacttatgggattacatatatacatgtatacatatgcgtgtgtgtatatatacgtatatgtatgtatgcatgtgtgtgtatacatatatatgtgtgtgtacatatatatatatgagagagagaaatcgatttattataagggattgcctcatgatcatgaaggctgacaagtcccaagatctgcattggcaagccaggagatcccatggttggttccagtcctaaagctgccaggctcaagagccaatgtttcagtccaagtccaaaggcaagaagcaagttgatgtcccaacttgaaggtagtcgggaaggagaaattccctcttaattggaggacgttccacattattgttctattcaggccttgagcggattggacaaggcccacccacattgcagaggtcaatcagccttactgatttaaatgttaatctcatctaaaaacaccctatcacagaaacactcagaatgtttgactaaacatccagacaacctgcgacccagccaagttggcacataaaagtaaccatcacagcccccgagggcagatcttcatcatgacaggtggttggggaagcaggagccacactgcagctccactctgcactctcgcctggcctccttcccttcccagtcccaattcctcactccctgggttttcctgaggcctaccccttagtaaattactttcaagtgaatcttccttcaagggtaggaatctgctccttgacattccttattcaccatccttctgcccgggttggacggatcccctcctggtgctggaacagtctgttccttccacaggatgctcagaatgtaaaccatcattgcaaagactgaggcttcacaaggaagattccttcaaactcatggtaaaacataaactgaaaacatgagaaattgcatatttttctgcccatctcctgggcacacagaaggacacaaagagcttggctcctcacatcaccttcatgggcactttatcaacgataacatgagaacaagtctggctgataacaggattacgtgattgtaattagatggataattattcacacgtggaagggtttgatgactgggtcttgagaataggagctataaatacacatattagaaaaggattccattaaaagtgaacctaaagcaattgaaaagcttctgatggatcattagccatttaaagagatttttgttgctaatgtgtcactcttttcaccttttactaaaaagcttcaaaaaggaaatcaaagcatctgacattgtaatgtaaatcaatggggagaaggcattaaatttataaaagttcagtttttatgcagcttctcctaaacccagctgtgatacaaattgaagtctactttgtgtacattggcataaaatgaggtccattataaacatatattttagtaaattcaatgtgatgtagatgcaggttgaatacagcagccagttacttaaattgaatgggctgaatttcccagaagaaaatctgaaatgaacatgaaatgctgttactctgcttcaactaaccagacactctttagacgaaagtgtgccaggtggaatatcatttcatatagtgttttcagatatccaactgatcttccacatttgcccagccctgccctggtaagcaattacacaaaaatgaaacacccaatgtttgcttattaatttatgccacggacagctatcagttgcatttaataggcttctagtccaggaatcagccaagaacaagactcttgagcataaaaggataaatttaaaacacagacttcttttaagaaggcagatttgttatggcacacatatatatgtgatgtctgtgtattttacactgtaaagacatacatcaaatgtagtagtgattatctgtggtataattgttaaaattatagaatagcataaataataattttatctacactcatgtatccaccatcaagcttaaaaatgtaacaccttaaagcaatgcagttgaaaccccctgtgaatgcctccaggaccatgtctgcctgctcatgttccctagagctgaacattatcttgaatctgctattcaccgttcccatgcattcatttcaacattcaccacaaatgtatgcatcctcaaacactgtctagtatgtttaaactttaataaatgaatgcatcataacacatgaaatcctctgcaagttggctttctgcttgtgtttgtgacattcttctggttttgtttttgagaaggagtctcgctctgtcgcccaggctggagtgcagtggtgccatgtctgctcactgcactgcaacctctgcctcccaggttcaagctattctcctgcctcagcctcccgagtagctgagattacagacatgtgccaccatgcctggctaatttttgtatttttagtagggacggagtttcaccatgttggccaagctggtctcgaactcctgacctcaggtgatccacccaccttggccttacaaagtgctgggattacaggcatgagccaccgtgcctgggctgtttgtgagattcttctgtggggatctgtatagctgtaactcactcatgtttatagctgttattttatattgtgtaagtaatcactgttcatttactcatcatattctcctgtgggtggatatttaagttatttctaattgtttgcccttgtcaacactgagactatgaaaaatctttatttatgtatatgaaccatttgaaaataagttgcagaatgtcctataattctttcctcattgttagattcagattatactttttaaatgtacatttgggctataaatttacctctaatgctcattttaccttcattcaacaagttttcattttttaaatattattttttaaagccgtttaacatgttcagagtgcttttctttctctcccatgcatattttggatgttattaaagctcataacaaatagtttaatttatttttagtctttcttttctaacaagtttatcttagaataaaaaatttacctctaaggaccactttagtttcatctcacaaatttggcgaagtaaaattggtattattgcctaagataaatacttcagattttctattatgttttccttattaatccctgaattatttcaattttatttcattgagatcagaaaaatgtggtctgtaaacgaattctttagaatctgttgaaatttcttctgtagctcaatatatggtcaattttgggaaaggttttatgtggtcttgtgagaaaaaaactgtatgctttcaataattgacaaatggaatctaattaaacttaagagcttctgcacagcaaaagaaactatcaacagagtaaacagacaacctaaagaatgggagaaaatatttgcaaactatgcatctgacaaaggtctaatatccagcatctataaggaacttaaacaaatttacaagggaaaaacaacccccattaaaaattgggcaaaggacatgaacagaccattttcaaaagaagacatacacacagccaacaagcatatgaaaaaaaggtcaatatcactgatcattagagaaatccaaatcgaaaccacagtgagataccatctcacactagtcagaatggctattattaaaagtcaaaaaataacagatgccggtgaggttgcagagagaagggaatgcttatacactgggagtatgtgttggtggaagtgtaaattagttcaaccattgtggaaagcagtgtggtgactccacaaagagctaaaaacagagctaccattcaacccagcaatctcattactgggtatataccctccaaaacataaatcactctatcataaagacacatgcacgcatatgttcactgaagcactattcacaatagcaaagacatagaatcagcctaaatgcccaataatgacagattggataacgaaaatgtggtacacatacactgcggaatactatacagccataaaaaagaataagataatgtcttttgtgggaacgtggatggagctggaggcagttatccttagcaaactaaggcatgtggccccaaatctctaattctgattctgtgtctatttcttttgtgactgtataatttatttatcgttctcacttataagtggaagctaaatgatgagaactcaaggacacaaacaggagaacaaaacacactggggcctacttgaggtgggaggatgggaggaggaagaggagcagaaaatataactattgggtactaggcttagtacctgagttcgatgaaataatatgtacagcaaaccaccatgacatgggtttacctgtaaaacaaacctgcacatgtacccctgaacctaaaagtttaaaaaacatgtatgctttctatggggtcaaagatttctgttctctctctccatttctcttcccctcctccctccctctctctcctctcttccccctttcagcccctccctttatgctcaggtgtattaatcctgattttcttattcattcattcattggccatcctgattctatttcttttcctttcaatctactttttttctttccttctttttttttttttttttttttttttttttttgtctgagacagagtctcgctctgttgcccaggctacagtgcagtggcacaatctcagctcacaacctccacctgctcggttcaagtaattctctgccttaacttcctgagtagctgggattacaggcatgcaccaccgcaccagctaatttttatatttttagtagagatggggtttcaccatgttggccaggctggtctctaactcctgacctcaggtgatccaccagccccagcctcccaaagtgctgggattacaggaatgagccaccatgcctggccatattctttttctcaatgctttaatctattctaagagatgtggccccaaacctctaattctgattctgtgtctatttcttttgtgactgtataatttatttattgttctgagactatccttctaggagcatacaagttcctgtgttgtattttcttggtggactgttccagtatgagacatctctctttgtcttttttactgccttttttcctaaaattttatcttgtctgatattagcattgctgcattgtcttttttagtgtcattaacattggcctggtggttgcccctttcattttaatgttgtagtgtcttttgatttatgtttctcataaacagcatagaactacacttcatgtaattgtggcttttgctctaatccaaaaatatctggatatctagattaggtgactatgaggggtctatcacctatttattttttattgtgattaccattacattggacttatttctgtcacttagtgctgtgtttactacttaacctgcttcccctttgctgactttttttccttctctgacttctggtagattgcacatgctttctttttttatcttatttttattttttattttactttaagttctgggatacgcgtgcagaatgtgcaggtttgttacataagtatacatgtgccatggtggtttgctgcacccatcagcctgtcatctaggttttaagccccacatgcattaggtgtttgtcctaatgctctccctctccttgcccttcacccgccgacaggccctggtatgtgatgttcccctgcctgtgtccacatgttctcactgttcaactcccgcttatgagtgagaacatgtggtgtttggttttctgttcctgtgttagtttgctgagactgatggcttccagcttcatccatgtccctgcaaaggacatgaactcattcttttttatggcagcatagtattccatggtgtatatgtgccatgttttctttatccagtctgtcattgatgggcacttgggttgattccaagtctttgctattgtgaacagtgctgcaataaacatacgtgtgcatgtgtctttacagtagaatgatttataattccttgggtatatactcagtaatgggactgctgggtcaaatttctggttccagatccttgaggaatcgccacactgtcttccacaatggttgaactaatttatactcccaccaacagtgtaaaagtgtttctatttctgcacagcctcgccagcatctgttgtttcctgacttttgaatgatcaccattctaactggcgttgcacatccgttctttattcccttttgttctccctgcctgcttggaatttaaatatttttgttttattcatttagtagttactttcatatttgtcataggcatcttaatttcatatatttctcacaaatcaagacagtgtaccccctttttaaacaaggtttggaattttcagttctttcccttttctcataacttagctcccaccagcaactatgtcattcttatctacagttttagttctgacttcttttaaaacataaattgttcttttgttcacataaattattataattatggctaagtcttttattatatcataattgttatatcataataaaaggcatagcaataatgataataatttatattgttattattttgagtgaatacttaccatatttatcaattatatatgagatatacattgtttcactatttaacttccctgtgatcgtgaggttaaattctgtctttaattataattgattttttttcttagaagttaataaagtagcagtatatcttacataacagtgtatcttataattggtaacatcttagatgggatgaaataaagtgtttagcatcaccaatgtattttcttaccaatctctttgctcattgttgcttcttgcatcccactccttccaaagttcatttttcttcttgctgaaatatattctctaattctcacagtgaggatccatgagttccttattttctgactccttgaatgtctgagaatgtctttattttacactcacgattgaatgatgctttggctgggaatagaattctatgatcacaatttttcccttaccattttacagatagttcttcatttcctctgacatctgtggcttctgattagaagcctgctgtcacctgcctgtgatttatttgtccattatctgtctttcctctctgtcttattaatgttttttctctttatgttttgcagctgcactgcaggtctaggggtgcaattgtcaaggtttccagcttggagttcagtgagccatgtctcgatttctggaaaactctctttggacattacttctccactgaactcttgtctcttttccttcatacttggcttctccattatcattactaaatcctgggattttcccccactcctgtcttttaatttcccagccatgctttcaactgaaagcaatctatactctactgagggtttttttatgaccgcattttcataccccagatttttttttttttttgaggcggagcctctctgtctctcaggctggagtgcagtggcgcaatctcagctcactgcagcctctgcctcctgggttcaagcaattctcctacctcagcctcccgagtagctgggattataggtgtgtgccagcacgcctggctaatttttatatctttagtagagacagggttttgccatgttggccaggctggtctcaaattcctgacctcaggtgatccacctgcctgggcctcctaaagttctaggattacaggtgtgagtcaccgcacctggcccataccccagatttctaaccaagaggtttttttctcccatatctgcctcttctatttcaaaactgcctttcttatcccacaacttcatattatttcatggatactatgctgtcctttatttatgtgagagtttttaacttctaaaaattattatttcacttaatttcatgtttatttttatctattttaatgttttattctttcttcatgtatttatctaaacctgaaagtcttaatgtcattttcagatggctttattatgtctatttcctcaatcataaattcctctatttttgtggatctgtcattcttggtgctagattttctcatgtctttagaatcatgtgtttagaaattcatgtttgacagccccttttccactggagggctttcccacaggtacacctctcttcagggccgttttaaggcttctttttttaaaggatctacagggtgcctagctcccaagcaggtcttatggtagtggcttagcttaggctccacattccaatgggtggagcggttttaggacctggcacaggactgagcacttgtctcatccgcggcctctgcccagctcctggcaagcagcctagaatctggctacagcccatggtgtgtgggcagcattctcagccccttccatgatcaggcagctggtcctggccccgtgccagtgcagggtggccagctcagcccctgccgggcagctttgctatcccagcccctcttaagcccacttgtcttcttagctctccacaagtgtgagctcctgctttcagctgtgaccttctcccatttcttatccagaggcgtgggtttcttgtttttaatcacagtgacattatatttctcatttttatctaactacctagtagcctgtgtgttgggagcagtcaatctctcctgtggacctggcactctggttgaagttcagtgttctaaggcatcctgagatccgcagaggcactgccagctgacggtagggacagtgacatgtgatatgatggtggggacagtggggtgctctggacacacctccagctgctaccagggagctctacttgcaggggtttgtatacaagtttatatacaaaatctctattactaataagccaaatatttggaacccatactctagcccaagcatctcattttccagatggagatgaggctgttagttccaaagccaggcgggaaactaggtctgctcatgtcctgtctgacactctcagaactgcaccaggcataggtctgctaggcgccctgtaatgcccatctcatcccacatgatggggtcacctccctcacttcatccccaagacgaagcagttgggaactcagcccaagaggaaacttacttccaaacccatctggaacactgattcatgtaaccaaaaccacctagctgcccgcctggagaaggttctgggttgtggcactgcaggatccagtaaggcccgggcctctatttacacacatttcaaagagagtggacccctctcaaagctgcagcagcagcgcctcagggaccagtgtccaggaattcccccagctcacctggcagtgctgcctaaaggtttaggtctggccggatgcagtggatcatgctccccctttggcctcccaaagtgctgggattacaggcatgagaccaggagctcaagaacaacttgggcaatatagcaagacccccgtctccaaaacaacaacaacaaaattgtttttaatgagccagttgtatttgtgtgtgcctgttatcccagcttactcgggaggctagggctagaggattgctgagctcagttcaaggctgcagtgagctatgatctatccactgcactccagcctgggtgacagagcgagaccctatccctaaggaaaaaaaaaaatgtagctgaaacattgacccattcgtaaggtaggtgactcagagtgtacttccagctgattctctggcacagctaggagcatccagtcaattactcaaaggattcttgatgatggccaaaatatgtgtggttttgatgatgtctggagaggatgaggatggtgccaacatgttttcatttgagcaactattaccactccacaaagggaaatctgcagatcctgctccttctggtgcatgcgttttctaaaggtggaccctgctggattctggggttccttgcaggtgcctcaggagccatctcagcaacacacgtgtctccttccttagaagcaaccaactgtgctgtgccatggtgaaaaggagctgaactgagacaggagtcgtgtcttcctgggtgacctcaagcctcaagcctacatcaaacatggtaccacatcgtggacaagttactagtcaggatttttcagcctcaagggacaggtgcccaattagacaatgcttaggtggagaaaggagaattgtttgctggtttgtaacaaatttcaagaagggcaggagtccaaacaccatcacctttgctctctccaatgccacgactgtccatgtcatcatcctcatcatttctcaagctgcttttcttaaaagacaggacccataaccatggcccagatcccatctctgcagatcagccccagcaatcacggctttgttgtctccctccagtttagaaaggcccggagaaggagtgtgattaaagcccagctctggggttcgcttctggtttcgaacattctcctggctgtttacgtttacagtttatattactcataactcagagagttctcagtactctaatctgttttattgccgttcttaatgcaagtgtgttgatgtaagcgctctgccagatctttctgttctttgtaatctcccgttctgtataaacgctctgcccttcatactcatcgtgtgctctggacaatggctcttcatcatgtcgggttttcagtaacaatttagttcatttctctctgttggctgttttcctttattgtaagagagggaatacaaggcgttgcttactgaacacctactgacatgttccaattagaaggaggctcttcttggtacaaagcatatctccctaaaccaaaaatacttacttatttttagagaaggggtctctctctgtcacccaggctggatgaggttgttaattccagagccaggctggggtgcagttgcacgattatatctcacaggagcctcaaactactgggctcaagcaaccctctgtccttagccccttgagtagctggaattgcaggcacatggccccatgcccagttaattttctgtttttttgtttttttttttttagagatggggtctcactatgttgcccaggctggtctcaaacacctggcctcaagtgattctccttacttgaggaaggcctcagccttctgagtagctgagattacagacacaagccactgagcctggaaaaccaaaaatatttagataaaccctatgtcagtttccttctaccaatttctacccacatttcagggtcctcacgtgctcccagccgggcatgatatgaaattgactttgttactgaaaatcatgttaacggggccatcctcttattttgcacacatctttatttgtcctttttgcttctcacttatctctggtgcttggaaccaatccatcattttttatggcttctgggctttgtatcatactttgaaaggcctttgtgcctctgaggttataaaagaattctctcttgcttctatcacttttatgagttccctttttagactcctttttagattaagtctgacccatccaggattaattttagtgtaatataaaaggtatagctctaattccacatttttccaagtggcctctcaattctccaaatccccggatttcaatgatccttatttttcccctattgatttaaaactccacctctattatgtagtaaaattccatgtgcattgggtctgattccttaactttcttttgcaaataccttccatcgatctgtctaatctgtttaaatcattataattttgtaacatattctaatatttggtagcattgttctgtccttcattattctccctagaggtttcctagttattctttttttaaataacaaataataattgtacatattcatgaggtacaatgtgatgctttgatgtacgtatacactgaaacgattaaatcaagctaatcaacatatccatcacttcacatatttctcatttttgtggtgataacatttgaagcttactctcttagcagtttttaaatatacaagacgttaattgtagtcaccacgaagctattcctgaatgtttattttttccatggaaactttaaaagcaatgaatctagctcctccaaatcaagtttctattgatttttttgttagtcaccctaaatttttaaattaacttggggagattttgatggtattgagttttcccatccaagaacagggtctgcctttccctttgtccaagtctctgacttctcagaagcatttttgaagtcttaggcaaatcgcttttcacattaaatgtaagcctatatcttccatcttttttaccggtatggtaaatggggcctcttcttccactgtatcttctaactagttgctatttgaaagctattttgttccatatgttaattttgtacttgccactttactgattaccttgctatgtgtaatattttttcattttattttcttggattttctgggtacacaattgtaacaccatctcagatgttgatgattttcctcctcttttctaatttttaaactcctaaaatcattcttttttggttaattgcatcgacctttagaatattaaacagtacagtggtagtggatggcttttctcatcccaaacttatatgaagatgcttctaatgttttcccattaaacgcgatgctcatgtctgggtggagatggatgtattttataccactaaggatgtgtccagctccacattgggtagcaggttggttcttggtttaaaagacatactttctatctggttaaggaagaatccatcacacctatttgtttttcttgttttttcagacaggttcttgctctgttgcacaggctggagtgcagtggtgcatggcctcatgtgatcctcccccttcagtctcctgaatagctgggactacaggaacacgccaccttgcctggctaatgtttctaaatttttgtaaatatggggtcttgctgtgttgtgcaggctcatcacacctgttttacgagaactttaggtttgggactagataacatttagttaattagagcttcagtacccatctaccaaccataagatattcataatctctttgagcttcaggtaaaatgtgataatacgtcccttctagaacactgtaaagtttaattgagaaggaatgaatggaaggcaccaacacagtacttgacacacagcaaatgtgcagtaagtgataattccttccattctcattaacagtatagggtttgttttgttttgttttgtttgtttgtttttgttttagttttcttgagatggagttttgctcttgtctcccaggctggagtgcaatggcacgatctcggctcactgcaacctccacctcccgggtacaagcgattctcccacctcagcctctcgagtagctgggactacaggcacatgccaccatgcccagctaatttttgtctttttagtagagatggggtttcaccatgttggccagactggtctcaaactcctggcctcaagtaatccgcccacctcggcctcccaaagtgctcgaattacaggcatgagccactgcacccggcctacagggcagttctttttggttttcattcttttcgcttttttaaatgaaagcaagtttattgggaagtaaaggaataaaagaatgactactccatcagcagagcagccctttctgggttttcttaatgtgaccatgatgataattttccttgcatccaaactataaactctatttggttaaaatatataaatatcactaatccacataaaatattaatctgattaataaaatacaattttatatttttgccaattgtgagattctcagattggtcccgtaccttttacttttggccttggccgattttttaacttaaaacatgtttgtgtcatgattttttttttccgtgttttggaacatttactgtgctactgtctgggagtgggtgggtaattctcacccacggtgggatcttgaattcctgaccactttggaatgtgttgaccctgcactgcttttactcaacactagggggcagcattgtaaaagaaacctggcgatgcttctcagtagcaccatgaaatgttaaccggattagagcctgagttaaaacgctcttgaaggagtttagtctttgccatttcagtctatttcagaggcctcttcataaaactgtgggtgtatcgccgggtgaggtggctcgcgcctgtaatcccagcactgtgggaggcagaggcgggcggattacttgaggtcaggagttaagaggcgcctggccaacacggagaaaccccatctctactaaaatactaaaaatacaaaaattagccggatatggtgcgagcttgtaatcccagccactcgggaggctgaggcacaagaatcgcttgaatctgggaggtggaggttgcagcctgtgggactgagagggaaaaaaaaaaaaaactgtgagtgtgcaaaaagcactcagtaaatggtgtggactagcacagccacctctctcacctccttcacgttttgattcaaatgtccctgaccaacctgtatgaaactgcagcctgcccactggcctcacctccccatccttcttaccattctctacttctttccatagcatttaacaagttctaacattttaatttccttatttattatggcttattgtgtctccccactttccccctaaaatctaagctctacaggggcatcgtctattttgttcagtggagtaccccaagtgcttagaacagtgtctggcacaaagtagatgcccaaatagttctttgttaatgatgtggaatttgtcatgacagtggtgagggtggtggcaatgtctgaggtaggggcagtggaggtggggaggctggtgacagggtggagataggggtgatgtggcaattgtcatgatgcttactgtactgtggtttggtcagggtcctccggcaagttggaatctaagcctgaggctggatgaggatttctagagatttcacaagggcttatcaccatgtgagcacacacaatgggttcctaggcgaaagtgggggaaactgttcacactcatacatgcatgcatacacacacacatgcatgtgcacacacacatgcacacacacacgtacacacacacacacaagtctgtattcctggccctccaacaaaggtgctgtacaagggagtgatggaggagctaggaaggttgaccaaactatcacttaccgagctcatcatgcaggtttgttcttctaagaaaggattccctatcaccatattgcaggctctaaggtgaagaaacacattcaaaatcatgcctggaaccatcacagtctagcctggtgaggaggttgcaggcagggcccctcctgacatggacagggcacagggcgagatgatcagtgagcagttaccacatatctagataattacaatgataaacacacctaacagactattaaataaaacatgtctatcctcctccattaacaaatacaccctcatgaagccctgcaaggctgctggactctcagaattccacaccaggacacggcagcccggggagaagcccccagctgcccacttccctcatccaacctctgaggggcaccgcacaaaagataccccaatttgcacatcccagctctatccacaccctccacaagaacgctgacccttgggccccctcgggccgagggctgtgcacaaggatagtgctggccccttgggaggacaggccctgggaggcagccatggcaggtcctggaaagcatgcttaaggctttggggctgggaattctagcatcccaggcacccagagcaggggcagaaggaagagggcaagctctggccagatgtgctctgggctgatgggcccctcgcaccctgggggaaacgccagttaggaacctcaaagtccgacacctggggcaggtgcaggtctcctgactgcaagaactaccgggactactgttgttctgcagggcttacaaagcgcatccctgttcaaagaaagtttgaagaatgaagtcagtggtggggtcccctatagctggggaaatagagaagaagaaaggaccttggcaggaagtagcccagccatccctagcagctgagaaattccctccaccagttggcaccctcctcccccaacacttctcaggccacaacagagggaagaaaggctggtctcaaagcacacctccctgggcctgtgtggaaggctggcagcctctggccctggcccatttcctcctcccattaacataaggggctcttggcttccgctggaggtcttcttacttgccttggttgctctccctcagcaacctctccgcactcaaggctgtgactcttacccaccccacatctggattcctcttccaagccatgtctactagatcctccgaggcctgcctctcactccccgtgcagacaacctcgctcccttccctcagcagcagctcctgcacctgccctggccctgctagggagcctcaaaacctttatagatggaggtagtggttgcataaccttgtggatgtactaagcaccatgggattgtacaccttaaaatggttagttttatgttatgtgaatttcacctcaatcaaaaaatgaaattaggctgggtgtggtggctcatgcctgtaatcccagcacttcgggaggctgaggtgggtgggtcactgaggtcaggagttcgagaccagcctgaccaatatggtgaaaccttgtctctactaaaaatacaaaaattagccaggcatggtggtgtgtacttgtagtcccagctactcgggaggctgagacaggagaattgcttgaaccggggagatggaggttgcagtgagctgagatcatgccactgtactccagcctgggcaacagagcaagacttggtctaagaaagaaaaaacagaaagaaagaaaaaacagaaagaaagagaaaggaaggaagaaaggaaggaaggaaggaaggaaggaaggagaagaaagaaagaaaaagaaagaaagaaaggaaggaaggaaggaaagaaaaagaaagaaagaaagagaaagaaagaaagaaagaaagaaagaaagaaagaaagaaagaaagaaagaaagaaagaaagaaaggaagaaagaaagaaagaaagaaaataaaaatgtaaaacatcttctgaggcctcccttggccacactgagccaatgatgtctcaggaatccctgcacccactgctcctccagccagtccttctcatttgtgttaggccctccctgaggatgtggatgttttgaccctgtcactgggcttgggggacaggggccatggctgggaatggaccctgcttatggatacccaaagacagcaagctcttctgacagcaggcattcatgccagagaaggtgggtcctttgcaaaacgcaccctgagatttcccccagaaatctccccagcactaagggtcctagctggacactcatccctccttcagggaccacagatctgcctctaaaccttcatgcgtggactctgcaccgctcactctaaaagaatagggcttgtgtagtctggagccttctatcttatcctgggtaacctccctctgactttctcaacatcctcagcccctgaagatacagcagctaggacagagtcagtctcgaggcctggaggcgagaacccaatgtctttgttatcgggccctctcgttcttccaggtaaacatccctgagcgagggaggtctgaggacagggcgctccttgggcacccctttaaaaagcaacatacattatgattacttcaccctgcaaggccaaattccccagggccaccaccagtgttcattgttgccctgttgctctttctgtccacaccagtggtacgaggagaccctatctcaactctcactccctgagataaatgtgaaatggacaacttatctgtgtctccctccctcgcttgctgccccttctgggaacaggaccccactgaggacaatcgattcacttggctggttggcaaattgcaagaacccctctgcctatgccactgatgcacaatgtctagggctggcacaatgcaaactcctccaagagccagttctgtccctccaggcacacagatactatccatcacagagctggcggcctcaagaatggccatggggagccactgaatgttttgagcaggggtgtgacatgagccagttgggagtagtggttatgtgcaggcattttggtgttgggctgcctggattcagataccagaactgccacctattagctgtggaatctaggacaagtgaccatgcctctctgagcctcagtttcccacctgcaaaatggggataacaacagtacctacctcctagggttgttgtgaggactgagtgggtaaggcccttgcaatagggcctgccatttcatgttaggtaagagttagcttttatgaattcaatctgagctccagctcatggaaagttacttgacatcgctatgtgagttaggaaaacaggctctaaaaccaaaggcccttgcagtgatggaaataagcggtacccacgcctgacatagccaaatggaggtgggatggaggggaagaaagacatttgagccactgagaggcggaagggaaggaccagtgaggtgtgtgaactgggtgggggtggggagggaaaggtgacccaagggaaagagaggccttgagtctaggtgagcaggaggagagtgatgctggctaggaaagcagggtcttggggcaaggcaggagagaggaggtgaggggctatcttcggacctacaaggctcacgaaggaagaggtgatcatcagaaagctgtaaatatggggatgcgtttggagctcaagcaataaatggaggctgaaggttgagctttgaggggaggtcattcaggcagcagtgcaaagctccaagatccatgagatttccaaagggaagaggactgcaagtggagagaagaggggaggggagtagagggaggaaaagaggagaagaaactggacaggaggagtggggagaggaaaggaggccaaacagcctccagggtggtaatgaacaccacagctatggtgtcatacctgagtttgagccccgctctgtcactaactagctgtgtgaccttgggtagattgctgaatctctctgagccttaatttcttaatctgtaaattgggcataatgatagaaactcccatacagggcaatgatgagaattaaataagattgtgtgtgtaaagccctgatttcaatgcctggcaccagggcagagcccagggaatggcagctagggtcattaggattcttatgaaatccaagttaaatgaacagaagaaggaagaggggttagagaaaaggcaacagagtggagctgcttttaaagagccaggagagcatggtggagtgggaggaaaggcagggagatgtttaggaaagcaggagaggccagcaggtgcctggcaccaatcagtacagaggctagaacttagtgctttgggtttggcaactaacatgtctctcgtaacttttgaaaaagcagtgtgattttcaaaaataaagagtaagtggggccaggcgtggtggctcatgcctgtaatcccagcactttgggaggccgaggtgggtggattacttgaggtcaggagtttaggagttcgagaccagcctggccaacagggtgaaaccccgtctctttaaaaatacaaaaattagccgatcgtggtggcgggtgcctgtagtcccagctactcggaggccgaggcaggaaaatcacttgaacccgggaggcggaggttgcagtgagccaagatcacgccactgtactccagcctgggtgacagagcgagactccggctaacaaaaataaataaataaataaataaataaataaataaataaataaataaataataagtgggaaagaccattggaaggtacgttagggtgtcttctggggaagggctgggagtaggcaagtttgaatgccaggccagagagtctggattttatatttagacaattatgtaactttagaggtatttgagtgggtgtcagcctggtgctagtttgggatgatgtatctgggtggggcagagggagagaaggacccacgcatcacacctgcccaggtcaaaattagaatgtgattgacaaggacctaaaattcccatgttgagattttaaccactcgatttctccagggattcagcgattcaggttgactgaagtttaacagcaaagcaagcactaggcagaacagtatcatgcaaagcccctaactctggcatggggagggatgggggacagataaaggagagaggttgggagggagatattgcaggatggagccaggcccaggcaaggtggaagttgcagctgctcagattttttacgattgctcataccgttcacccgcagctcccaaatccggaagactcttcagggacatataaatagtaactgttatttgagaacccgcagagcctcacctgttctagcaactgccggaggcttatttcacttagcataatgtcctctagccacagtgcaacctgtaaatatatacagctattatttgtcaattaaaaaccaccaccaccaccaccactggggggcacttgctgagtgttttatctcagaaggtgacctcgctctccccaggtcttgtcatgataccgtaactaatcacacaacgacaatgagagccaaaaaggatgatatagaggacacacacatgaccagtccacttccttaaaagtacctggggtcttgtgatccggccacctggacagagaacacaacagtcaggggcttgttgagaaacaattgtggttttgcttaattatgaccgaggaactgaagccagtcttctatttatgattggcaaggtggtctcaatgcatctgtcctgcttaagaaagtaacccccgctttccaaatctttccaacttcttcaaattcaaaagtctgagggaggctcagactgcgtgggggtgggggtgttgttcaagatgtggcttgtgggattaatttttggcaggaagatcacagtgttgaatacaatgaaactctgtcctgagaacaggcctctcagggagccgttgctgctctcggactggcagggcctgaggaattcattacaggggatgaaagatctactcagagccaagatttattcctgcctggagaccctggagtcactgcatttccaaaaaaaaagggctcatttcattagactccaagaaagtggattttgggcttctaagagaaggaactatcgtgttcttttaaaatttttgtttggatcattgcagactaactagatgttttccatttgaaacgaccccctttgtatgtctctgccacaggaccacagggtaacagatgtgatttccgtgaaatgcacctaccatgggtcctggaacacagtaggtgctcattaaatactttcttccatctgccccaggtggtcctaaaattttctgagtcagatccaagttctgtgtaaatgcttacatcaaagtggggtctgtggtcttgaattcctccctccaagttagaacccaaaaagtgccctgattctgtagcaactttaagaatctctgtgatttatttgagtgaatcttttaactgaaatagtaataaattgtgacaggccttcacctgttagcagagagtgaccctgaaatgccacctagctttcaggagaaacagtttctaaagtgaggattcaaagcaaaaatacttgtggaaaaaaatgtaacggatgaaatacatgtacattctcctgtttttgatggtggttaggggacacatttttcctgccctacttcttcatttgaagttactttccaaagtaactttcataacttaattacatcttcagtgaccctgtttccaaataaggtcacatttggaggtactacagttaggacctcatggtttctttgtggaagccaaaatcagtccatgtaaatcagctttaataaatgagatagctgccttatgccacaaccccacactgagcaatgtcatttgggtaaatatttcatcccaaccatttgtaatgtaagggttgctgtttgcccagccaacagaagggagtatctgaccttagtccatcattgttacggggagatgcttgttgccatgtggcccactcaagggcaggcagttgaaaccaagcatccaggtgcttccagaccagtctctacacctcctagactttgctctcagttctctgtcccattatgggaatgtgtgcctagaaaacgggttgtcctgactttgagtttgtgatgcatcttgtatgtctgtttgtctctcccatgtttaagcataccaggtcactagttcccaattgtactaatttcctaaagctactgtaacaaagtaccacaaactattttgttgcttaaaacaacatagagttactcccttacagctctggaggctagaagtctgaaatcaaggtgccggcagggttgatctttctcaggactctgggagaatttgctccacacttctggtaacaaccagcaatccttggagttccttggcttacagatacaccattccaatttcggccttgcaggggcctagggaaaatgtcccctttgccctctgaaggttcactgaaaatcaactgacagaaggcagattcattaggagaaaagacaaacaaacttatttggtcatagtttgtatcacccaggagccttcaaaatgaagacccaaagatatagggaaactggccatttttatgcttaggttcaacaaactacgggcagctatgtagaaatataaggggacaaagaggataagatctaatgttaataggctgagtggggaaacccatgaaggctgtctgttagattcctcttggcctctctgtagagcgttccttctgtattagtctgttctcacactactaataaagacatacccaagactgtgtatttttgtaaaggaaagaggtttaattgactcaaagttcagcagggctggggaggcctcaggaaacttacaatcattgtggaagaggaagcaaacatgtccttcttcatgtggcagcagcaaggagaagtgcagagcgaaggaggggaaagccccttctaaaacgttcagatctcatgagaactcactcactatcacaagaacagcatggaggtaactgcccccatgattaaattaccttccaccaggtctctccatgatatatggggattatgggaactacaattcaagatgagatttgggtggggacacagccaaaccataatactttctttctgtgtgtggggcaggactatctctggaacgggggccttataagctcttatcagatgagataagtcaaataattaatgtctttatggccagtttttataccaaatggcagagagggagagggaaagttagactatttttaggttttatggctggcttgggggaaagggggctctggtttctatggcccaccttggggaagaggctgttgctgaggctttcattttggggtgtccagttctcatttctaccagcaatcttaccacatggccatcttccctctgtgtctgtgtccaaattgttctctttttggaagaacaccaatcacattgaactaggggcccacccatcctactccagtgtgaactcattataacttaattacatcttcaatgaccctatttacaaataacactacattttgagatactagatttaggacttcaacacatcttttgtaatggacacaattcaatctataacaccaaccagaggttttcttactgttttcctctacattttgaaacattttgcttaccaagcaaaatacattagtgaatatttgttttcctgttttgttttttttttaaatcagtcacccaaatgggctttctgttccagaagaagatggcactgagtcacttttctctgttgttaccctctaaatacaactacataccccgctaattagtcaatggaccatgatacaaggactctgaaagccgagagaaggaaggcagactggctgggagcttcaagacttgagaggtctggtgagtcccctaggtttcctttttatctcccacgtaccttcaggctgggcacccgatgggcctgcaacttggaaccaccaacaggaatagacaaaataatccaagagaagcctgctttgtccagccaaacgaaagggaaagcccagcagagcctgagttgggatcctgaatcctccttccacaaccagagtccctgcagcccgtctgatccaccagctgggctggcatcagccgagctctgtgtctccctgttctctgttgagattccacagtgtgcttccacccccagagagcaccagcaaaggctgagtgtgaaccccagcaataccaggagaacaaagaggaaaaacaaaacaaaaccagaatagaattcaaagggctcagaaaactaaactgtcattgatacaaatgcccacaaaagtcgaccagatcctatgaatcaaacctaaacaaggtgaagcctcattgaaacagaagacttaggatcaagaatctccagctgggcatggtggcacatgcctatagtcccgggactttgtgaggccgaggtgggtggatcacctgaggtcaggagttcgagaccagcctgggcaacatggtgaaaccccgtctctactaaaaatacaaaattagccgagcatggtggcacctgcctgtagtctcagctatctgggaggttgagtcaggagaattgcttgaacccgggaggcggaggttgcagtgagctgagattatgccattgcactcaagcctgggcaacaagagcaaaaaaccctgtctcaaaacataaaaaaatttaaaacaacaaaaaacaaaaaagagtctcctgacagaagaatcaaaatgtccaggatgcagtaaaaaactgcaccatatccagaactcagaatgtttttcctactctctactctcacacactcctcaacacaatgcttctgacactagatgtgtgagggtttctcctcacacacaaagcaagcaattctccactggacaccagctggatgtcccctaatttaattcaattctgacactttctacttggagatagcatcagatcccacaggttggtaactctaccaggttcgttgcccgatgcactgagacacagggttgcagcagagaaagaggtttaatcataaggcagccaaatgagggggaggaaacctcaaatccaccgcccagaggagtttggggccagaggtttttaggggtttggagtgggctgaggtctggggaatcactgattggtcgaagggtgcagggtaaagccaggagacagggagatgaagaaactgtattctcaagctgatctggttccctgttgtggggggtcttcaaactggtgggtgtcagccgttgctgctggaattcaggatctgaaaaacatcttaagcaattcataaaagccttatgattctaacatcagaagttccgtctataggaacaatggggatgaaaatagtctagtgcgcgactttcagttagcaagcagccccaagggagtgggccagagtgcagcctgaccaatgcttacttataactatatttctttttatttgtttatttgtttgttttttaattatactttaaattctaagatacatgtgcagaacgtgcaggtttgttgtatatgtatacacgtgccatggtagttggctgcactcatcaacccaccatctacattaggtatttctcctgatgctatccttccccttgcccctcatcccgacaggccgtggtgtgtgatgttcccctccccattatcatgtgttctcattgttcaactcccacttataagtgagaacatgcagtgtttgcttttctgttcctgtgttagtttgttgagaattatgatttccagcttcatccatgtccctgcaaaggacatgaactcatccattttccatagctgcatagtactccatggtgtatatgtgccacattttctttatctagtctatcattgatgggcatttgggttggttccaagtctttgctattgcgaacagtgccgcagtaaacatatgtgtgcatgtgtctttatagtagaatgatttataatcctttggatatgtacccagtaatgggagggtatttcaggatctacatccttggggaattgccacactgtcttccacaatggttgaactactttacactcccaccaacaatgtaaaagcgttcttatttctccacatcctctccagcctctgttgtttcctgactttttaatgatcaccattctaactggtgtgagatggcatctcattgtggtttttgatttgcattactttaatgaccagtgatgatgagctttttttcatatgtttgctggccacataaatgacttctttcgagaagtgtctgttcatatcctttgcccactttttgatggggttgtttttttcttgtaaatttgtttaagttctttgtagattctggatattagccctttgtcagaaggagagattgcaaaaattttctcctattctgtaggttgccttttcaccctgatgatagtttcttttgctgtgcagaagctctttagtttaattagatcccatctgtcaattttgacttttgttgccattgcttttggtgttttagtcatgaagtctttgcccatgcctatgtcctgaatggtattgcctaggttttcttctagggtttttatgattttaggtcttacatttaagtctttaatccatcttgagttaatttttgtataaggtgtaaggaaggggtctagttccagttttctgcatatggctagccagttttcccaacaccatttattaaatagggaattctttccccatggcttgtttttgtcaggtttgtcaaagatcagatgcttgtagatgtgtggcgttatttctgaggcctctgttctgttccgttggtctatatctctgttttggtaccagtaccgtgcttttttggttactgtaaccttgtagtatagtttgaagtcaggtagtgtgatgcctccagctttgtcctttttgcttaggattgtcttggctatacaggctctttcttggtttcatatgaaatttgaagtagttttttctaattctgtgaagaaagtcaatggtagcttatagcattactttgggcagtatggccattttcacaatattgattcttcctatctatgagcatggaatgtttttccatttgtttgtgtcctgtcttatttccttgtgcagtggtttgtagttctacttgaagaggtccttcacatcccttgtaagttttattcctaggtattttattctttttgtagcaattctgaatgggagttcactcatgatttggctctctgtttgtctgttattggtgtataggaatgcttgtgacttttgcacattgattttgtatcctgagactttgctgaagttgcttatcagattaaggcgattttaggctgaggtgatggggttttctaaatatacagtcatgtcatctgcaaacagagacaatttgactttctcttttcctatttgaataccctttctttctttctttctcttgcctgattgccctggtgagaacttccaatacatgttgaataggagtggtgagagagggcatccttgtcttgtgctggttttcaaagggagtgcttccagcttttgcccattcagtatgatattggctatgggtttgtcataaatagctcttattattttgagatatgctccatcaatatctagtttattgagagttttcagcatgaaggggtgttgaattttatcaaaggcattttctgcatctattgagatactcatgtggtttttgtctttggttttgtttatgtgatggattacgtttattgatttgcatatgttgaaccagccttgcatcccagggataaagccgacttgatcatggtggataagctttttgatgtgctgctgaattcagtttgccagtattttattgaggattttcgcattgatgttcatcagggatattggcctgaaattttctttttttgttgtgtctctgccaagttttggtatcaggctgatgctggcctcataaaatgagttagggaggagtccctctttttctattgtttggaatagtttcagaaggaatggtaccagctcttctttctacctctggtagaattcggctgtgaatctgtctggtcctgggcttttttttggttggtaggctattaattactgcctcaatttcagaacttgttattggtctattcagtgattcaacttcttcctggtttagtcttgggagggtgtatgtgtccaggaatgtatccatttcttctagattttctagtttatttgagtggaggtgtttatagtattctctgatggtagtttgtatttctgtgggatcgatggtgatatcccctttatcatgttttattgtgtctgtttgattcttctctcttctttattagtctggctagcagtctattttgttaattttttcaaaaaaccagctcctggattcattgattttttgaagggtttttttgtgtctctatctcctccagttctgctctgatcttagttatttcttgccttctgctagcttttgaatttgtttgctcttgcttctctagttcttttaattgtgatgttagggtgtcaatttaagatctttcctgctttctcctgtgggcatttggtgctataaatttccctctaaatactgctttagctgtgtcccagagattctggtacattgcgtctttgttcccattggtttcaaaaaacttattatttctcccttaattttgttatttacccagtagcaattcaggagcaggttgttccatttccatgtagttgcacagttttgagggagtttcttaatcctgggttctaatttgattgcattgtgggctgagacactgtctgttatgatttctgttcttttttgtttgctgaggagtgttttacttccaattatgtggtcaattctagaataagtgtgatgtggtgctgagaagaatgtattgatttggggtggagagttctgtagatttctattaggtctgcttggtccagggttgagttcaagtcctgaatatccttgctaattttctgtcttgttgatttgtctaatattgaaagtggcatgttaaagtctcccactattattgtatgggagtctaggtttctttgtaggtttctaagaacttgctttatgaatctgggtgctcctatattgggtgcatatatatttaggatagttagctcttcttgttgctttgatccctttaccattatgtaatggccttctctgtctttttcaatctttgctagtttaaagtctgttttatcagagactaggattgcaacccctgcttttttttatttatttttattttttattttttgctttctatttgcttggtaaatattcctccatccttttagtttgagcctatgtgtgtctttgcatgtgagatgggtctcctgaatacagcacactgatggtcttgactctctatccaatttgccagtctgtgtcttttcattagggcatttagtccatttacatttaaggttaatattgttatgtgtgaatttgatcctgtcattatgatgctagctggttattttgcccattagttgatgcagtttctttctttttttttttttttttttgagatggaggctcactctgtcacccaggctggagtgcagtggcgtgatctccgctcactgcaagctctgcctcccgggttcaggccattctcctgcctcagcctcccgagtagctgggactacaggcgcctgcaaccacgcccggctaaattttttttgtatttttagtagagacggggtttcaccatgttagacaggatgatctcaatctcctgacctcgtgatctgcccacctcagcctcccaaagtgctgggattacaggcgtgagccaccacgcccggctgatgcagtttcttcatagtgtcaatggtctttacaatttagtgtgtttttgtaagggctggtaccggtttttcctttccatacttagtgcttccttcaggagctcttgtaaggcaggcctggtggtgacaaaatctctcagtatttcttgtctgtaaaggattttatttctcctttgcttatgaagcttagtttggtgggatatgaaattctgggttgaaaattgttttctttaagaatgttgaatattggcccccactctcttctggcttgtagggtttctgcagaatgatccactgttagtctgatgggcttccctttggggtaacctgacctttctctctggctgcccttgacattatttcgtttatttcaactttggtgaatctgacgattatgtgtcttggggttgctcttcttgaggattatctttgtggtgttctctgtacttcctgaatttgaatcttggcctgtcttgctaggttggggaaattctcctggataatatcctgaagagtgttttccaacttggttccattctccccatcactttcaggcacaccaatcaaacgtaggtttggtcttttgcacatagtcccatgtttcttggaggttttgttcattccttttcattcttttttctctaatcttgtcttaacactttattccattaagttgatcttcaatctctgatatcctttcttctgcttgatcaattcagctattgatacttgtgtatgcttcaagaagttcttgtgctatgtttttcagctccatcaggtcatttgtgttcttctccaaactgattactctagttagcaattcctctagccttttttcaaggttcttagcttccttgcattgggttataacatgctcctttaactcggaggagtttgttattacccaccttctgaagcctacttctgtcaattcgtcaaactctttctctgtccagttttgttcccttgctggcgaggagttgtgatcctttggaggagaagaggcattctggtttttggaattttcagcctttttgcgctggattttcctcatcttcatggatttatctacctttggtctttgatgttggtgaccttcggatggggtttctgtgtggacatactttttgttgatattgatgctatttctttctgtttgttagttttccttttaacagtcaggcccctctgctgcaggtctgctggagtttgctggaggttcactccagaccctgtttgcctgggtatcaccagcaaaggctgcagaacagcaaagattgttgcctgttccttcctctggaagctttgtcccagaggggcactcaccagatgccagccggagctctcctgtatgagctgtctgtcaacccctgctgggtggtgtctcccagtcaggaggcacgggggtcagggacccacttgaggaggcagtctgtccctcagcagagctcaagtgccgtgctgggagatccgctgctgtcttcagagcaggcaggcaggaacatttaagtctgctgaagctgcacccacagccgctccttcccccaggtgctctgccccagggagatgggagtttcgtctataagcccctgactggggctgctacctttctttcagagatgccgtgcccagagaggaggaatctagaaaagcagtctggctacagcagctttgatgagctgcagtgggctctgcccagttcgaacttcccagtggctttgtttacactgtgaggggaaaacccctactcaagcctcagtaatggcagacgcccctccccccactaagctccagcgtcccaggtccacttcagactgctgtgctggcagcgagaatttcaagccagtggatcttagcttactgggctctgtgggggtgggatctgctaatctagaccacttggctctctagcttcagccccctttccaggggagtgaatggttctctcttgctggcattccaggtgccactggggtatgaaaaaaagctcctgcagctagctcggtgtctgcccaaacagctgcccagttttgtccttgaaacccagggccctggtggtgtaggtacctgaggaatctcctggtctgcaggttgcgaagaccatgggaaaagtgtagtatctgggctagagggcaccatccctcacggcacagtccttcacggcttccctcggctaggggagggagttccttgaccccttgtgcttcctgggtgaggcgacaccccagcttgcttgggctcactccccatgggctgcacccattgtctaaccagtcccagtgagatgagccaggtacctcagttggaaatggagaaatcacccacctgcgttgatctcgctgggagctgcagactggagctgttccttttcggccatcttgcccacgaccccagaaacattttaatcataactatatttctattccagaacccagcatgtaactcttgttagacctgtgaggacagtttcaggctgagagcccaatcccataggactgccccctgcatttcacatgccagtcacaagtattaatagtatgttgtcacttatacttctgactaactggctcttagtcacggattcccatgatctccatctggagtttgattaatttgctagggtggctcacagaactcaggtaaacactttacttatagttccccatttattataaaggattttacaaagaatccagatggacagccaggtggaaggggcttgtagcttccacgtcctttcctggcgtgccactcaccaggaacctccacgtgttcagcttctgtaagctctccaaaccctgtccttttgagtttttacagaggtttcataatgtagccataattaaatcattggccactggtgatcatctcaaacttcaggccctctcctgtcccccgaagtggaggatggggctgtgagtgccaacccattaatcacatggttgggtcccctggcaaccagtcacccatccagtggttatctagggactctccaaaaaccacctcattaacaaactcaagtgtggtcaaaaggggattgttataaataacaaaagacatgttcaccttacaactctggagctattctaaaactatttcagatccgaggacgaaaggtcaaatattttaacaaaagacaatcctactgctctagtcactcaggaaattacaagagttatgagccaggaactgtggacaaaatcaaaatatatattccataatattacgccttgaaacaaatgaaaacatagagaatctcagcaaaaaatagaaccaaacagcaattatagaacttagaaatactacaatcaaaataaaaactcactggatgggttcaacagtagagtagagatgacaggaatagaatctgtgaacttgagggtaagtcagtagcatatacacaatctgaacaatgaagagaaaatagactgaaaaaaaagaacagagcctcagatatctctgagacaatcacaaaagatccaacattcatatcattaaagtccagaaaataagggagaaagaacatggagagataaagaatgcaaagaaataatgctgaaaatttcctgtaggccaagcacggtggctcacgcctataatcccagcacgatgggaggccagggctggctgatcacttaaggccgggagttcaagaccagactgagcaacatggcaaaaccttatctctacaaaaaatacaaaaactcgcctggcatggtggtgtgtgcatgtagtcccagctacttgggggggctgaggcagaaggattgcttgaaactggtaggtcgaggctccagtgagccaagatcaaaccactgcgttccagcctgggtgacaaagtaagaccctgtctcaaaagacaaaaaaaaaaaaaacaaaaaaaaaagaaaaagaaaattttcagccgggcacagtggctcacgtctgtaatcccagcactttgggaggccgagggaggtggatcacctgaggtcaggagtttgagaccagcctggccaacatagtgaaacctgtctctactgaaaatacataaattagccaggcatggtggcatgtgcctgcagtcccagctacttgggaggctgagccaggagaatcgcttgaacccaggaggcagaggttgcagtgagccgagatcataccactgcactccagcctgggcgacagagtgagattccctctcaaaaaaaaaaaaaaagaaagaaaaaaaagaaaagaaagaaagaagaagaaaattttccaaaggtgtcaaaaaacataaaattgcagatccaagcagctcagcatacttcaaataaaatccacctagcataacctacaccaagacatatcataattaaatttctgaacactgaagacaaaggtcacagctggagagaagcaaaacatggcctgtaaaggaaccccaatgtgaagaacaggttcctcatcagaaaccgtggagtccagaaggaagtgacatatcttccaaatgctgcaagaaagacctcccaatcataaatcttatatagatggtgaaactattcttcaggaatgtaaggggaaaaaagacagtctcaggcatagagaaactaagagaagttgttgatagcagacctacctttaaagaattgctaacaaaatccctcaaaacagaaagacaatgataataaaaggctgggattttcagccttttattattccatttcagtaaaaatagaagtaaatattcaacatccattcattagtttctttgatcgtatttatggttgaagcaaaagttatacattttctgatatgtatgtagaggttatacctaggacaattatatttttgtaggtgtggaggataaaggaattaaaaggaagtaagctttctacccttcaatggaaatggtaagacattgacaccagtaagctgtgataatttacatatgaatagaatagtagctagaacgaccactacaaaaactatacaaaatggtatactaaaaatatatataaataaatcaaagtggaactctaaaaaacattcaagtaacccacgagaaggcagaaggaagataaccaggtaacaagaaacagggaacaaatggtaaacaaattaaactctaacaggtcaataatcactttaaatgtaaacggactaaatacattaattaagagacaggattgcaatgggtacaaagttataattagaaaggaagaataagttctgatgtcctattgcacagtagagtatctcaaaatagctagaaaagaggattttgtatgtgcctgtaacaaataaataataaatgaggtgatagatatgctaattaccctgatttgatcatcacacaatatatttatgtatcaaaacatcacattgtactccataaatacatacaattattatgtgtaaaaaatttttaaattaaaaatgagacaagattagctgagtagatttaaaaacattacccaatgttatgctgtctataaaaaactcaattcaaacataatgatatagctaagtaaaaagtaaaagcatagaaaaagatatatcacataagtattaaattttaaaaaggaagagtggctatatgaatatcaaggtagacttcagagcaaagaaattaccagacacggagaggaattttacatgatgataaaagatcaagatcaatctaccaacaagagatagcaaacctaagtgtgtatgcaccaaaaacagatctttcaaatacatgaagcaaaaactgataaagccaaaggaagaaattgacaaatctactattatagttggagacttcaacactcttttctcagtaattgatagaactactagatagaaaatccacaaggagccaggcgtgatagctcatgcctgtaatcccagcactttgggaggccaaggcaggagaattacctgaggcctgaagtttgagaccagcctgggaaacttaatgagaccctgtctttacaaaataataataattattttatttttggctatcaatcatgccacattatttttaattacatacaaagatctaacatgccatccagggaccattttacccactgctttgattggttgccaatctcttgtctctctcttcagcaatggtgaggcagataccttttccttggggaagagaaatccatggtatgttgcccttgcaaacaacaaaaatgttggaaagtcaagtggcaaagctgttgccattggcatctttcatgtgaaccacgtcaagagatccagggtgcctctctctgttggtgatcacaccaattcttcccaggttggcacctccagtcaccatacacaggttaccagtgtcgaacctgatgaagt

SEQ ID NO: 61849 - DNA, 1740 bp, Homo Sapiens
tttttttttttttttttggtagagatggggatcttgctgtgttgcccagggtggtggtctccagctcctggcctcaagcaatcctactgcctcagcctcccacactgctgggattacaggtgtaagccaccacacctggccactgatccctttcagtctaaatttggtttctcttaccttccccaaaatgtcaggaaaaattacctccacccatctccatctcagtaaacaatattcaatattcttcccacatcaaagctggccttaagggacaggttcgctgactctcaagattaagccttcaacccctagttcccaccttcaacaaggcatggattcttagcttctttgggaaaggtcaaatgggaaggaagctagcagcttggaggtaagctctgcctcaaggcaatcagattatgtcacaataccaaccaattctatgctgataacaggcagggaagatgaaacactttcaggccatcgagtagggggattaggagaccaagcactggtccccagagggatggcaacagaatacatatcgatttcatcacagctttctagtatgtcgtagacacaaagaaaaaaacaatagggctaattctacgcttgatttatcaggtatggtgttgttttttttgtttgtttgttttgtttttttgacacggagtcttactctgtcaccaggctggagtgcagtggcgcgatcttggcttactgcaacctctgcctcccgggttcaagcaattctctccctgcctcagcctcagcctcccaagtagctggtattacaggtgcctgccaccacacccagcttatttttatattatttagtagggatagggttttaccatattggccagccttgaactcctgacctcaggtgatttgcccgccttggcctcccaaactgctgggattacaggcgtgagccaccgcacccagcccacacccagctaattttttgtattttactaaaacagggtttcaccatgttgtccaggatggtcttaatctcctcaccttgtgatccacctacctcggcctcccaaagtgctgggattacaggcgtgagccactgcgcctggccagatatgttaacatagctccacacctacaggtcctcccctctgggccaagtttgaagaaacagattctcaccttggcttaaaggaccctagtggtttctacaaagatagtatttctgggtggacttggctcattttctgttcaaaagacccaagtctccccaagggcagacatgaaacagctaagcaaccaaacatctgggggctggttttctggattttggttgatctttttggacagaaaagcaccaacagcaaaagaaaaggcaagggggaataggtgaaggtgagccactgtcactacaacaactgagttcatccatgatgactaaggaatatcaggacattctagtttttgagaattcttcctttcagagtaaatgcttcttatatccttctggagaacagaactaaatccagaagctgtagtatcattaactttgcctagaaatctagaaatctcaacctcatatctgttcataactccttccctttctccaaagagaatacggaaggcaaagtccattttctgaatatggcatttttccttttctatttttttgagacagagttttgctcttgttgcccagactggagtgcagtggcacaatcttgactcaccgcaacctccgcctaaaaaaaaaaaaaaaaa

SEQ ID NO: 61850 - DNA, 460 bp, Homo Sapiens
  misc_feature (410)..(410): n is a, c, g, or t
  misc_feature (443)..(443): n is a, c, g, or t
  misc_feature (450)..(452): n is a, c, g, or t
  misc_feature (458)..(459): n is a, c, g, or t
gagacagagtctcgctctgttgcccaggctggagtgcagtggcttgatctcggctcagcgcaagctccgccccccggattcatgccattcttctgcctcagcctcctgagtagctgggactacaggcacccaccaccacacccggctagtttttttgtatttttttagtagagacggggtttcacagtgttcaccaggatggtctcgatctcctgaccccgtgatctgcctgccttggcctccgaagtgctgggattacaggcgtgagccaccgcacctggccaagaccaatttttaaaatttaagacacttcaaagatgcaaaataatttcagaactgattcctggaaacttgtaattttaatattaaagatagttctgtttgtatctttccatggataactaaaaatnacacaaaatggaaacagaaatgcccattcttgntttaacnnnggaacnnt

SEQ ID NO: 61851 - DNA, 1722 bp, Homo Sapiens
agcacttaatacacattcagccttcccatcatgtcattgtaccttggaacaaggagcaaataattggctgtgggatccccactaagtttttgttacacgacttcccttctctgtagaatgggcacacgatgagcgaccaccctctcggagacaaaccactgatgaaagcgaggtgtaaagctccttgtgggcaatctgggaaggacagaactcctgagaccttgagccccaccacaagagcgcccggaaatcggttcatttccgagcccagcacgtacgtgcccgcgggttcctctgccacggcgtggttggccagactctgccaggcccgctcgcaggtctccagcgccgcccggaagtccaggtgcaccaccaggaggtcggccgcctcctccagaaggtccacggccggcgcccgggccgggaccgcgcgcaccggctcgctgctgcgcaggggtcccccgagccccctgaggggggctgcagaggtcgaagaatcgctcttcataacgagtccgggtccaaggcccaggtcctcagacgtcggagtgaccgcctccccagaggctccgggatatcccgagttggcctgggcgaagagggagagtcctcatctctttgcccacaccccttcccgaggtcgattccccgagaaggaaaaggaaggggcctatctgaggcaaaagctgggctcgcctggaggctggggaagcagtttacacgtcagatttgcaggattcttgcatccctggaatacctggccctagcttctccggccccgcgacacgtgcaggaactgcctcagctccgggctcctggttacgatcaaagactcacctcgcctcccggcagcgggcgcggacatctttgcgctcgcccagccccgcagccgcgcggcgtcccggcggcgcggagtactctaggagttgtagttcctcagctctcggcccatcgccttctgtaatggaagtaggaggcagagcgcggactacaacccccagcacgccgcgccccggaagccgcccctgtgccgtgagaaaacaaactggtgctacagcttcggggtgcggaagtcaaaacgaagcaaaaccgaagctgtcttgtgaaatggaggggtcctcactaaccagttccagcggaggctaacggaagaagtgccagcaatggatgtgcagctacatgcacgcttttaattcagagcttctgcgacggtggcgatcaggggatctgtaatgtaatgtaatgtcaaggctgacgcagagctgatcaaacattttggcaaccttagtcttgaattgattcacactttctccgcgttgcctccggagtttgctgtagggtaatgaatattgcctggtgaggatgagggacttagggtggaaaccttcacaaggaccactgagaatatgttggtcccaagggcaatgttccaaaatgaatagtgaccccaccgaggcggggttgggggcgctgagcataagggcctcatttttctcactgctctctgccccatcctgaatttgctgttaaaaaacaacgttaaatgcagataccaattccacttccccactgttgtcacttccgatctgtctttatatttctccttatcatttatcaccatctacataccaatgtctatattttacttatttttattgtctatttccttccactatgatataaactcacaaaggcagacaaaaaaaaaaaaaaaaaaaaaaa

SEQ ID NO: 61852 - DNA, 564 bp, Homo Sapiens
  misc_feature (467)..(467): n is a, c, g, or t
  misc_feature (519)..(519): n is a, c, g, or t
  misc_feature (531)..(531): n is a, c, g, or t
  misc_feature (535)..(535): n is a, c, g, or t
  misc_feature (550)..(550): n is a, c, g, or t
  misc_feature (560)..(560): n is a, c, g, or t
acatagaatacaattcaacattacattgattcctttaggcttcgggttagatcaaattctcccaaacagaatagccatggggagcatgagacaatctagtgagcctaaaacacggaagctggttctgtcctttgacccactgacgtgaaaagagtcattgcaggtgatgctttgttgcagaaatgtggagtctgacctgggctgcatttccagatcaggtgcatccgtacctcagccttccatggggtaacaggcattggcaaaaaatgtcctgcctcagtgtgaccctggaacctttccagcccacactcatgtggaggatcccagtggggatgacgatgtttggggatatttcctcatattctctttgctgagaaactagcttgagtgggcagggaatggaggcaggtactgctagagtctgcaaagtgagtccagaacctggacttctagagttggggggtatncctaaacttcctttcactaagacattcatgatagccagtattccaaaggggnccttcttataanactnggcccaggcttcaanttctggggangagg

SEQ ID NO: 61853 - DNA, 543 bp, Homo Sapiens
  misc_feature (102)..(102): n is a, c, g, or t
  misc_feature (119)..(119): n is a, c, g, or t
  misc_feature (244)..(244): n is a, c, g, or t
  misc_feature (253)..(253): n is a, c, g, or t
  misc_feature (323)..(323): n is a, c, g, or t
  misc_feature (362)..(362): n is a, c, g, or t
  misc_feature (364)..(364): n is a, c, g, or t
  misc_feature (377)..(377): n is a, c, g, or t
  misc_feature (392)..(392): n is a, c, g, or t
  misc_feature (435)..(435): n is a, c, g, or t
  misc_feature (456)..(456): n is a, c, g, or t
  misc_feature (463)..(463): n is a, c, g, or t
  misc_feature (481)..(481): n is a, c, g, or t
  misc_feature (503)..(503): n is a, c, g, or t
  misc_feature (512)..(512): n is a, c, g, or t
  misc_feature (520)..(520): n is a, c, g, or t
  misc_feature (540)..(540): n is a, c, g, or t
gaacttcctatgataaaaccatctacacttttctaagtaggaaaaataagggaatgagtgtcatgtttttaaaaatttggggaaagatcaagagtacagaanagcatggggcaaaaaanaagtttaggtgcatttaggtgacatcaataaagcccagttcttttttttttttgacaaatgggatcatcctataaacattgttaggcaaattacaaaatctatctgcgctgtccctagttgggcncaacatgcnccatggcaatctgtcttgctgctgtgcagtccttccctgggtggctgcaggggcaaacacagggtttgtnggtcctgggtcttataaaaatcaggtacaaattgacacntntatttaaaagganaaattgccaaatganacaaaatgttttccttatgcaaatttcataatataaattatanacactgccagtgcactgttangaccccncgggcttggaagggctcnatattattgggtttacaataanattgggccnagttaatntccaaaaattactccccccnttc

SEQ ID NO: 61854 - DNA, 4998 bp, Homo Sapiens
caaagctctaagtatgctgggacagatactacaaatgaactttatgatgagcgaattaacctgatttatagtcctgtactttctctacgtgccatatccattattaaagaaatgagtctaagtaggaagtagagttaacctatagtttcatttcttgaatttcttattctctttcttcagtctttttcagttaacctacacacacacacacacacacacacacacacacacacacacatgtttataagtgggatgggagaacgggtacggtgataattaaaagaggtaaggtttctcttgagatgaaaatgttctaaaattgtgatggcggatgcacacctctgaatatattaaaagccattgaaatgaaaaaagggtggggggaatccaaaagtgtagcagacccaaccttgagatttgcttgtttgggaatgaattttccaataacttgaaagttgtaaaaactcacacttctcagggttaggtgtcagaaagaaaaggaagtaatttattctttaataaagcaattgttaaatactctttagaactaccactgattgcaattttgcagtgtctactcatagtgtctatataggtaccatgaaaaagatgtacttgtgaaactgttctcatgttacttcagaaaaattttgcttctaagtgtgtattctatgtctggttaaatgttcattgaattttatttaatcattaatctcaacagcattaaacagtcaataacataaatgacagtcttctctttgtactcctccctgtacaacatcacagagcttcatctgtatacacgaaagtcacatgaaaatagaactcagtgttttgtattacatagtctattcagtacatttagaagtattttgcctccaatattcaaccacagtaaaagactcagtgagaacgcgtggtggcgctgcaggttaagatgacggaaaatacaactgcctacgcagctccaggatccagcaaaccgtttcccaaagcctggaagcaaaagaatagctgagccagagcgaacgtgagtgtgaaacctctttaagacaccgttgggctgcttggttctgacattctggactgcaaaacagttctactaggatcctggggatacatgaagcttctgtgaaccaacttttcaagaaaaagcaatggagattggatggatgcacaatcggagacaaaggcaagtccttgttttctttgttttgctgagcttgtctggggcgggcgccgagttggggtcctattccgtagtggaagaaacggagagaggctcttttgtggcaaatctaggaaaagacctggggttggggttgacagagatgtccacccgcaaggccaggatcatttcccaggggaacaaacagcatttgcagctcaaggctcaaactggggatttgctcataaatgagaagctagatcgagaggagctatgcggtcccactgagccttgcatactacatttccaagtgttaatggaaaaccctttagaaatatttcaggctgaactgagggtgatagatataaatgaccattctcccatgttcactgaaaaggaaatgattctaaaaataccggaaaacagtcctctaggaactgagttccctctgaatcatgctttggacttggacgtaggaagcaataatgttcaaaactataaaatcagcccaagctctcatttccgggttctaatccatgaattcagagatggcaggaaataccctgagctagtgttggataaagagctggatcgggaggaggagcctcaactaagattaaccctgacagcgctggatggtggctctccaccgcgatctggaactgctcaggtccgtattgaagtggtggacatcaatgataacgctcctgagtttgagcagcccatctacaaagtgcagattccagagaacagtcctcttggctccctggttgccaccgtctccgccagggatttagacggcggagccaatggaaaaatatcatacacactctttcagccttcggaggatattagtaaaactttggaggtaaatcctatgacaggggaagttcgactgagaaagcaagtagatttcgaaatggttacgtcttatgaagtgcgcatcaaagccacagatgggggaggtctttcaggaaagtgcactcttctcctgcaggtggtggacgtgaatgacaatcccccacaggtgaccatgtctgcactcaccagccccatcccagagaactcgcctgagatagtagttgctgttttcagcgtttcagatcctgactccggaaacaatgggaagacgatttcctccatccaggaagaccttccctttcttctaaaaccttcagtcaagaacttttacaccttggtaacggagagagcactcgacagagaagcaagagctgaatataatatcaccctcaccgtcacagatatggggactccaaggctgaaaacggagcacaacataacagtgcagatatcagatgtcaatgataacgcccccactttcacccaaacctcctacaccctgttcgtccgcgagaacaacagccccgccctgcacatcggcagcgtcagcgccacagacagagactcaggcatcaacgcccaggtcacctactcgctgctgccgccccaggacccgcacctgcccctcgcctccctggtctccatcaacgcagacaacggccacctgttcgccctcaggtcgctggactacgaggccctgcgggagttcgagttccgcgtgagcgccacagaccgcggctccccggctttgagcagcgaggcgctggtgcgcgtgctggtgctggacgccaacgacaactcgcccttcgtgctgtacccgctgcagaacggctccgcgccctgcactgagctggtgccccgggcggccgagccgggctacctggtgaccaaggtggtggcggtggacggcgactcgggccagaacgcctggctgtcgtaccagctgctcaaggccacggagcccgggctgttcggtgtgtgggcgcacaatggcgaggtgcgcaccgccaggctgctgagcgagcgcgacgcagccaagcacaggctggtggtgctggtcaaggacaatggcgagcctccgtgctcggccaccgccacgctgcacgtgctcctggtggacggcttctcccagcccttcctgccgctcccagaggcggcccccggccagacccaggccaactcgctcactgtctacctggtggtggcgttggcctcggtgtcgtcgctcttcctcttttcggtgctcctgttcgtggtggtgcggctgtgcaggaggagcagggcggcctcggtgggccgctgctcgatgcctgagggcccctttccagggcgtctggtggacgtaagcggcaccgggaccctgtcccagagctaccaatacgaggtgtgtctgacaggaggctcagaaacaagtgagttcaagttcctgaagccgattatccccaacttctctccttagggcactaggaaagaaatagattaaaattccacccttcacaatagctttggatttaattattgataggaacccatttgataaattccttaacttcttatgattgtcttgttgattaaattgttcatgctcaccaccaccaataaggtatttttctctgattgttagttcaaattatattgttaattccagtttcccttttcctcatatttaccccgaagaggtgttgcatatagaatcccaattaacaaaatatactttatcttcaaagttgatgtcatttaaaatttttccgtctttatattttatttacttcctattcattttttgctccatttttcatgttacttctcagtttcctagaacttcaagtattaaaataacctgttgcatgtattaggcatatttcctatgttacatttcttttgtctattttcctttcaaaattggtatttttgttgggctcaattttcattataatacttttcttaaagtttctttctttcttttcttttctttctttttttttttttcctttttgagacagggtcttactcttgtcacccaggctggagtgcagtggcacaatcttggctcactgcaacctctgcctcctgggctcaacggatccttccacctcagcctcccaagtagcttggactataggtgcatgccaccatgcctggctaatcttttgcagcgatgggattttgccaagttgcccaggctgatcttgaactcctgggctcaagccatcctccctcctcagcctcccaaaattctgggattacaggcataagccaatgtgcccatccaaagttttatttatttatttttttgagatggagtctcgtaaagttacctttaaaaaaaaagttctattttccctgtattggtatctccttaaataaaataaaatattcctattgtaagtgatatgagaaatctttaaccagccttatctaaaaataaaaaagagaagccattgtaagacattcagtatgtgtaaatgtgtttgtgtttgtagacaaaaggcaaaggtattatgtaaaaatatttaataatttattctttctattactgaattaaaaaatcagaggtccctgttatatttttaatggctaacaactcaatctcattaagttggaaaaaaaacttatcaaagagacatttacatggtttggcttttatattcatcatagtatacattggcggtatctagccctttctctgtaaaatatccctatgtttaatctgtatttcttgcttattatatgtaaagttgagcttctttctagatattaggcctttgaataaaattctatgtgagtcagatttaataatttgttttcactttcaatagtgttaggataggtgttagtttgatctgttctttacctccgcttatttggttcagagaaattagggcctactagatttccactaaaagggacttgaaaataaaggtcagtcccttctttaattctgcaagttactttaaagctaatctaag

SEQ ID NO: 61855 - DNA, 1520 bp, Homo Sapiens
aaagagctttttctttctcaaataagaacctgttaacctctaaatccacttatcttcaatagcgccttagggaggtgatggagagagttctggctggggcaccttccttgctccccctgagtagcactaagtaatctcacaggacaggcaaggcctttctgaagaggtcttagagtgcagggaattgcatgacaggtgctgttagccaccttggaagaactgcaggccttgcgtggtgccaccttgtttgcgggaagcccagccctgtccattcccctggccctagcatctgtttatctaatagcagtaccaatttttattgttaggataagttgtaggagaaattagcaaaggttaactgactgctgtgggtagacagtacaattcttcttcagtttctgacttaggagtgtttccgaaaagttaagtgaaaacaaaagtttgaagtgtttcccttttagttacataacagacactcattacggaattgaacagttttagacccataaataattaagttaaaagcataacaaaatcctgttaggaaactgatgaaaaatttgtttctaaaacactttagattttaaacttgaacacgtagtgaaatgtcttttaaaacaatgaagatgggtgcagtgttcacaggcctctccactaagcagatgtctactgagaacacagtattaggggatgtgggtggtagaaagatgcagtggccaagcctcaccctgggcgagctggggcaggctcgctctctcaggcacagtgaggaaggcacactgaagggggttgccctgactgccagcatgccaggtatacatggtgactgaagctgccacaggtcttctattgaccacactacaaggactcttcttggtcactgatgacagctgttgtctgtctgccattggccacactatccagttctcactggccaagcaggtgggcggggcccagccaggacttgagaatcccactgggaaaggacagagcctgggttcaggctaggtccctcttctgggcctgggcagcttccagatgtgaaggatatgagtctctcccgctctcaggaatcattctctcatctcatttggatggctatctcctattttaaatttgaatcatggaatttgaatttgtaatttggttttagccttagtttccttctggttcgcacctaagcaagataattttaagacacttaggtcaataactgtgcctataagaatttcctttgggccaggcatggtggctcacgcctgtaatcccagcactttgggaggccaaggcgggcagatcacctgaggtcacaagttcgagaccagcctggccaacgtggcaaaaccctgtctctactaaaaatacaaaaattagccggggtggtggtacatgcctgtagtcccagctactcaggaagctaaggcacgagaatcatttgaacactggaggcagaagttgcagtgagctgagatcgtgccactgcactccagcctgggtgacagagtgagactctgtcttgg

SEQ ID NO: 61856 - DNA, 546 bp, Homo Sapiens
  misc_feature (478)..(478): n is a, c, g, or t
  misc_feature (481)..(481): n is a, c, g, or t
  misc_feature (499)..(499): n is a, c, g, or t
gtcctgtactgccaggttggaataatgaccaaagggaggggcaaaacaaacagatatgctcactgtggcagaagtcactccaaagatcaaagacttgattcagccgtggctgccaaaatcagaaccacagtgggtgctcatcagcacggtgccctcagaaccacatgggctacccttgataggttagcagcttggggtgcaggccccgcatcctgcttagaaccacctgctgagaactggatgtgcacattaccttacccactcacaacatttgatttcaactcaattctgctctagtattatgtttattgaatgacggaagtctaacagacactgtaaaaatccaatttcacatcttatagtacccaaaagggaactgtgattttcctatatcagtgagcaaaatcttgagccaattagtaacaagatcacccaatttctagtatttctattgagatatatttctttaggtttctgnaanggggaaataatttttggnaccttagtatcagcaatcttatattcatttataggggtatctcaagt

SEQ ID NO: 61857 - DNA, 516 bp, Homo Sapiens
ttttttttttttttttttttagagttagaatgattttaatggttgatttatatttagatacaaggaaagaataaaaaacagtatctacaattagaaaaacttattgaaataaactcatgactaaaaatgaataatgtaatatattcgggtattatctttcatatactcattgtgagttaagatataaaaaatagacattcacatattgtattaatcttaccggtgcagagacatctatttaaataagacaaatcatagtgttagccatttaaaataatttagaaatgtattctcctttatattttcaagttcagtacaagtaaaatatatcactaaggaaaatgcataacaaataagagtagaatgcttatcagtatgaaataaccaatctatctcttcaatgaaccatgtaaagacttcatttcaaacaaagaattataaattgatatgggtatcaaaagcaactcctaaaaaacaattatgtccaaggacaacagttttcctaccacttgccat

SEQ ID NO: 61858 - DNA, 1699 bp, Homo Sapiens
ggttagattatgttgaaacacatctgtgtttcagatgtgttcagagctgaggtctcagctgaggctccactgaagcaggattcacttccaaaataacagagttgttgccaatattcagttcgtagcaaactactggaacaagaatctgttttcttgctgagtgaatttcttgccatgtggccctctccaaatgctggacataaaaaagtaggctgagcacagtggcgcacacctgtagtcccagcggtttgggaagccaaagtaggaggatcgcttgaggccaggagttcaaaactagcctgggcaatatagggagacccccatctctacaataaataaaaataaaagctttcatttacaatgatggtagaccaagaaatttgtcctagatcttcactgagaacatctagaaaagctggcagctgaacaaaattttaaaaacatctgggctgggcacggtggctcacacctttagtcccagcactttgggaggcaaggctaggggatcacttgagctcaggagtttgagaacagcctcagcaacatagggagaccccatctcttaaaaaaaaaaagataaactaaaaataaattaattaaaaacacctggttgaagacatcagcgagctggcaacaatgaagaattcctaaggaaacagaaactttgttaggggagctgttttcccttgtgttggccaattctgcgagtggtaagtgattgctgagctgttgaatggccattttgacaaccttatgggacaaggaagaaggggcctgcactggtaaaccctttcccttacttggagtgaggatcccaaatggctactcattaggagtaacagtggtccagaagtaagcaggccttcaaagggatggcagctcagcttcaaataccctcagtttctgaaattagattgaggttatctaaggtttttagagctctcagatgcatggcagaagcaaatctacatttgcttttcaggaagaaattaacatcctaggtgtggcagacagactctaaggtggccactatgatccctgtcccctggtattccttgtgtggagggagactcccatgacttgattctaatccatagactaccacgaagatgatgagatggacatgattacagcaaattctaatgttcatcttattaagagactcttgttgactttgaagaagcaagctgccatgatgtaaaccagcctttggagagggcctcatggcaagaaactaagggtggcctctagccagtagtcagcaagaaaacagatccttgttctagtagtgtgccaggaactgaagattgccaacaaccttgttattttggaagtgaatcctggttcagtggagccctagctgagaccttagctctggctaacaccttgattgcagtcttttgagaccaggaaacagaaagaagccagctaatctgtgcttggactcctgacccacagaacctgtgagataataaatgtgtcttgttcttaacacaccagatttgtggtaatattgttacacagtgtagaaaactaacaaactaggcctcaaaataaatctataaacagttttgcaggtacactgtagaacacacaataaaaagtagccacagaaagagacatgagtgaataccagcaggagcttctatttaaacatctgtagggacctccagatattggagttttcagagacaagctt

SEQ ID NO: 61859 - DNA, 597 bp, Homo Sapiens
ttccaccacagcggtggcagcagtggctatgagagcctgcggcgcgacagcgaggccaccggcagcgcctcctccgcccctgactccatgagcgagagtggggctgcctccccaggcgcccgcacccgcagcctcaagtcccccaagaagagggccacaggtctgcagcggcggcgcctgattcccgccccactgcccgacaccactgccctgggccgtaagcccagcctccccgggcagtgggtggacctgcccccgcccctggctggctccctgaaggagccgttcgagatcaaggtgtacgagatcgatgacgtggagcgccttcagcggccccgccccaccccgagggaggcccccacccagggtctggcgtgcgtcagtacaaggctgcggctggcggagcgcaggcagcagcggctgcgaggggtgagcctgccagcgtttgcgacgtccccgcacgacaggctcatactttctgaggatcgtgcatagcataggacgtctgaacctttgtacaaatgtgtagatgacatcttgctacagcttttatttgtgaattaaagatgcatcgatggttaaaaaaaaaaaaaaaaa

SEQ ID NO: 61860 - DNA, 2044 bp, Homo Sapiens
ctaacatatgttatggttggagtgcatataacactgtgcagccgaataactagacctagaaaataaaactgatcacggtaaagttattttccaggcaggggatgcctcatgatactggctggggcccaaccacacccaaggcctcgtcggtttctgttctcatgctgttgtcatatacccagaagtaggggaagcccaggagccatggagcctcagtgtcagttccctgacaagccatcctccaaaaaagcctttcctttgcaaaatgaacaggtactccgtgaaaacagggagagaaatttctgtttttcaccgatgcatttctcacgttcatctgacaatgtgcaaaacaaaaagtctacattagaaatttatcatgaagttatactctacttcaactcacttcttttcagtccctgtgaaaacttaatactcttggtgttgtactgaaatacccagtggatttggggtgcacctgtacccttgatctccacttctgcgtgtttctaggccaaagggaaaaccaactctctacctaattggaacttctggttttattgcatatcctggaggtcttgcttcgtttttattttcccgggttgatggtctttcccatgtgcacctacgttagcccactatgtagaacgccttggcagttttcacagagtaagaggttgaaggaagccaccaatgtgaaaatcatatttgctgtaaagaaagaaccattgtgagttgttggaaaccagattaaaattccataattggagattgatgacttttatttcatgagttttacttagttaggtgttttatcttctgtgttttgtggctccaaattacgaagactgtggccttgcaagaaactgatcacggcaaagttattttccttactgaacacgtgtcctatatatttgcttggcctcgggttttgtttaatcccttcaaaggccctttgaactgatgtttcaacatgactccttctctgtgagctctccgctaggaagcggccatcatgtcaagccccttcacagctaaagtagtgagttcacatagtcgaagaatcttctgggttgcatcttatgaaaaaaagaaatccactgcctttttataagagaacagaacatttacaccgtcttgttgagcaaatgaacgttcaaatggccagcacaaaagaaatccccaatctctaacctcacaatgaaatcgccacggacaaaagatcacgggataccgggagcactaaactggaagtgacacaaaaccacagcagaatccgctcacacctgccgaggttcctgggggatgatctttgtgtaaaggatcctggtgccgcagtcagcctgaaacactccaaggagcagagacgctcccctctgcaacagtgacatttatactgatggcgtctttttaaataaattaatacatgtctgatgtggacagagtagtgctgtctgacaaggtgatcatttgacttttcttagaggtacaaatttacgctcccttctatgaatagagagggctatttgtttcattcaaagacaagacattgttagaaatgagtggcacacctcttcaacccatccccttcctccatggaggtaaaaagatcctattagttctcataattgattctgagggctgcagcgtgcctcatttagccgtccctgctcggttcacgccaaggatgtaattcatgcacacttggacgtccaacatggctgacgcgccttggacacacagcctcggcgctgcatcattttttaatcagctatctgaggaatatttatctgatcaacaaggagtgctgtcaggaggagaccagaggtgacattaataagcctgtggtttcctggtacaatgatggaggaagagtttggaataaaaccctgctcgtttgagcatgccagcagactaaagaatatttttattctgcttataaagagccagtcaaaagagtctcagtttgaagtgttcagttaagtttaagtctcagtgataagttttcaggcattcacatgtgttagtaaaaaaaaaaaaaaaaaaa

SEQ ID NO: 61861 - DNA, 463 bp, Homo Sapiens
aactaacttcaaaatctttcaaggggatacattattctggtttttcttaacatagccaaaagcaagttatcaattttcccattactttggtaatctgattaggaagaaattgtttttttcttttttttctttttgtagagatagagtcttgctatgtttcccaggatggtcttgagctcctggtttcaaacaatcctccttcctaagcctcctaaagtgccaggattataggtgtgagtcacaggcctggccatgattttgttttattattctcacttatttgattataaatgaataccaccatcttttcaaatatttattgacatctgtttttctccttctatacattcctggtaatgtcctttatttgtatttctttggattttcttccctggtctgggcataagattcttattttggattgtatcttgttttagatatccaaatggtaaatattttcacc

SEQ ID NO: 61862 - DNA, 1162 bp, Homo Sapiens
ccgctttttttttttttttttttttgaggagtctcgctctttcgcccaggccggagtgcagtggcgctatctcggctcactgcaacctccgcctcccgggttcacgcgattctcctgcctcagcctcctgagtagctgggattacaggcgcccgccaccgcgcccggctaattttttgtatttttagtagagacgcggtttcaccgtgttagccaggatggtctcgatctcctgacctcgtgatccgcctgcctcggcctcccaaagtgctgggattacaggtgtgagccaccgcgcccggccagtaacagcattttttaattcagacaccaggaaaaaaaaaaagtaaaagaggactttaaaggagagttaaaatgaggagaactgagataggtgcaatggtcattttctaccaaggaattttccttcacagttatctttagcagtagttttcaacccttttttcactatgacacatgtgagggtcattcacatacaaagcattctcatgtatatactcatttagcaacaaagtgaaaaaaattaaatggattagtaaagctccacaataattgacaatcactaccacactggtgtacgtactaatatttctatttcagtgactgacttctgtgaatttgttcacctcaagagagtagggcatgaaattcaggttattaaaaaaaaaaatctattcagcacagatactgaccaaaaggaaagaggctggtggaaaaaccaatacagccaacctcttgttaactggtggaataccagccctggacacaagacttccacagctacaggttacccaactcccagcaagctagttgtcatcagttctctcttcctcccaaacaaagtacatgaagatacaagagcatgaagcatacacagagacaaattctcccatttgaatatgctctatttcattaaaaaaggagattcaggaatttaattactttataatattacagtattcataacagtgttcttatgacactgtgacataacatcaacactgaggcagctaaactttccaaaaatcctttctgtgatattcatagctctgtgtaatatagcctgacctatttagccaaaatatatcttagttatttcttccactataacaagcaaacctattttaccattcctaaaaaaa

SEQ ID NO: 61863 - DNA, 546 bp, Homo Sapiens
  misc_feature (398)..(398): n is a, c, g, or t
  misc_feature (456)..(456): n is a, c, g, or t
  misc_feature (476)..(476): n is a, c, g, or t
  misc_feature (488)..(488): n is a, c, g, or t
  misc_feature (517)..(517): n is a, c, g, or t
  misc_feature (523)..(523): n is a, c, g, or t
  misc_feature (529)..(529): n is a, c, g, or t
  misc_feature (536)..(536): n is a, c, g, or t
aaaaagacggggtctcgctatgttgcccaggctggtctcaagctcctgggctcaagcgatctgcctgtctcagcctcccaaagtgctgagattataggcatgagccaccatgcccagccatgtaatcgctctatcaaactactacttactgtggaaagggacctctcaatataactgggaagctcatcttccctaaaattcccttgttcctactagccattagattttatttttctcctttactaacagcatttcctaggttctgcccatccttatagctttatagaactccaaaccacttgacctcttagaagtacagctctgttattgatattttgaaaatgatcagataaaatcagaagaagcaaaagcataatatagtccaaggtgtttcctgngtagtttcctaaactcagaacaacacaggaaagtttccctctcttcactaaaatccangccttcactctatcttgcanggaggaggacancctcagttggatagtaaaaaaagctttancttcantttggncccttancattagctaa

SEQ ID NO: 61864 - DNA, 1790 bp, Homo Sapiens
tggattcaacaaaaggagcaacaagcattgaaaagtatgatctccgtacaaatatgtggactccagtagcaaatatgaatgggaggaggctacagttcggtgttgcagtgctagatgacaaactgtatgtggttggaggaagagatggactgaagactttgaatactgtagagtgctacaaccccaaaacaaaaacttggagtgtgatgccacctatgtccacacatagacatggccttggtgtggctgtactggaaggtcccatgtatgccgtaggaggacatgatggctggagctatctgaacacagtggaaagatgggaccctcaggctcgccagtggaattttgttgccactatgtctacccctaggagtacagtaggtgtggcagtactaagtggaaaactttatgcagttggtggtcgtgatggaagttcttgtctcaaatcagtagaatgttttgatcctcatactaataagtggacactgtgtgcacagatgtcaaaaaggagaggtggcgtaggagtgacgacctggaatggactgctgtatgctataggggggcacgatgctcccgcatccaacttgacttccagactctcagactgtgtggaaagatatgatcccaaaacagacatgtggactgcagtagcatccatgagcatcagcagagatgcagtgggggtctgtttacttggtgataagttatatgctgttggggggtatgatggacaggcataccttaatactgtggaggcttatgatccccagacaaatgagtggacccaggtatggcattcatgtttcattattacactgactctctttttattaaaacaattcttatggtaaaacagatcccctcaatcttgtccaatactgaaatatatggcataaatatgacaatcacgttttgattagcgatgagaaaaagaggcaatgtttaattttataacataattaaaatccagaattacctttgagatgtaagttaatactcagagaaattattaattatctgctaccacttgcatgatgaagtgttctagcctgattaaagctgataggactactggagggctgcaacaatgggaggggagactggaaaataaaaacaaggatagtagtcagaaaactttgaacaacttgcccatgtgtgagcagtcggatttttaaatactcaacccattgatatctgggagcagattaaagtcctgataacctaatgaagatggcaaccctaaattacactgagtaagaaacctgatctggcagtcttactaacagaaagaatttcacccttgtgtatttctgggagggtctagcacttctaaaaatgatcttttgagatctttgcttccatcatcaccaagaacagaatcaggaatttgtgcttgtgtcacccagttcagtacttggtacataaaagacaataaatgtttaactgagccaagattttcttgtatacaaggagccatgataagtatggtcaagaaaacaaagcttctaggccaggcatggtggcttatgcctataatcccagcactttgggaggctgaggcgggcagatcacgaggtcaggagttcaagaccagcctgaccaatatggtgagaccccatctctactaaaaatacaaaaaaattagccgggcatggtggcacgtgcctgtaatcccagctactcggggggctgaggcaggagaatcgcttgaacccaggaggcagaggttgcagtgagcagagatcatgccactgcacttcagcctgggtgacagagtgagactccatctt

SEQ ID NO: 61865 - DNA, 506 bp, Homo Sapiens
  misc_feature (440)..(440): n is a, c, g, or t
  misc_feature (472)..(472): n is a, c, g, or t
  misc_feature (477)..(477): n is a, c, g, or t
  misc_feature (485)..(485): n is a, c, g, or t
  misc_feature (495)..(495): n is a, c, g, or t
tgcatttatttttcacaaacttcattcttcatttccttatgaatgaaaccttcatggtataaataccttaaaaaggtgtgttctttattctctctcacatacaaaagaagtgcaaaataaccccagtattaaagatgctactatggttacatgttatggattaaactgtattcccctaaaattcatatactgaagccctaatctcatgtgatagtacttggagatggaggcctctgggaggtaatcaaggttggatgagatcataagggaggggccctgggtccagttggactgggtgttcttatacaagaggagagacacagagcacctgctctccctctccctctgctcctcctacatttcccctcctatgagctgagggaaaggctgtgtgagggcacagcagggaaagcagtctgccaggccaggggtgtagggcnttcaccagaaaaatgttacaggcccaggaccnttaancttgggcnttttggcctncaggggctttt

SEQ ID NO: 61866 - DNA, 1525 bp, Homo Sapiens
acgaggagatgatgtcactgctctgttcaggatcttccagtggcttctcaccacactcagagtaaagagcaacactgcaaaggctgcctaggccctgtgagatctgcttccccctcccgccacctgacttcatttctatcgccaccactccctccaacccactccagccacgcatctttgctctcccctgaatatgccaagcaggctttgccttagggcatctgcacttgctctttcctctgtttggaatactcttgcctcagccacacaaagagcatgtttcctggtttccttaaggtttctgattaaaaatgtcagcttgtgaatgaaccctttctgccaacttatttcaaatagtaatgctgccattgctgggatcccatttccttctcacctggctttactgctccccctaacacgagcatttgatatgagagatgcttacttgtttattggttgattatctgtctccctcctccactctgctagaacataagctctatgtggatagggactatgtctgttgtgatcactcttgtattcctagaacctagaacagtgtctcatacataacagatgctcaataaatatttgttgaattgcatgttctccatgttcatcaggaaagttttcaagcctctcagatagggctgctggatttgattgtacaggggtgcactgcactctaggggtgcctttctcatcacagtccatgtgattgacaccccctggagttgtgcagtggacaacctgtacagacatgtgctattgccctggtgtcagtatctcagtagatttcaaaatcagggagttctgtgtaggaatttcaagactctggaagtataatacaacattgacaaattttcaagtaaataatttgatttcctcttcagggtaattcaagcagcatatgatgcagaaactactttttttctaccctccttgtctgtctaaatttcaaagatgtcaagtgtaagttgctcatttacctatgggatgctgtctgtaatgtagctgatggcagtatgtaatttgccaagaccttaagttcatgttcttaaattgctgctgggctccttaatagcagtgaattctttgcagaaattgtttgagtattttctaagttattaattttggcctgatttgcaaatataatctcagacaaattgtttattatcaatagtaatcattgtagtaacatagagcctactatatgccaggtacttttcgtgcattatctattccaataactctgtcaggtaaacatgattaagtcacccttatagatgtggatacaggttcaaaaatttaagtaactcacttgtgactaccaaactcatgaatggtggagaaggggcctcactccaggtaagtgtggctcccagccagcactatccattcccttctcgtaactgctcttactgaataaatcactgatgtggttaatttcaaaattcttaatagcttaataatattcatatgtaacaagattagcatgttgaggtccaaaaaaaaaaaaaaaaaa

SEQ ID NO: 61867 - DNA, 1992 bp, Homo Sapiens; identical to SEQ ID NO: 24418

SEQ ID NO: 61868 - DNA, 575 bp, Homo Sapiens
  misc_feature (438)..(438): n is a, c, g, or t
  misc_feature (441)..(441): n is a, c, g, or t
  misc_feature (462)..(462): n is a, c, g, or t
  misc_feature (476)..(476): n is a, c, g, or t
  misc_feature (551)..(551): n is a, c, g, or t
  misc_feature (558)..(558): n is a, c, g, or t
  misc_feature (565)..(565): n is a, c, g, or t
  misc_feature (569)..(569): n is a, c, g, or t
gaaattaacaaactaattttaaaaatcaacacctgactggggacctggtcatacaaacttcctttagatacagttgagaagaaaacatcacatttttatgaagcccctctcctgacaggggactggaggaggaacaccattatgcattgttatcagcgtggtgtaatttgactgttgacaaagtatccgtggcagtgcgaatgagcgcagttagaagtgtggcggattgtaatcaagaagatgcttagctgtgcaacactgcatctcgagcagatttgaatcaacattgccttaaggggacacacacacataccaaaagaaaaaaaatccattaatttttagagggaaaattagagtggcacttgatgaagtgaaatttgacatgcgttaattggtgtgcagctctcctaattagagattttcaaattcttttactgntgncaccatgaatggcacattgcnttgctggacaaatnctaaaattgcaaattggcttggtccggaagttttacgtttgaagataccctggatccttaagccattccaaaggngggccantggaaancaanatactt

SEQ ID NO: 61869 - DNA, 1661 bp, Homo Sapiens
aaaaaaaaaaaaaagaaatacaccatccaatcagaacaagtctgaaataaacatgttttaaaagcctgtaatgacagagaggtggcaaaaatgaagaggatgctcaaatgaaaaggaaaaagaagtttaggaagaactacctgaagccaagagacctcttactttgtccaggtgggaaactgaggcccagagagggaagaaagctggtcaaaggtcacacacccattggaagctgagtgagtgacactcaggaggtgaggattccatgggaagagcacctagaggtgattctcccacctgcagctcctgcatgggctctagaagctggtttaacacatgactcttctgagcctttgcctcatctgtgaaatggacacaatgacaactactacggggtggtggtgagcagaaggcaggttatcctctggcgtgtgagatactcagcccagtagagtgttagggactcataaaggcttgctattagaaattagggccccagtctcctaggacagggttttgttttgtttttgtttttgacacaaggccattgctctcctttaaaggtttgggttgtttgtggcagggatggggaaaggatctgcccttcccaggccctgccgtgcccagcacacctgccatgctgaatctcccctcaccctcgcagggaccctctgaggagggtattcccccattttgcaggggagggaattcaggctcagaagtgaacactccagaacttgcacctgcccgtgcctgccgagctgtgcctcttctgttgtgcatgcgttctccatcccaggtttccttagcctctgcatcttgaatcttcacggagtgccctcgggcttagcttctgacaggcctcatttcaggggttgtcctggcatcatgggatggcgatgccctcatttccccaagatgcagtggctcagacacattggtggatgtggccaaggtcactgtccacttggttcgatgctggctgtgcccctgctggccaagggaccttgaaccagctgcctcagttcaccaagctcccatttccttctccacaaatgggtgctggagtgatacccgcctcagggctgctgtggggttcatgtgagatcctgcctggcccagagggagcacatgggaagtggattactccatagtgttgtcggcgttatttgacaggagcgaacctcgggtcttccagcaggatctggtcatgttcccattgagcagaactagtctgaggctcagttctcccactctgtacctgggtggtcttggtcatcttaattggccctgcaggactacagtgtcttttttcataagatagtcataataaaggctcttttcttgggagatttttgtgaggaatagtaagatcaggcctgtaaaattttcatcgcagtgccctggcacatagacgacatccaataaatggaaactattatgttttgattgatgatacattcattccgatactttacaaagacgtactgaggcctgctatgtatcaggcacctttctaggcactttggatacatcagtgaacaaatgagatccaaatccctgaccttgaggaccttggccttgataaggggagacaggcagtcagtaggaaataagcatattaaatatatagtaggataggtggtaagtgccacagggtt

SEQ ID NO: 61870 - DNA, 561 bp, Homo Sapiens
  misc_feature (37)..(37): n is a, c, g, or t
  misc_feature (368)..(368): n is a, c, g, or t
  misc_feature (480)..(480): n is a, c, g, or t
  misc_feature (521)..(521): n is a, c, g, or t
  misc_feature (524)..(524): n is a, c, g, or t
  misc_feature (543)..(543): n is a, c, g, or t
  misc_feature (554)..(554): n is a, c, g, or t
aaagaaacatggtctcactctgttgcccaggctggantacagtggcacaattatagctcactgcagcctcaaactcctgggctcaagcaatcctcctgtctcagcctcctgagtagctggaactacaggtgtgtgctaccactcctggctaagaataccctttgtttggctggtcttaccttatagaaagagtaacagtaatagtacagtgctactccattatcaataggatatgtaactgtaggtttgtactacactagttttgcacaatcacctgtataatcactggcacatggctctaagactattgttgcgtcaagggatgaggtcaatcactaacactgtaaacagcaagtgaaacttaagtnacagaaaagaaagaactgatgcgaatgaaaattgctgaactctgctatatgataattctctagctctccactttagaaaagccagaatataaaccctcctggggatatgaanatgactttccattttgaatgatctctgaaatccttaatgcntcnggattatattaatttttcnccctgccaacntccccaa

SEQ ID NO: 61871 - DNA, 2106 bp, Homo Sapiens
ttttgtgatttacgttaaacagtttcagcattgagagtgagatgcttaagaattttaatttcatgtgagtgtgcagaaattataagaaactattaatttagagctggtcaccaaatgaaattttagaaccttcagtgctgctctttagtattttccatctcctacctttacactggaaatgaattttttaacttcgatctacaaaagtgcataaaaattcctctgtccatagagtttattttagatatttctctatgagtgactatacactagaatgtacatttgtatagaaaaagtaatttatataacttagaagaaagtcgtttttataacttatctatctctctctggtttttatttgtgtcacttctgcattgcccagtattttgagttgggggaaaaatgaactcacctggccccacctcctgttccagtgtgaaatactgacacttgctgccagcccagcctcctcacataagcattagaaatatcagacagtccactaggttagagcacctcattcatgaggttctgttatttattcggctctcccactaaaatgcagggcataaatttatgtgtctgctctaagactgcagctgtctgcccccccctccaccctcctcctgcccttcctgtgtcagtgttacattcgctccccccacttttggtctcaggtctgtctcctttttgtttttatgggtgatttgcagtgattcagacagggcatccttgcatgttggcacttcctggaggttaccaggaggcagccatccttccttggcttggccaggcatccccgactccaccccactttccccttggtggtggaaaggtgggttggaggtgtgtactggggcacatagcccaggaatgttgctctgagaagaggacatgtgcagtagacacaaaaatataaggaagcaattatgttcatcaagccgaaagttgcagattttgaggaaatgtgtttaagataccactacataataaaagggaaaaccacttggcatttaaataacttacttcaagaggaaattatgatattttcagtctacaaatagagtggtttttaagccaaccttgagtaggtacaagcaaattataaacagtctgctcaaatgattttactatacttagactagaaaatggctcctcttctctctccctctggtccctatgtcccagtgctgtccctcatatgttacaattgttcgtgtatgtattttagaatattcacaggtaaatgatgcaaataatatatatataatgttaaatcatcctcaaactgggtgtatatgactttaggtaaaacagttccttactttaattgtctgttgaaagctttctgatctttctgataatactatacattttagtatatgtggcattgcttttgagggggggaatagccattttaacaaaaaaacttgtcacctatacctactatatagggcattttgctatgctgtatattgaaggctatattgtaatgatagaaactttcttaagtttgtatgacttctagaaagctgctttcagagtgaaaatctcctaggtcatttgttgaaaggttacttagactggatgtgtaatgttttttcttacatctcatgattgaaaccatgggaattgtgattcagagagaagtactgaaagtgaatgtctataaggtatcatctgagaagggttctggaatttagggttttgttgttgttacagagatgggatcttgatacgttgttcaggctggtctccaactcctggtctcaagtgagcctcgcatagctaaaagtggtgaagcttggacatgaatactggcccttcacttctctgctatcctgcctctcatagtctgcctctctcatagtaaataaatacagattatacttattatcaggccaaaattgtgaccacagtgtgggacattgggacttggttgcattgctctaaccagcaagaagcttgggtatcagctttgagaattattcccttctgtgtcacctcttgaatcaaatgtgtaccagtggtgcagcctccctaaacggatacagtatttcttcattctgcttacatatgactctttaaaaaaaaaaaaaaaaaaaa

SEQ ID NO: 61872 - DNA, 1285 bp, Homo Sapiens
gtaaaatatgaaaatggtcaaccaaagaactaattatgtggacaatgtggatagtcttacttgcacaaattggctgtcttctagaacttgatatgctcatgattcttaaaaaagtgatacgtgaagatagccctgaaaggattgaaaagattctcgttgacagagtttcacaaacttctaaaagaagagtcaattggtaaaaaactaacacagatgaatcctcaaagatactactcatatggctgaaaaaatataaaaatatttattaggtacaaaagatttatgactatgactttgtgatccattataggtctagaattattcaggttatctcttagaacaacttatgcttcaaatttgagaggactttgacccaggagagcagcatataattttaaggaaagagttaaagtgaagttttatttctgataatatggcagggtaggatccataaataacctacatactacaatttaaaacgtaatatttaaagaactccttatgttgagacagtacaggagacaaagcctagtgctcactttacaagatgagaagtgtaataggagacccagttcctgtaattctgagaagacttaatgtacaggtaaactagaaataaaggtgtttactttctcagtcagtttcctggggatctgtaaggaaactcatacatccaaagcattagtgctgggtagagggaagggaaaaatgctgttaagaaataaccacatgtcagtctgcacagaaatttgcagcctgaattaatattttctgattttggctgacaaactcaaacgaaatttaaaggaccctaaatgttagtgcccccagacctcaggaagaggcaaacatatattccctcttcaggaaatcaccttcagccaggcatcaaataattcttccagctaaaattccaaaaggaaattttgctgttaaaaattattaaaagggccaggtgcagtgactcacaggagaaaattattagatcctagcaacaggtacctgtaatcccagcactctgggagaccgagacgggtggatcatgaggtcaggagatcgagaccatcctggctaatacggtgaaaccctgtctctactaaaaaaaaaaaaaaaaaaaaattagctgggcgtggtggcaggtgcatgtaatcccagctacttgggaggctgaagcaggaaaatggcatgtacctgggaggaggagcttgcagtgactgagattgcaccactgcactccagcctgggcgacagagtgagactcttatctcaaaaaaaaaaaaaaaaa

SEQ ID NO: 61873 - DNA, 2149 bp, Homo Sapiens
gagaaacaagttggatgacctaacatcctgttagagactggctggaagaggaacccagaagtagactgcactgtttgaccctcaccggtcggtcgtatgcagagtggttgtgttcttgagctgaggaatgccggccttgttgcctgtttggctttgattacagtatttgtagcagaatgttgctatggagattcatgccaggtacgcagtgggaggtgatctagaagaccgtgtgccagccactcgtaggtaatcactggcgctcagaacatgctgagacaagagttctcgttggtttatttccttccccagctgtgtgagttttcagatttcatcattggaaatgatgtcttacccaatgatacaaaagcagaggaaatgcctttgtagaatttcttccaagggaagaatgaaagtagagaggtgacttagcttagctttgttgtctctagaatacgttacagtgtgtcaagggaaggcttttcaaagtatttgtcaagggattgtgaggaacgtagtccattactttgtcaaagagtttatgtgaaaagtagatatttgaataatttcttatatttcaagcagcgttacagctaatgtttcttttaaatcaaaccttttatctccaaggttaactaatggcacctcgaggttacatctgcagcccagtgtctaggatagtagaggaacatagtgcaaattcatgtttgtcatcagagctgggtgtggtggctgacacctgtaaatccagctactccgaaggctgaggtgggaggatctcttgagccccatgagtttgagaccagcctgggcgacatagtgagaccctgtctaaaagaaaaaaaacaaaagtggtcaaacatgtttgccatcagacagtagttttcattaatgtgaacatgactgaggtcaagaagtttattcatgtacccagcctttgcggagcatctgtggtgtgccacttgggggatgtgaaaccagtaaaccacatagttttcatcatttaggatcatgcaggtgtacagggtacatgtgaaacagtagtgaggcccacacactggtggggggagatccagtaagcctttggaaggtggggggtcagcagggagtgtttcctggagaagatgaatgactcataagttatgattcagagaatgagttgagagttagccaggtaatgagggagaagggctcccaggcatatgggaggaacaaaggcacttagggaagaagccgggacagagtgtgtgtgcatacaggaatattataagtattgctggagggaccagggcagggtgtagtgggggctgaggcccaaaaggcagtcagggaccagatggcctcatatgccctgttaaggagcttgggcttgatcctctaggcagggagccgttggaggatttaagccagggagtgctgcggttggtcacactcgccatttatgtagatcgttttggcagccaggggaaggatggatttgagggggatgagattagaaagctgggatatgagttaggaggctgaaagatggttgataaaaatgatcgttgggcagccgagataactgacttcaaggacatatactggacttatagcagagcctgttgagtcttgcttttgcacacagttcaaataatcacttagtcatgtggtttatctgccagtggcaaatgttaagactgtggggaaaaactagaagaaccaataacatcatcaagaaataagtgataggaggcaaaagtcataaaagccgtacaaaaattggaaagttgactgttgaagcatcgtggttaagacaggatttgggttgctaggaaactttggggcaagtatttaaccttcctaagtgtcagtttcctcctctttaaaatgggagttagtaataccatccttattgagttattctgaggattaaataagatgatgcgtataaactattttacaccatgcctggcaagaaaacccagtaagtggaagctgttactgtgaatacattttgtggccttttgattagggtagtgttttccttagatctctaattttgtggatgttaattgtattataattacattaaaaagagttccatggtaaatcaatttgggaattaaagaggggtttgtttttttgagacagagcgagactccgtctc

SEQ ID NO: 61874 - DNA, 2224 bp, Homo Sapiens
atcagggattgccctgcaaactgggggcattgtgggaatatccaagtctctggctccaaagaaagaggtggagtgtgcatcctcctcctcaacctttagaggctggtaaagagtggccttgatgattttcagtggagattctttctcctctgtgggatggaaaatagaggattttacagaggggcttaagagtggataaagtgggtgactgttatccatgggtctcaattatttctgagccctggtttgctgcccgtgtgttataacaatgggaattatccagtgctttgtgacacagtagagatccatatgcctacatgtgcatcttagtcatttaaaattgaactctttggatgatttcagttttcactttttgtggcttgtgtttcggtatcacaggaaagtgcctcactccctttcggtattctaccagcatttcattctctgcctcagaagctcccttgccttctgtggcttgaacagcatcttcctctgttggcgtttgtttcaccaaacttactgtgaggccactttattcattttgtcccatggctgcatgacagctaaccctcactctccatgtttacgcttatcacaggtttgaatattggcagcggtgcattcgagacaaagacagctaacaaaattgcttcggaagctagtttttcatctagtgaaggaagtcctttgtcaaggtaaagttgtgaaagcctttctgaatagcagcaacaagatgagaaatgtcacagcgcaatgaattaaactctggctgcgtattattttgttgtatgacttggagggttatggtttgggtttttgtttatctaaaataacagttgaaactttagtctacctttgaaaatatttgcaccagagccaagtattgttttgcagctgttgtttccttggtttaagactcaattgacacctcagtgaaccacaaattagcgtctacagctgctcgcagtaggactgcttagagaccacacaatggaggttgtcagaaaaagggcagagagaaaacatcaggccttaaaagaaataaagtggcatgtttcttctttttgtgacggctaatatataaactagtaattgctggatattcatttttattttcctctttttttttaaccaagtgtttaggctaggttattctttccttttctaatactttcttgcttattttccataaagaacaaaatttatcttttcacatttgtcaaactgtagcactcgcttcttgtaggttttttgagctgtgataagagagttgtgtgctgaatttgtcattaacataaaatactaatcacagtagcttcaggtcacttagaatttatagatgggaatataagccatcacctgatgaaataccctactcttttgctttgagctaaatattgtttaaaatggcatagcaactttccttttggaacagcattgctcagtaaaaaggtgtccttcagatgattatattacatttgaattaactgcttgtctctgatgaaattttagaacaggaactttacatttctagtataacatataatgttccataagagaaaatgatttgaaccagaaatgctgaattttttaaatgaaaaaaatcctatttttattcatattttataaacaatacaatgtttttagaacctggagtatattaaaatgagattgaatttctaaaattataagttttagaaacttgacaagttaagttttagagaaataactcatttaattttcagaagttattatttttaatgcctgagttttcgtccatatttttgaaggaagtgggaggtaaatgggacaggaagagtgttaaagtattatgttattatgattgtattataaattcaagttctaggtctcctaaaagaaagtttaaaagacagtaaattctacagataattttcagggccgaatgttaccatttggcttaataatatatagaggcactaaaaaactcacttcttcctaaacagtctttacgtaggttctttgggaaatttttaaagacattgagaaagcaattggattttgtaaaacatttctcagtctaataatttcacatcttgtctatattttactaaactaaaatcaagcattttcctccttcaaattgagacagaggtattttgttattagtatcgtttccgtatgaaattaatttcctaataaattacaagtaatctcatcatcccctttaagaaaaaaaaaaaaa

SEQ ID NO: 61875 - DNA, 1688 bp, Homo Sapiens
cttctttcttaaacatgcagccacaaatcttttccctttttcccctcccccagtggtagaaagttttgagttgcaattgactgaatttgaagatattaataaggctagagaggtgaagagcaggaagaaacagcatgtcttccttgcctttttgtactaatagtaacaaaaggccaaggaaaaagactgtaaatgaccatagggttgttaaatagacccatcttgaaagtgtagcacctttattttctttgtatcttcattctccctcctttacggctttctagcatgcaggtgtctagtgcacagaaccacaccctggatcttagtgagcaagcatgctaacctgcttctcagacttgatacaccagaacagggatttccctgcaagtgtctccctcatgctgaagtgaactagctgaatatgctcttaaagaaagtagtcagaaaagaaaaaaaagattatcttctccaaaatttgagaccaagtagctgtaaaaaacataataaacccagatgaaaaccaggcttcgttttcttgaaatgattttcttcatcagaatggtagatcagagccattggtgtgcagattccaatcctttaaaaagtaaacacatgccttttgataaaggggaattgaggtgatcagaaattctgttgagaacccagctatttgtgtgagtatattttagctatcccaaaaactttttctgacctttctctttctgggataggatatgtgtgcttagagtaacattcagaagggtacctaatagttaatctgttaattagttacatcaggtttcaaatactaggtcagtgatatgagagcgagagagagagatttgaattgtcaaatgtattgtcagatgcattcacaagagcaggactgctttatctgttttgttcactactgtacccctagcatctaaatgaatacctagcccatagaataaacccactggttatttgttgtaagaataaattaatagaatcttaaagttgaaacagagtgattcctaatatattgtaaccacatggttggattcagtagttccattttaggatgtcccttttctcaggagtcatagggcaaattcttattgcccactgtgtctttttaaagtttaaatgttttttaaaattaaacatgtttcttagtaaatattgaaggggtataaaagaacatttatagcagatatgtaaggagtaaataaaatacagcaaatatccatgtacctaccattcactttaagaaaaagttaaaattttcttttataaaaggtttaaaagttttaaaaagttaaaatctttaaaaatcttctccctgctctcctcagaggtaaaagttattctgattgttttttatcgtttgtcattcttttgtttttttcaagtagttttagcagacatatgtatcttcaagcaatacattgtccagttttgtgtttttgaaccttgtgtatatgaaatcaaagtatgtcatattttatgttgtagctttcaccgggttctgtttttgagattcaattatgctttgtcctgccaaaatctatgtttcaactgccatgtatgtggtattctattgtatgaatatgattaatatgttataattaaatgttcttgatgaacatttggattgtaaaaaaaaaaaaaaaaaaaaaaaaaaaaaaaaaaaaaaaaaaaaaaaa

SEQ ID NO: 61876 - DNA, 544 bp, Homo Sapiens
  misc_feature (465)..(465): n is a, c, g, or t
  misc_feature (476)..(476): n is a, c, g, or t
  misc_feature (484)..(484): n is a, c, g, or t
  misc_feature (487)..(487): n is a, c, g, or t
  misc_feature (518)..(518): n is a, c, g, or t
  misc_feature (540)..(540): n is a, c, g, or t
gagatggagtttttagctctttttgcccaggctggagtgcaatggcgtgatctcgtctcaccgcaacctgcctcccgggttcaagtgattctcctgcctccgcctcctgagtagccgggattacaggcatgcgccaccacaccaggctaattttgtattttttttagtagagacggggtttcttcacattggtcaggctggtctcgagctcccaacctcaggtgatccgcccgcctcagcctcccaaagtgctgggattacaggtgtgagccccacacccagcctaaaaaatgtttttcatattatattccaggtaatcccagacctctatggggtaaatctggggatttcttggaagaaagtgcactcatggagggtctgtccacttggctcactccaacagtttgaatttggaattctgcttttcttcatgaagcacaagtcttataagcccacacctacggncttgagtctgnactcttancangtgggaactgggactgggggttggctaacangggggccactgggcaaattggntttt

SEQ ID NO: 61877 - DNA, 589 bp, Homo Sapiens
  misc_feature (507)..(507): n is a, c, g, or t
  misc_feature (545)..(545): n is a, c, g, or t
  misc_feature (551)..(551): n is a, c, g, or t
  misc_feature (553)..(553): n is a, c, g, or t
  misc_feature (560)..(560): n is a, c, g, or t
  misc_feature (570)..(570): n is a, c, g, or t
  misc_feature (584)..(584): n is a, c, g, or t
gagatggagtttcactcttgttgcccaggctggagtgcaatggcgcgatctcagctcactacaacctttgcctcccgggttcaagcgattctcctgcctcggcctcccgagtagctgggatcgcaggcatgcaccaccacacccggctaattttgtattttcagtagagacggagtttctccatatttgtcaggctgatctcgaactcccgacctcaggtgatgtgcctgcctcagcctcccaaagtgccgggattacaggcatgagccactgtgcctggccaggtgaactattaaataatagaaagcacctgcaccatcttctgtctgcttgaattttctttacatttacaaaaatatttttgatataagaaaacaaaaaatttaacacaatagaaatatagtcaaacgatagaattcctcgacatataccaattttatggtaaaaaaaaaaaaaagcaatgttaacaactggttctacaaatgtttaaaacttcatataggccangtttggcagctcatacttagaatctcagaacttttganaggctnangtgggangatcactggnaactgggagttaangacca

SEQ ID NO: 61878 - DNA, 549 bp, Homo Sapiens
  misc_feature (381)..(381): n is a, c, g, or t
  misc_feature (434)..(434): n is a, c, g, or t
  misc_feature (462)..(462): n is a, c, g, or t
  misc_feature (499)..(499): n is a, c, g, or t
  misc_feature (514)..(515): n is a, c, g, or t
  misc_feature (518)..(518): n is a, c, g, or t
  misc_feature (527)..(527): n is a, c, g, or t
  misc_feature (541)..(541): n is a, c, g, or t
agtttcaagatgtttattttgaaaaacgtgcttgtttatatgtaagcatcttcgtatctagcagctaatcagtattaattcttcattgtcatatcttgtatgttaacggtacttagttgataccaattctcttttggacctcatgcccaatactttttttttttttaatttccaacttttatttaaagttctggggtacatgtgcaggaagtgcaggtttgctacataggcaaatgtgtgccatggtggtttgctccacccatcacctaggtattaagcccagcatttattaggtattcttcctgatgctctccctcccctcttcccctcaacaggccccagtgtgtgttgttcccccatgtgcccatgtgttttctttgnttaagttcctacctataagtgagaacatgcggtgtttggttttctggtgctgngttaagtttgctgaggataacgagctanccatatttcaagggctcaatactatggtttgcttaangctaacttaatgggnnagngcttaaatngacatttcatcaangcaaaagt

SEQ ID NO: 61879 - DNA, 502 bp, Homo Sapiens
  misc_feature (7)..(7): n is a, c, g, or t
  misc_feature (165)..(165): n is a, c, g, or t
  misc_feature (298)..(298): n is a, c, g, or t
  misc_feature (318)..(318): n is a, c, g, or t
  misc_feature (427)..(427): n is a, c, g, or t
  misc_feature (453)..(453): n is a, c, g, or t
  misc_feature (476)..(476): n is a, c, g, or t
  misc_feature (479)..(479): n is a, c, g, or t
  misc_feature (496)..(496): n is a, c, g, or t
cttgaanatgttatttcggtaaaactgaagctctttgatgctttcactaatgtcatcaagtgccctatgagaagcagccttctttggtgcaaattcatattcttctggataccagcgtctgcacagttctttaacagtgctcacatcaattattctataatgaanatgtttcatgaactggggcatgtatttgtcaagaaacttcttatcttcatgaactgaatttcctagaaagacacgaagcatactgcatctctatatttctagtattatacaacaggatatcaaaattcataanttgtatttgaaatggagatnattttttaaaattcaaacaattcctaaaagccctctatatttctaaatcaggtttgggtaaatgtgattagcttacaagtacagatttccaagtacttagtccgtttancctccttataaatttgttaatgaccnccctgaacagaaaggacaatctntcntccccatgccttgaatnttatgc

SEQ ID NO: 61880 - DNA, 2094 bp, Homo Sapiens
gtgctacagtgacagaggcaaatagttgcagcagagactataggacctccaaaatgtcaaccatttaccatctggccctttagagaagtctgctgacccttggcccagggctacagttttctcatctataaagtgaagttcaggtttttttcatctttgacatttgagactatctataagccatatatttttattataaaactgccagagagaaggtttggtttgtatatataggtgtacattgtttgtaagcttttaggcgaatgtattttatgactctgttttgtcttagctggctacggtccttgaaaatattcttcagaatgactgaattgcatcacgggatgaaagagccacggggtctcacagctgagttctcagggactttgctgatgtgcttcctttcttggtgtccttggaatgacacccagcaggtgtcccagggtggattgtggggctcagcctgtgaggatattgagagctgggtttttgtccaggccctggctggcagctgggaatgaaggcagtgatcgaaggcagaccaagcatagtctcctttccatccccagtgacttcgtaaggaggtgagagaaaagggccccggttgttacatggggtcctttagctcctgttaagaatcagacagttggccgggcgtggtggctcacgcctgtaatctcagcactttgggaggctgaggcgggcagatcacgaggtcaggagatcgagaccatcctggctaacacggtgaaaccccgtctctactaaaaatacaaaaaattagctgggcgtggtggtgcatgcctgtaatcccagctattcaggaggctgaggcgggagaatggtatgaaccagggaggcggaacttgcagtgagccaagatcatgccactgcactccagcctgggtgacagagtgagactccgtcaaaaaaaaaaaaaaaaagaatcagaccgttgtagggagtattttgccttcacataccagacatgagacatgagagcagccttcctcctaggcttctgagaagagggcctgcttagcccaaagagagctgacaccacaaaaagctcccctgaagtgaatccacttaaaacggggaccaaaatttcatatgtggtggacactgggggataggggaaacctgaatggaactttaatcatgaaaatggaacaaaatgacaaaagcatgttcataattttaaagatatattaattctgacaaggaaattaagttgtttttgaagtgaaactgattttgtatcttacaataattttctcatttgatttttgcaacgtgatcatagaaggaagttttgcaaaaatatttgagggcttcatcagttttcagaaggcctcttgatattttgatattcacattcttttttataagtatctatcggtgatcacctcctcaactttccttttattgttaactggtctgagtctgtcacccacacttttcagagcttttgcttaaggtttgagcagttttctagcattatttatcaacttcatcaaatccaccaccatttgcaagatttgtgattattgcaattaagttgcattctatttgtgtcatttgtcatatgcttacagtataaccatagagactaacagaagaccagaatacagtgggcaggataaatacattggcttcaggtacttaagaagcaaagagggactaactttttataaatagctcattagtgaatgttttcacattgggatgactttcacttctctatataatttggtagctgcaaggacttggttaatgaatatgcaaataataaagacccccttttatttataatgcagatatgttttaataatgtacatgccctttgaacttagcatttacacttctcagaagtcttcagcctgagcaacatagctggggactcttgactctacattagccaggtgtggtggtgcatgccttgtagtcccagctgcttgggaggctgaggtgggaggatctcttgagcccaggagttcaaggctgcagtgagtcatggttgtgccactgcattccagcctgggtgacatagtgagaccctgtctcataaaaaaaaaaaaaaaaaaaaaaaaa

SEQ ID NO: 61881 - DNA, 2398 bp, Homo Sapiens
ttaaccaattttcagcaaatggttattaatgtttactttcagaaccacacgcacagcatgtgcagctggtgactctgcgtgggccacctgctacctagtgctttttcaatcatgcctgattacaacgacgagggagaaaaacaccagatagctcagcctgatatgttttttatcattcagtctgcttttgggcagaggagttcaaaccacgagtgtcagcagtgtgtaagacagcgtggggctcgggccacctgccgcagtggacccctggcttagtttccatgtgctatcttagcatggcagaaagcggattccaaccagccacagcaggtgacaggagctgaagctcagcccttcctgaaagcaacccatgccctcgaggatgctgacggtgatctgagtacattttccagctcccttgttctgtgtaaataaatgtttaagaagaaataagcactagcagcgatccctagcactttatgaagaccaggatactgatactcccttcccgttggatggcacaccacagtttgtttgcatttcatttgctatttataacaatagaggaagaaagacaaaatgtttttgtttttgttttaacacgtgaagaacatgagatcggaagaggtaaagttaatttcccagaattatctatgctaagccttgaaaagccatgtttattacagatcagatatttactctaaaacaaaagtgtagaatagcagaaaaacaatggacttagaggtcaaaaggctataattttgtccacatacatctctatgatcccaagccagtcatttactttctctgagcctgatattctcatccataaagtggaaccacctgtcttttgcatagtcaaggaggcagtgcccatggaggagcactgagttataaagggctaactcctgtgagggatgactcccgtcatggtgaccagttatcctctcctctgaattttgttcttcagaggccaacttgaaagagtttgaagcctgaggttggatttataggcactagaatacatcagcttcaaacattcacaaatcaggaactgatttcatctcctcttgaaacctatcatctgttagctaaaatagctctggttgcttttattccagataataacacttaaagttttaatgagagatgagcatgttcattaaaaaacaagtcaaatgaaactaaaaaaaaaaaatcatttacttggaaatccattcctgtaatgaagtcatactattgtgtagacaacagtggaatgattaggtctggttttaaaaaaagagttgtcaccagcaccctatgtagaaagactttttttcaatttccatgagagttgtgttcacttgcaaattggttgtgaggcagccaggtgggagggggtccccggaaaaattccaaccagactgcgccctgggaagggtgtgcactggggtggagccacagaagtgcgaaccctttgcagtggggaggagcctggcccctcctcttcctgggtggagctggggattcaagctgcgaggcagtaagcacactagatgaactctggccttgaggagtccctgtttcccttttttccttttcacccaataaaaccctgctttactcacccttcaaaccatctgccagcttgaattttcatggctgtgggacggacaaggaccccgtctttagctgaactaaggaaaagtcctgcggcagttgtgtgaggttattaacacaagctacacagaaacacatgttatccacgttaggccagcctctccatgcctatttgatggaagtgcaggcaaaatgtaagaagaataactctgctgtgttttggattaaaaggatttttgtggactagcatgattatttatttactgtacctataggcaaatgtattcatgaatggtagctcaaaatgttgcaagtagacatcagctgttttcagaacagctcagagagatgccaccctgccaatgagaagaagcttaggaagggggagccctctgcagctgctccgggtacttggcacatggccagaagggatcccacaccctgcatctgccatggcctctcaaagaaagagaagaaaatgtttcacccatgcatcgaacatgcctctatacaggacagtcataatttgggtgtttataggtcagggatgactgtgatgcatttcctaacttttattctctgctgtagctatgtaagatggggagtctttagctatatgccctaaaacacagaaataacctgaccccaggcctgttactgtggcagcttggttggcctttagaggttaacattcaaatcctcaaaaggaagaaactcgtatgagagaataacatcttcagatactgaggcagaaagaatattaaagcatatggattcagaaaaaaaaaaaaaaaaa

SEQ ID NO: 61882 - DNA, 1922 bp, Homo Sapiens
caatgggcatcgtgtgatgtaggaagaaagggttctggggtctgaggctggagagacataggcatttgtaagaagaaaatccctccatcatagaggattccaggtagaggcaggttggctggagtggcaattagtccctggttttggcaggtatgaccacagagttctcctctcttgcaagggaacccatgagcttggacagagaggaagttctgttctttcacagggacctgcctggcatgcagttgaggtcagagggagtaaggctagtcctagtacaggtcccattttttccccctaaagccaggcagtacctaaaacttccagttccctgccaccccctccaccccacccccacccccatggtatagttttgactgaacaggaaaaaactagttggctaggctcaggtgtgcaaaataatactgggagaggtgttagtagccagaacacagggctccaccttttgttggaatcgccttcatatgtatatctaagaagatggagacttaatttttaaatctcacactcagttaactccattattgcccaaacgctatcttcctcttttgttgtaaagtagagaaagagggttttccccacatctccccttagtcctgcttagaagatggctgtgggatttgtgcttctttactgtagacagatcatgtcatctggacagcttcttcctaacaataaaaataatattaataataaaccactgtaatagataataaataacaaacttatcatgtgctaggttctgtgctaagccttttcctgggttccttaagaactaggatttgattcatgatcagaacccatggctctttgcctctgtgcttgcctgtgtgcatgtggtcctcatggcggaacacaagaaccacccacaacacccagcaagcaggcccaggatgcttgggtcctgagcccagacccactgtgaatgaattagggcctactgagagatttcctaggattggggaatccgaatgagtgaaaagcatcccgggagatgcttgactaggggctgactgctgctggttctgatgcccaccactagccctttctcttcccatgtgatccttctcctggctgatggtggtcctgctcccgtggcacttgatcagtccttccaccccttagtaatcatcttcccttctctgggctatgggtggttctccccactggccctggtgtttttccacactcactttaaactgtctggagctggtctgctttctttcatgtcagcgggtatgtatctttccaaccaaagagaaaacttctggaaggcagcaacagtcatttgccctgcctcctaacagtctccactttgtccgtgtctgtctctttccctcccttcctctccttttcccttttccttctccacctcagcacacagtgggagcttcctgttccttatttctcaagttgtcctgagcaaatcttcctcttaaggaatccttagtgcctgtccttgaggtgcccagcactggctgtgggcagcagcccttcaccccggccatggcctgccccgcccttcatggctgccccttttatggaagtgttgctggtttccaaagctccatctgctttggtggcttttagcttacttgctttgatgcaaaattggtagcacataacacaaagctcctgtaagcaacctgctagcccctttctccaagagtccagttatacataggaattggtaaaccaggctgttggaaacgttgacttctttttctgtagtttttttctggggcatctagagagaatgccttatttttctttccacacataaccacaaaaaagttaaaagcactttttaaaagacactttcccctcaattacctgtggtaagaaatgctgttcttatattacattccttcctcacccatttaaaaaaaaaaaaaaaaaaa

SEQ ID NO: 61883 - DNA, 476 bp, Homo Sapiens
acataataaagtttttatttagtccatacaaattacatctctgattatgaatggaagacaatagaaacattcttgaagatgtcaattacattaatttttgaggatatatacaacaagaggtcttcaataaacccagaaatgcagacagcactgatatttacatacccatacatagcatcatttgtgatttagcatgctattattgttttctgctcctaggcattctagaaaggttattttcatgtctggatttctgatttagtttcaagatgtaaaaatcctacatagtcagacaacctgctttggctatatcatcagaaatgggcttaaaagcaaaaatgacattccagttattccacacacaaatccctggatggttaacatccctagcctaaaaatagccatttgggaaggaaagccctatttcaaagccaaaggaaatgtgagtaagacaatatctggtcctggaaatggtc

SEQ ID NO: 61884 - DNA, 479 bp, Homo Sapiens
ttttttttgggtaacataagacatttattactttatactaattttttcattcataaaaaggacaaagcacagtcctatactactccattgaaaaaatgataaaaaataactaaaaaatcaattcaatatttatcagtatcaaataaaactactatcacctttcctgaaatacaaagaaacaacagatgtatctatacctatataaagtttaattcagaaatcttgcgtcttaaagcagatgattattagttagcttgacaacagtttaaaactgatggtcccagttaaatctgtacaactgtatgagaaaatgaaaagcttgagttatcagtgtacgagagattttaaactactttatctctgtcagaagttcaaaactaaacaacctccaaagtctgttttcctcttacctttcagaaccatttcatgcaaaatctaaccagttttgctcgttattatcatatattagaaaataaaag

SEQ ID NO: 61885 - DNA, 447 bp, Homo Sapiens
aaaaaggaaaagcttaaggacatttaataatgtagaagtgttccgatatagataaacatctttccagaatctcaggtaaagaacatcttggctgaactgacaacgaatctttttgagacacaacgtttctgttcccaaaatgattacatcgacaacaggtgcaggagggtagaacaaagaaagaaccgcggagattacattacaaagatatatgtttaaatgagatttgtaaacttaatttgtttgcaactccgggtgcaaagaagagaataattatttttctctatactgtagttaattgaacttaagtacaactgtggaaagtatatttaaaagttagacagattttacaattttaagtttgatccaagtgttttccagtttgactaatccataactgggttaacacacatagcaagtttccttaagggcaaatggaaaatgctg

SEQ ID NO: 61886 - DNA, 626 bp, Homo Sapiens
  misc_feature (578)..(578): n is a, c, g, or t
  misc_feature (592)..(592): n is a, c, g, or t
  misc_feature (600)..(600): n is a, c, g, or t
tgagaattatttaattttattaaaaatctccaatttataaccaaaatatacaaccactacatttaaaatcagtttgtacactcacagttaaagtgctaagaaaaaacatttacaaaaactgacatcagtctactgtaaacaaaataaatctacaagagcagagtcgcaaagccatcagagaatgtgaaattcccagttcatgctctaaccaagtgcacttgccctgtacatcccaacaacagcaacttttccactcatttggaagtgaacaattttaataaacatataaaaaagaaacatgaagaactaatgccacaaaatacaagtctttagcataaacactttctaattagatgtttatatgataaatcaacattaagacatttagaatcacctcagcaatttgattcagaataaagtttggaaaactaaactgctaagtgccagctatttaaaaatgacatattttttagaataatgaaaaggaatactttttctacctttatagatcttgaaaaattggtaacagtaaaatgggggaaagactttttttttttaacaggctgggatggtattcntatggtaagggagnatccatgngaagagctggaagccgacctggctgt

SEQ ID NO: 61887 - DNA, 89807 bp, Homo Sapiens
aaggcagtgaaactactctgtatgatatactacaatggtggacacatgtccctacacatttgcccaaacccagagaatgtacaacaccaagagtgaattccaatgtaaactgtggactttgggtgatgatgacatgtcagtgtaggttcatcaactgtaacaaatgcaccactctggtgggggatgttaatagttggggaggctgtgcatgtgtgtggcaggggccatatgggaaatctctattttccaccccattttgctgtgaacctaaaactgctctaaaaaaataaaatcttttttaaaaagttaacccaaaagtatatggttttattgccctaaagaaagttaaccaggcatattgtacctaacttagctattttagagaatccttttctcttcaagtatttaaatcctgttcctcaaatacactctgaactaggtctcattgctgccaccaacggttcactcattttaggagttaaatgagggggagttaattgagttttattggaaaacggccacactcagtcgttttcatatcatctatggctgcttttgtagcagaatggaatagttgtgacacagactaaatggtctgaaaaacctaaaatatttgctatctgggcctttccaaaaaagtttgtaaactccgggccaaataaaactttgacacttgctcgaatctggtatgaaaattttgcttgtagcatcagttaacatcagcagatgatatgataccaaaaagtacttggtatcatcagttaacatcagcagatgatacgataccaaaaagtacttggtatcagttgcttttggtaaaagcaattctacagagggccaaaatactttagctaaaaaccactgattcagaatctctaaggctgggacccagaaatctgggttttaacatagtctctgagggactcttatgcatactccagttggagaatcgctggagcccactggcctagcccagtggtggatgtacagattctgactcagaaagtctgaagtgcagcccaagattctgcttttctcacaagctcccacatgatggcgatgttgctggtctgagggccttagtttcctcacctgcgtaatggagatgataaaaatctatttcatagggttgttgtgggtagtaaatgaagtcataatgtccatttatatcctgcccccacccctttcaagctatgtctattggggcaagttaccgaatgtcttggttcctataagtggagctaaataatattgcccacatcacaaggttgctggaaggagcaaatgagataataaacataaagtacctagaacagagcctggaacactgtaaaggctcaataatgtaagatactattattactattatcattatcgttacatagggtgtctgatcatagcagatattccatcagtgttagtttcctccctactccctctcctatccatcctctcatccctacccctccctctagtgtcttctgttgatttcttttttatttttgtttagagatgctgtctcactctgttgcccaggctggcatacagtggtgcaatcatagctcactgcagcctcaaactcttgggctcaagcgatcctctcaccttagcctctggagtggctgtggctacaggtgcacattaccacaactggctaattttaaaaagtgttttgtagagatggagtctcgctatgttgcccaggctggtcttgaactcctggcctcaagtgattctctggctttggcctcccaaagggatgggactatgggcacaagccactgcacccagccctccttctgttgatttctaatgtgtctaattagataacttctataggaatgctgattcagaaatacctgaacccaggtggccctacctgacagtccagaggtgccacacaaacagggacccaaaatgagcttggacattgactgtgctgcccaggcccctctgcccaccccctctcaggcaggcttttggtagagagtttgggagaacaagggaaagtgggcttgccagtccttcccacctcaggggagcaccatttccagggctgcctgaacattcttactctgcagcacattaatctacgtggcaccaagtttatttttctgagaagattatttgggacaatatatggaaaatctgagaagtcatttctctttggcagcactgccctccataacaaagcacatattcctgaagggcatctggattttgtttcaggtttctttttgcttcctcagggtttaagtgctgccaggaatggccttctaagaattgcttagcaaaccttaatctccagactcagggtggtggggataatcacattttttgcccgaaatgaccaaattgaaaccatccccacagggttgacaagaatggcatgctgggttctggacagaaatatagttataattaagaatgaatcagccgggcgcggtggctcacgcctgtaatcctagcactttgggaggccaaggccggcagagtgcctgagctcaggagttcgagaccagcctaggcaacacggtgaaaccccatctctgctaaaatacaaaagaaattagctgggcatggcagcatgtgcctgtagtcccagctactcgggaggctgaggcaggagaaatgcttgaacctgggaggcagaggttgcagtgagccgagatcgtgccactgcactccagcctggggcgacagagcaagactccgtatctacaaaaaaaaaaagaactaatcagacaggcacggtagctcacacgtctaatcccagcactttgggaggccaaggtgggtggatcgcttgagttcaggagttcgagaccagcctggccaacacggtaaaacctggtctctactaaaaatacaaaaattagccaggcttggtggcatgtgtctgtaatccttgctattcaggaggcagaggcatgagaatcacttgaacctaggaggcagaggttgcattgagccagtattgtgccactacactccagcctacctgggcaacagaatgagactctgtcttaaaaaaaaaaaaaaaaagaactaatcaggccacaattcagcacacttccttgttgccaaaagtcactagatcctgaccatttgcatccccattgttcctaaagataggatttctgacattaagattataatgatggagacaggaggcagagaaattctaggcagacaggggcaggtccctggcaaagtcccatcctcaagccaaaaagcctgagactgcagcccaaagtgagaacttacatccctgttctcccgctcaaatgttgccttttccaaaaccacccatggcccgccctgccccctatcctgtgcttataaaaaccccagactcagccggcaaaaaggagaagcagctggacatcagagactatggctcaacgtctgagagaagtggcttgacttcagagagacagcttgacagcataacttcagagaagaatctggccagagacagccggacttcaggggaagattaccttcccaccccatccccttttcagctccccttcctgctgagggccacttttatcagcgataaaatcctgtttttaccatctttcaattccttcgtccaaactcatttctcctggatgccaaacaagagcctaggagccacaagtgcagatgcaaaaggctgtcacactggccctttgccctcactggtggaagacagctccctcacatgaaaaggcagagggaggctctgcagagctgctaacacttaagctgtctgcaaatggcagagctaaaagaccactgtaacactccctctggggcttcaggggttgcaggaaccccaccagatactgccttgggggcatgcatggagtttgctcctgctggtgctcaaaagtgctcacctggctcctgcacctgctcacctgtgtgctccctcccataaggggtggagagcagtgagtccgaatgagtggagttcactcctgctggtgacgaagtggccagctgattccagtggttgtgtactccagttcctgccttatttgctcatgcgctccctcccgcaaggagttgagagctgtgggctgagtaaatggggcacccctattgcgagtcctgcaaagcggtcagggaaatatcctacttcaataagactgtttaaaaatggatttgcatccctgttgttcctatagagatgatctctgacggaatcataaggcttttgtttaaggattgcttaagatgttctcagatccaaatttcagcgaccagtttggagaccctcacagaagaacgggatgagcataagaacacagcttcttcatctccctgtcccatgacttcaccctgtgctcttcgaccagtgaacactctccacacttgggcccactccaaaaccctaaagactgtagccccaaactcctcagacagatggatttaagattccctcccatctcctcctttggtgaccctataggtaaatgctttatctgctaaaacccagtgtctctggcactggtcatggagtgccttctcacaagagcaaaattgagtgtaaggtacattttcttccacaagccaggtattccataagcaccaccagcatcagcagatccagctacagattcagtgactatgatcaactccacagaccatcagcttgctttgttgagaggattctgtcctaataaacacactgctaagactaacattcccaatccacaggacctagaataaaagaaaattcaggctacttagagaataggtaaatgaaagatgaaaaagggagggacaatcaacagtattgagcacctgtgctttgccaagcaccatactacttgggatcatgtagcccttcatgaaaatttgtgataaatgttttaccatcatcctttccttccttctttccctgggctattccttcctcccttccttcttccctgagtaagtcagtcaaaaaggcatttgataacctcccctcccctccccttcaagggagaagaggctattacagcagaggaagaggaaggggctggaaagccaaagaagcaactagcatgctaggaaggtgagtcacatacaggggaactgagggtggaaaaaagaaagaaaggacagaggctgctcctttagcctggatcccagagccaattcacaggagcagcagcatgtaacatgagtaaaaattaacctttgtgggggcaagccactgagatttcatggtcatttgtgtgaaaggaaaatgaatcttggggccccaaaatcactaagctaaagggaaaagtcaagctgggaactgcttaggacaaacctgactcccttctattcaagtcatccctctgctcactgagataaatgtatatctgattgcctcctttagaaagggtaatcagaagctcaaaagaatgctagcatttgtttcttatctacctaagacctggaagccccctcccaacttcgagatgtcccacctttccagaccaaaccaatgttcatcttacatatgttgatggatgtttcatatctccctaaaatgtacaaaaccaagctgtgctctgaccaccttgggcacatgtcgtcaagacctcctgaggctgtcacaggcgcatatccttaactttggcaaaataaactttctaaattaactgagacccgtcttagattttgggggttcacatttgttacccacagcaagccgggtctaagccaactgatacagtaactggtaaataacttctgttcttagagtgtgaatacagcttgtctctctcatatcaaagcccatggtccttccacttgatatatagaattgtttattgatttaaaaaccattttattgattaaactggcctttgtagaactcagctgctctgagcttgtccacttctcagcacttagggaaaatttcattttataatcctttttagtcctcttattcctctgcagcagaacaattattccaccaatactgtggaaaagttagcctagtctgaaaaatatttcagctacaaatacctaaaaatgcaggataaaatatggctgagctagcaagaaagtaagagaaatagtccaagtatttaaactgctctgaaatactaaaggactgaaaatggaatgagaccaggagtccaaagagaggttaatgagcaataaagctaatgattgtttgaagggcagggcagatctagactgctggggattaaagatacacacacaaacacacatataacatatataggtgtgtatgtatatatatatacatatagttattttgagagtttaagacttaaagaaagttgcaaaaataatacagagttcctgtgttacccttcacccagcttctgcaataataatgtcttacctattcacagcactttggtaaaagcaggaaactgatactggtaaaatactgttaatacaggtatagatcttatttgtgttttactagttttgaatgtaccactttgcatttttggtgtatagctctatgaattttatcacatgtatagatatgagtaactgtcaacacaaagaaactctgtcgtgttacctcttaacagtcagacccttgtcccaaccataacatttggcaatcatggatttgttcttcaatgctataatttttctttggctatgagaatggtatctagatggaatcatacagtatacaacactttaagactggcttttaaaaactcaccacaatgcccttgagattcattcaagttgtacgtatcaatagctcattactttttatggctgagtagtgtcccatggcatggatatactccagtttgctttctattcattcactaaggactgtttggcttgtttacagtttttttgtttttttgtttttgagatggagtctcactctgtcgcccaggctggagtgcagtggtgcaatcttggctcactgcaacctctgcctcccgggttcaagtgattctcctgcctaagcctcctgagtaggtgggactacaggtacatgccaccacgcctggctaattttttgtatttttagtagagacggggtttcgccatgttgcccaggctgatctcaaactcctgacctcatgatccgcccgccttggcctcccaaagtgctgggattacaggtgtgagccaccatgcctggcctgttttcagtttttgactattaaaaataaagccaccatgacattcatgtacagagttttgtttgaacataagttttggtttgtctaggataaatacccaggagtgtgattgctgggtgatatgataagcatatgtgcaactttataagaaactgtcaaactgttttctagagtggttatgccattttatagtcctaccagcaatgtttgagagatccggttgctctgcatcctcactagcatttagtgctgtcagtacttgttattttagccatttaaataggtgtgtagtagaatctcattgtggttttaatatacatttccctaatggccaatgacactgaacactgttttacatgtttatttgccatctgtatatcttctttggtgaaatgactattcaagtctttgatccattttctaactggactgtttacttactctgagtttatatggttctttatatattctggatatgagtcctttgttggatacatgctttgcaaatattttctcctagtccatggcctgtctttaaaccttagtgttaattgccatgaaggcactgtcaacaaagtctacacttcaggaaaggtgcagaatggagttctctggatatagtcaaatcacctgaagagctttaccctcagaacaggcgaactagaaaaaattctacaagccaaagaaataaatagcaagctgaaagatagatctgaagaaattagccagaatgtggctcagagaaacaaaatgatgcaatattttaaaaataataatttagaacctcagaaggtttaacctatgcctaataggaattccaggaggagagtctagagtaatgttgtccaatacagtagtagccaatagccacatgtcactacttaaaatgtaaattaattaaaactaaatgaagttaaaaatgcagttccttggttgtactggccacatttcagatgctcaatagccacatgtggctggtggctaccatattggacagtgcagatatagaatactacaggaaatcctactggacagtgctgatctaggtcataaaacaagtctgaacaaatttcaaagaactggtatgatacagatgttttgtggaaataaactagacattagaaattaaaaacaaaataactcctactgcctcctctcacctttttccccattacaattccacctcttaatgtcttcatgttcttgatgagaagcagaacgtccctactgtgttccatggcaccaagttccccagaacccgccagtctctgatgacagaacatcctggaccgcccagctccacaccccaacccaagaagttctctaaaacactgaccatgacagcctggggtaggtttccactttaacattctgaccaaaattctcaactcgatgcagtcagagtctgcgcaacctgggacctcgagccaagaaatcctcaagtgaccttacttggcaaaaccaacaaaacaaccaaatacaggtctcaagcgatttacagctcggtgcttaactcggtcaccggccgaggggcagccctctggcgccaaagccccgcctctctatgacgtcacacgaggagccctgaagtggcggtcaagcttgaggcgtcatctggctgcgcctagtgggccgttgccttacagttgctgagaggaggcgagaggcgggggcgctagggccgagatcatgtctgactgggagaggtttccttggcagcagaggacgctaggtttgggatgaaagaagctgggcagatgcaaaatctggagagcgcgagggccgggcggtcagtcagcacccagactggcagcatgaccggtgagtgtccgggaccctgctcccgccaccctacctttcgctctgccctgtgcgtctcccgtcattgaactccagattccttgtctgagcctctttgcctcccctgctgcttttggatgtctcctgcccgccctctgcgtgtcccctccgcggtcgccaggaccaatcggctcggtcgcactggcttttgaagtctcgctttttacccctgttagctacttctcacaggacctagagctggggcctctgaggtcaaagagcctgaacatttccaaacggcgcttttgccttgatttccaaattaaccgcacgtgacgctttcctgtatttcgactgctttaccgtcgaaggtcagcgcatttttcgggttgtgttctaatcgctttccttttagcaacgccccatcacagtccaaagaaaagcttgcaccacgacgacgtcagatgcgaagacttttcacagcttgctttgggttgtccccctcagctatgtgtattagctgtaccgttttttcctgcagggtgagggctggagaaagaaggctcaactttttaagtggagaaggaggtagccacgactaaggctgaagcgtctactgctaagatacctctgactctcttgtcccctatctttttctgtgcctcttgcgaaagcagctgggcttaggctgcagcacctaagtggcattgagattggctccctttttcaccattagtaacaaagtttaaagtgtttgtcgtctcttttgtaggtcagataccaaggctttctaaagtcaaccttttcactctgctcagcctctggatggagctctttccagcagaagcccagcggcaaaaatctcaggtataatttgtttcatagtttttccccttagaaaagcagtggtttaaaatctgagtttattgctccagtttctgtcatacctaaaaccaaacttaacaaggcttaagatttaaaaaatatctttattgattaacatgacactttataattcccagccgtaataagtcatcttccattctaaaaatactttctgagaataccatgtttatcgggtactaatggtattcatatgtcagttcggctaataagattattgtctataccacataatttcccccaattatatatactgttggtgttttatctaggtagtttactcctctgccacagaaatatataaattgcctggagatagagaccatgtcttattttacctagcatataccctttagagtctagcattatatgagtgctaattgattaatgttggatggaagtagtctctttttggatcttgaaagacaggatcaaaacagattagaaatgggctgtgtgcagtggctcacgcctgtaatcctagcactttgtgaggctgaggtgggtggatcacctgaggtcaggagttcaaaaccagcctgggcaacatagtgaaaccccatctctattaaacatacaaaaattagccaggagtggtggtatccgcctgtagtcccagttacgcgggaggctgaggcatgagaatcgcttgaacgaatcgttggaggttacagtgagctgagattgcaccactgcactccagcctgggtgacagagcaagactccatctcaaaaaaaaaatcagaaatgtatagtaagaataatcataaaagccaatatattggaattggaagtataaacatcctgcgtcttttctttctcctacccttggggcaacaaggggctaggttctcattttcctccatgcttggaatggcatgatgctaggttctcatcatttctgtttgataattttggaagcttagggtgttggcattaatttttatagggggccacggccattggaaaatagtattaggttaagttgagcatttaagactttttttaaaacagaggtaaaatgaggggggtggggcagaaaattacacatggcttctcaccactctaacaacattactgttaatattttggtgcttccaatcttaagcatgaggttttttatttttactcttacaaagttgtagttatattctgcatgtactcgctgaggtttccaacttgcccataattctgctgaaaggttgctttagattttccagagaaagactataaatccttaaattcccacagtactcttaggagaccacctactcttttcattttactgtggatgaggttttgtgcttggcactggagacacaaagcagaaaaaacatggtctttattttctaatgagtagaaacactaggcatttaaacaattaaaacagaattggtggagtgagtacatagtataagcagagatgttggcaagactgggagccaggctctatatggggaagtgaaggaaggattcacagagaaggtcgtatttgcactgagacatgaaggattagtggacttttgcccaagccaaggaactctacatggaaaagcttggagcaatgagagaatttgtggtcctcaggccagaaagtgaagttaggtagagggaagagactggaaaggagcttgacaatgtagacaggaatcatatcataaaaagcattgtatgccttgcaaaggagtttagattttatcttatcaatataggaattgcattgaggaattttaacaggatgtgaggatattcgcttctcataataaaatgatatctcttggtgtagtttcctcccccaattcctatgtgaagtgttttatagatagtaaaacattatttaaaatattatacatcgttattccatatttctcaccctcatccccccactctggctctacatgttattaacggctgagaaagctcttcatttccttcattaattttgaaattcctttattccttctacttgttaatagtttagtattattttatgaaagtagatttccaagctgttagggattttatgtagtgttgtgttttttttgttttgttttgttttgttttcagataaaatttattttgaagagccagattagaaacaaatatttagaggtttaagacttttaggccgggtgcagtggctcatgcctgtaatcccagcactttgggaggccgaggcaggcagatcacaaggtcaagagatcgagaccatcttggccaacatggtgaaaccccgtctctgccaaaaatacaaaaagtagctgggcgtggtggtgcgtgcctgtagtcccagctacttaggaggctgaggcaggagaaacacttgaacccaggaggcagagattgcattgagctgagatcacgccactgcactccagcctggcgacagaaaaaaaaagaaaaaaaaaagaaaaaaaaacgtataaaaactggacatattagagattgaatacaaattttgaaaaggcgttcttttttttgtaaatatccagatgtgatctcgttttagttctgtttttttatatacacaccacatcctgtgctgaaattaagttttttttttcaacaggcacaagttgtatttaattagtgagaaatgacatttatgtttctattaggaaggaattgattggccaactaattgttgaagtttatttgcaaataatacacaccctactgtttcctcatactatatagagaaagctgtggatctgagaaaactgagatgaagctttcagttagcattttgttaaaaaaaatactaccaaggaaatttcaaaactatattagcaacaaaattttatacaactttatatcatgtttaacaaaagatcaaggttatgactctcattttctcccaagccaacaactcttaagttttcctggcatctcattccttcatctggtgggcaccatggaagttttctaaatgaaaataaataagtcttttgtttcagatattttatttgggatcttatttagaaatctgactcatacgcatgtctatttaaggcttttaaatggaaagttataacacatagaaatgagtacagaaggcatcaaaacaaagaacatccatgtcttcagaaagccaggcaacctggaactaggattgacttggctatatgaaaggttatcactcttagctcctggtcctggagcatgcccagctcctattcactgcattggtgtctttccagctgtgctcccatacccatgtgtcctaggactacaaccctctcaccatggtcttgggtaggcctttacttctgttcttacctacagggcttgggactccaaggcacttggggagggagagcctcaggattactctggcagtgatctgggtgaaagaggcttttgcatgttaacttgggaacttgactatcatttttaacattgtttatatgagaaaaatgtgttttaaattccgaaaagggagatttaccaagtatttagaacatgattgtaggttgtcaattacttgtatatttaatgtcaataaagcagaagtatataatttcattagttcttctgatatcatggccattgcaaaaaagcaagaccaatgatagtgtgggggaagaatacagaatgaaagggagcatattgtactccacttttatagtgttatttattgtacaaacattatcattgaaactgaatttatagctgcaacatttttaaaaactatttttttctcttggatttcctttttgtactagttaatatccacataattttgcaggtagttgcagtcatagcaggaacacaattttgtatttgacagttttggtactgttacagggttgataagttattaattttaaattatacagtaagaatacatctaaatttcatatgcatgtagtatatgctgccattgtgtttatacttgtggaaatattaaatttctcaaaatgttgcccaattttgtgcctaatatttctttaccatttactatagtatattttttccagtattatttgcacatggtattcttagagttgagtacaaactttttccaattaagagaaaaaaagtcttctttaagctaaagtaataagattgtttcacttaaattctttagtctgcttttgttgtacagagtaaatcacagaaataccaagatgcaattagacatgtaattgtattggaaatactgcttttgatactttaccaacatttgtcttactaaaagtatttttatgagttaccaaagtaatatatgtttgttatttttaaaatggacagaagaaaaattttatcataattccacctcctagagactaattactttttaaaaattgtttctcagtcttttttctcttactttctttacttacatgagatcatttaactctggatcctacccttttcacttaacataagaaaatacttatgctgtaatgctagtataaacattggagcagcaccttagtctagtaatttagagtagccagtggttttacagccagcctgcctgggttcagactctggctccgcctcttactagttgtataactttgggtaactctacctctctgtgtcagcttcctcatctgtaaaatgaaatgttactagtatatactacatgaggcttttatgagaaatgaatgagttaatatttgtaaaggtcttagtgcctggcacatgttaggtactatgtgtttgttgttgttgttgttgtctccttatttatttatttgtttatgtatttattttaatagagatgtggtcttgccatgttgcccagactggtcgctaactcctgggctcaagcagtccacccgcctcagcctcccgaagtggtaggattacaggcatgagccaccgcacctagcctcctaactctttccattgtgtcttctggtaccttatgctaaaggccctcactgtacttttccagaacagaagcaatgtggcataatggttaagacaatggatcttgggctggatctggcatatccacttaattacctgtgtgaccatggttgaattatttaatctctctcagccacaatttcctcatttgtacaatgggaataataggagctactttataaagttataaggattaaatgagataatttagggcctggtacatgataaacatgcagtagatgttaggtactgttattatcatcactcatatatataattattaccactactagcacccacatccttaccgtttttccactgataccatcacttcctctacttcctgttctgtctgaacagaaacctcattcccagaacatgggttttcttataaacttctttttgatggttctttcttttctagcatccagcacttgtttcataagactagcaggtcaacatttacaaagtttcccattcctactttaaaactttatcaatgtattaactatcccacccttttttttttttttttgaaacagagtcttgctgtgttgcccaggctggagtgcagtggcgtgatctcggctcactgcaacctccatctcccgggttcaagcaattctcctgcctcagcctcccgagtagctgggactacaggtgcgcaccaccatgcccagctaatttttgtatttttagtagagacagggtttcactatgttggccaggctggtctcgaactcttgacctcgtgatctgtccgccttagcctcccaaagtgctgggattacaggtgtgagccactgcacctggctatctcacctattttggagctcacagaattctgtgtcactttctttgtcttaatcaacttacttcatagtcactttcctgttttcataaatcataagccctgtgagagctgcatcttgagcaactaggctgtcatgtagcaagggttcaataagtatttgttgaactaataaatgaaggactttggtccctgcctcaaaactttctttctacttcaagttttcactttttccctcatggatatacctgtattcgttttctattgctgctataacagatgaccacaaagttggtggcttaaaacaacacaaatttattatacagttctgtaggtaagaggtctgaaatgagccttactgggctaaaatcaaagtgttggcagagccaaattcccttcagacactctacgggaggacctttccttgccttttctacctgtggagattgtctgttttccttggctcatgggccccttccatcttcaaagccagcaatggccagtcaggtctttcatgttgcatcgctgactctcccacacccctcttttactcataatgacccttgtgataacatcgggccaatcagataatcaaggataatctccctatgtcaaggtaggtggttagtgcctcagttccagctgcaaactgattcctccttgccatgtaacaaaacatagtcacaggctccagtgactgggacaaggaaatctctggcggggcattatcctgcctaccacaatcccgatctaatacctttgctacatagttccttatcttctcaattccagttaatttacctctattccactttagtcattcatggccacactttggacttttccattactcaaaactgccacaattctgaaaccataaacttcagaattttattttctcattacaatttccaatccttctatgttttgggaaagtacataggggatagattataaaggtttatttactaggtaaagtagtatgaacttgatccaaacaaagtgggaagtcaatgtagagtttcatcatggaaaaaaaaatggtcaaagccaaggaagccagcctttaaatatgggaatattgaattagtcatatgtcttatgtgctaatctttttttttccttaatctgatttttattagaaaaatgaagagggaaagcatggacccttaggagataatgaagagaggaccagagtatctactgacaaaagacaggtaaatttttatgatttcacatatatatgctcataataacaaagcaaaaggaatagtataaagtagaataaaagtgcctccatttctactatcaagggagtttttaaaatactcttctaaaaatggtctgtatatttacaagactatatgtcactccttttttttaaaaaaaaaagtacagatgggattattctatgctacatcctacatcttgctttaaaaaaaaaaaaactcttgatggttcatatagatgtgttaagaaatactctcccttagttctctcacactcccacacaccttgctgggtatgccaagaatgcaaggccctaaccattttttacctgggtcatttctcagagttgtgtttgcagtgatcaaccctgaaggttgaggtaatatctccctccaggacaaaaagcaatctggcttactttctgctgtgaaacagtaggaccctcaagctcagtgttcctctcctataacactacccaccctgtgtccaggcagccatctgtgcccatttgtattacccctcatggggcttgagggcaggaaacagaaatgatgctcatactgactgctgtgctgcaaataataaagttcattgtttctaacccagaagtttcatgttttctgctaatatccatgaaacagtaacaggttaacttattagttggtaagtagggtaaaatcaaagtgcagacttgaaagatgaaccttgttctttttaatattgtatagtatttccttgttactttattcctttgagttttccagaggttccgattcattggatgcagagtggagactaagcatgtatgttttgaagagttaccttgatgattccgatgtatattcctagagatttcctaattcattctgagagtgagcccagtaggaatatagaaataatttgtctcagaatatttacatgttttcataataagaaaggccaagggaaaaaaaatagtgaatcaccatttaagtcaatgtactagtccatatacaaaacagactgtacccttttgcccatgttttagtgtaaaactctgtgactaggatcaaacagatgacttgccaaaatgttagcgaagtgaggcaaaatcaaattcagagcagcgattcactgaaaagattcagtcctctgggagttgtggtaaatggaagtgccaaaatggaatgcaacttgagcttttatttgttttattgagtttgggatggaaaaatctttgtctcaaacttggtattttggccttacctagatgcaaaatgaaaaaatacatattttctgaggtaaaaaggactctagacaaaaaagtgataaataaactcgacccaaaagattgttctaataacaaataagttgatgagtgtgcttctcacttgataggaacaatttttttttttatgttttattctggctttatttctgtctgtttaactaggaaaatctaaagctgaaatcattcccttgcagccacttccactggttacgttggttcaatttaacaataggagctctgtcaagatcttttgatgaggcagcattacttcttttccaagatgatacgtattggccgggcacggtggctcacgcctgtaatcccagcactttgggaggccgaggcgggcggatcacgagatccagagatcgagaccatcctggctaacatggtgaaaccccatctctactaaaaatgcaaaaaattagccgggcgtggtggcagctactcagctactccacgggctgaggcaggagaatggcatgaacccgggaggcggagcttgcagtgagccgagatagtgccactgcactccagcctgggcgacagagtgagactgtctcaaatcaatcaatcaatcaatcaatcagtccagcctgggcgacagagtgagactctgtctcaaataaataaataaacaaacttattgaaagtattcagaaatcaataataatatatgcttcgcatttgaggagcataaaactcaagaaattttggtagggaggggaaagtgttcacaaattcaaggtcaatttaaagcttattttaaaagccaatatagataggtttttcatattttatatacatccttaggtacatattttgtaaagcagagatttttgtattcctttataaatgtccttctagtttaggagatggttggttaactcagaaatggaattccataaaatcttctctgttccttcttttttagatagtttacaaattattctccgtaatctcaaacattcatactcaaaaccgaaactgaaacttgactagttaatatcgctttggtctgatccttaaagtgatttcagatatgctgtattgggggataagtatagggttaaatccctttggaaggggatggggaatagggacaccctctccttagcccaagctcccctcatgtaacagtcagtcccaagcccaaggatcaggtttacattccttacttcagaggcttttgctgtgaaaacagcatagactgttttgtgccttatgcagaactgacttttttttttaaccttagtctgttttatctgatattgttataccagctttgattagtatttgtttaagttgagaaactttaggttcaatagtaacacaaaaccttcactcaaagagatccactggaagtgcttagaaccccagtcagtaaccagtctgcagggcttaattcaggctcagccagtccctgctctgtggaatattgctaaggtagctcaagctcactactctgacatcaagttctctcatcctttttgacacttgatggtatgtcttccttctttttgtttttataacttacctatagtaggaggtgggacctaactatagtagtctagactgccatagtgctaaaaattgatacagccagtagtttctcaaaagaaattgagaattatcttttctttggtcaatatctaaaatattttagaatttaagatgacctctgctttagttctgccttttaccatctgtgggtctttcagaaagtcatgtaaactttctgggctttacttatccatgtgtaaaatcagggctttatattctttattaccatctagaagcttaatactaaatggtactacacttaatcctataagaaacaagtcaaattgatctagttcttgccctttactaggttataatgtatctaatctttcactagaacaaattaatgataattacatgcttaattgtttgattagtagagcctaggtttagaaaatttctggcctaaagtcaacactaaagtttcagaagctttttggatctaatgagaaatgtgctttgtacaaactctgtttagataaagaattaaacaaaacttccatttttattaataattcaagtataatccataatatgattattaggtgttataactaataagttgttattttatatcttaatgtaggtaaagagaactggtcttgtggtggtgaaaaacatgaaaattgttggtctccactgttctagtgaagatttacatgccgggcagattgctcttattaaacatgggtcaaggctgaaaaactgtgatctttatttttccagaaaaccatgttctgcttgtttgaaaatgattgtaaatggtaagtgcagaaaagggtttgttggggattaagagtatttatctgggatgggcgtggtggtttatgcctgtcatcccagcactttgggaggacaaggcaggaggatcgcctgagcccaggagttcacaaatagcctgtgcaacatagggagacctcatcactacaaaaaataagttagctaggcatggtgatgcacgcctgtagtccccactacttgagataatgaggtgggaggattgcttgagcccaggatgtcaaggatacaatgacccgtgattgcgccactgcactctaagctgggtgacagaacaagaccttgtctccagaaaaaaaaaaacgaagaaaggagcgtttctctgagagcagtcagtgggaacacatttgctaaataccacagagataatttagaaatatatatctgaaagtcaggtgctatggcttgcacctgtaatcccagctactcagaaggctgaggcaggagaattgctcaagcccgggagttcaaggctgtagtgagctatgattgctccactgcactccagcctgagtgacagagcaagaccctgtctctaaaaaataaaataaaaaatatgtaaatatatatctgaagacagtttgatacattataagagtaagcatcagaaaacatggattctggtctcattcatgtctactaacctattaaatgaccctcagtgtatgagtagactaatgctaactgctataacaaaacaaaatttcagtgacttatgtactagatatttatcacctgtataatagtccagcacatgtgttgctaaacagcaggcagctttctccatttggttgattcctgggctaggcatcttctgtctcattgctgttgtcacctctagggctttgagtcctctgtatccagaggcagactgagaaagaatgagtagagagggtgaacctgcttcttaaaaaccctgacctggaagtcacatacatcatttctgttctcatccattgtgggaactgttgttcccactgggcagctgtctttcagtgactactatacactttggaaggaggaacacaaatttttaatgtatagccatccgtccacaccaggctattcactaaacctccttgtgcttatgattctgttttgcacccaggtatatgccgatcattctttcatttaaaaaatatgcatcttgttgcataggcatcatggtagatcaaaaaacaaaaaaaactaatgtggttcctaatctttactctcgaggtgttatttgggggccaaaataacaatttaatatgatgcattatctagtaccaaatcagcgatacaggttgtaagtgatatttggtctcagaggagaaatagtgatccctgcagatttccatattatgaaaggctggggcttaagcttgatcttgatgcgtcataggtagaggaagaggaacacattcctggtcagggggaacagtgtatatggagtcatcaagttgtaagaagcaaagttctaggggtcagtatttgaaatggagaattattcttggagaacagtggcagatgaattatagtgatagtggagaactttgaagaactgtagagcctttggactttatcttataaaacagagttcctaggcctgttgtgagaaagagctatttttatttacagcaaagccttaagagtaatgatcagatctatgtcaaggtcagtgccttgagctataaatggcagaacttctagaagaaatggatcatgtggctagaaacctctcggcctgcaacaagtatttcgagcaggtaggtatctgtggtagtgattggattctatattctcaactgcagttaccaatacattgagaagataggtatgaaagtggtggtggcatttttttcaccttttcccaattaaccaggcagattggacatgcatttcatcactcatgttcaactgacctacagttcctgtttgtaggtaatgtggagacattgaagattcttgagaaagatgtaacgtgattgaaatttttgttgttattgctgttattgaattggagcagggagagattagagattgggagcttgattagtagactattgcattaggcaaggtccaaatagggttcagatgatgacattgatacagaaatgaaagaatgtgaaagaaccaaaacatttgttggctgatctgttccagatcaagggagaaaaatgaataaaagatagttgtgctttgtgctgagctaactgtgctgaaagcagtcttaatagcctcggagccacaaattagagggaagaataggagagtgcaggtaactcatcactgcttgatgtcttaagacatttcatcctgacaaaaaagataatgaagtatggaaagtcaggaaggacctacagtggaaatgcttgtgtattggtgttggacaatatataaacaaaattgctatgttagattaggcttatgtattatatttagttatcttaggaagggggcatggttgaaccccatgctatagctagattactttagttagaattgctattacctcagttataaggcaaagattgttgtagcacagtggttctccaagtgtggtctgtggactcctgatggtccacgaggtcaatgttattttcataataatactaccttcaggttgggcatggtggctcatgcctctagtcccaacattttgtgaggctgaggcaagtggattgcttgagcccaggagtttgagaccagtcagggcaatatggagaaaccccatatctactaaaaatagaaaaattagctaggcgtggtggtgcatgcctgtagtcccagctactcgggaggctgaggtgggaggaccactggagcctaggatgcaaaggttgcggtgagctgtgatcgtgcctcaccaatgcactccagcctgggccacagagtgagaccctgtcccaaaaagcaaaaacaaaaacactacattcatactaatggtaccaaaacaatgataggtaaaactactgtttccgtatctttatttttattttatttttttttgagacagagtctcgctctgtcacccaggctggagtgcagtggcacaatttcagctcattgcaacccccgcctcccaggttcaagcgattcccctgcctcagcctcctgagtagctgggattacaagcgtgcaccagcatgcccggctaatttttgtatttttagtagagacaaggcttcaccatgttggtcaggctgatctcgaacttctgactcatgatctgcccacctcagcctccgaaagtgctgggattacaggcgtgaaccactgcacccagcctgtttccatatcattaagacagtggtgccaaactgccctggtagtcgtcatactcttcactgcactcagagggaaaaaagaaaaccagttttacataagaaggtccttgatgaaacagtaaaaagtatcaattttattaaatcccaacttgagtctgcatctttttaatattctgtgtgaggaaacaggaggtgggtataaagtgcttttgctacagacctaaggtatgaagatggctttaaggaaaaccatgtatgtgattgtttgagttgcagactgacttatctacttttttaatggaacatcatgaactgacaatggttagttagacttggatatttggcagatattttcttgaaaatatagtgaacctgtcactttcagataaacaactgacagtatttgttgccagtgataaaatttgagctatcaagtgaaaattagaattttggaaaactcatattctctattatgagcctgacagcatctcaccacttagactcttttgatgggattggtggtgatattaatgaacgggattttttttaatattgtaaaatcagtaaatcattgttttccggatgaccaatgcacaatgctacaaaatcatgcatgagtaaaagccattctaagtgcaagacagaccaacggactttaacgtaacagttcaaaaagtttgttgatatggtttcagattctacattgtaactaacctttaagaaactatcccttgtcaaatttttatgtagtgccaaagaagaatattcacaagtatctgaaatggctgttaaaatactcctttttcaaccacatatctatatgaggccagataattttcgtatacttcaatgaaaacaacatattgcaacagattgaaaacagaagcaaatttgagcatccagttgtcttctattaagccaaatttttttttttacaaagcaagttactttattagaattttaaacaatgtataagtgatggaatcattctaacaacacatctattcactgcttacaattccaaccaatttcagttctctgatatctaatgacaagagcgaagacctgttaaagttccttccaccagtaaaacccacagctcaaagttgtgggagtgattaactgagccataggccttcattcacatgtttaccacattaaaataccacacagtgttttcttataaggtcaaccacctgggaactaattaacattagcattaagatttaaataaactgttaggcacagggctagatcaggcattataaaaccctgtggttccctagtcaagtcacacaaatccccaaatattttagcttgtaacagttttgtccttcctctcttgagacaattatttgggtacttgcttttggcaataacgtaattcacaatggaagtttcctaactgtgatggtgctttaggcaacttcggagaatgaagatagaaattatgcatgattatataacatgaagagtttaatttctattacacactcaatttccatgccctgatttctcttaactctataaacacatgtaaatcttctgcagagctttaaagagctctgaaagggaaaacacctttccatatatggaattgatagcatagtacaggtcaggcgcagtggcccacacctgcaatcccaacattgtgaggccagtgggaggaccacctcaggtcaggagcccaagaccagcctgggcaacatagcgagaccccatctctaccaaaaaaaaaaaaaaaaaaagagctgggtgtggtggtgcacacctgcaatcacagccaatctggaggctgaggcaggaggattggtagagtatgggagttagaagttacagtgagctatgatgtcaccactgcactccagcttgggtgacagactggtctctatttaaaaaaaaaaaaaaaggtatagtgatacactattaattccatgtatgctaatatgagatagcatccatataaactactatcaagtctttatgtgccagctactgtaataagtcttttcaagtttaactcactgaattcataatgaattatgaggtagctaccattatttcccccattttacaaatagggaaactgaggctgggagacattatttaacttgcccaagtttctaaagccagttactggcagaactggtatttgaacctacttaatctgattctagagcctgtgctatataaactcttacccactatgctatgctattcattagtatccatttaacaattactactattgcaatagctgcaattatcactcctatagtacaggggaatctatcaaagaaacactcagctttcacttatctatttctgaaaacattttttattaaagtataaggtgcatttcactgatctatttttataattgtcaatttatttaagtactttgattatatgatgtaagaaaaatgttagaaatgtcttctggaattaaccagaacacaataaatgtgcaaaaattagaatggaatttacagagtttataggccactgaagcccatccatgaaacccttcatgaaactcattcatgaggccaaagggcagaacaaaccctccctgaaaatctcaattgggcttttagaatttaaatttaaatgtctatacgaattctgctgctcagttttgtccttccactcttcttaattttccagtgatattgctgataactattgtttttccttttactattaatccaaatattaaagatatttgtaaaaatttaaaacaatctcattcttacaaatttttgttttggaaaatagtttttttcataaagctaatgttatttatattaatgtataacagattattgttatttttaatgaattaataaatattttaaattttgttttaattttcaagtacagtaaatatcagtagatatattccacataaataaaagctttttggagtcctcaataatttttaagagtgttaaggaatcctgagatcaaaaaatttgagaaactctgctttagcatttgccactaatacacaaatgtctgtctaaagaggatttttcccctcttgaatcaggattactggaagcagctaagatgcctagatgaaaggtttaccatcactgctggttaggaaatggattatgagaactcgaacagagggaaggtgaaatgcaaccggaggaaacactctgatatgaggtttgaggccttcaaaattgctttgcagcataagccacagtgagtcaggagtaccagggagtggatagaatgtttatttgtttaactgagactttttagttcatcaattattttgaagggtagaacactctgtgggctctctttctatttgcttctgggtacaatcacaaaaaaaaaatctctcctagctgaaattacatgcagtactagcaaaggggtctctttgttataaactgttcattaattgacgaacatttgtgtacttaactatgtataaggcatctcatcgttcaatttcaaatacaaattaaaatattttttcacatttgttatcctgttatgttttctcttttacaaattgtctgttcgtatctttttgtctctctttaggccttattcttgtcaattcatatgtgctctaatgaattgaaatattttctgtatattaaacattactaacctttcctctgtcacactgattgaaaaatgatctatttagtttgttgttttgtctttaattttgtaagctttaaaaagttaatattgcccttcagacaccatcccaacatcacataagaattttttcatgttataaattctttgtggacatatttgataactgttttattatgaggaggaccataattaattcaaccattcccctattttggtcatttaggtttttgggtttgggttttttgtttgtttaacgtctttgcttgctattttaaagaatgctgcactaaatgtgcatgcatgagatttcttctctgtatttagaatattttcctagaatggattctcagaagaattctcagtctgtggagaggaacatttttaatgcatggaagaggtatttattccagatagaaaactaggcaatattagttgttccctgtaagattttaaaaaacagccatggcaccatggaggactcttcgagtatatagttttagcgctgggctttgggatcacacttcacaacaccagtaactccacaaatgcattcctagaggctctgtgagaggctgggtaactttttcttgaaaaggccagataataaatattttagactttgcaggccgtgtggtgtctgtcacagctactcaactctgccacacgaaagcacccaaagactatataagtgaatgggtgtgtctgtgtttcaataaaggtttatttatggatactgaaatttgaatttctgacagttcgatgtgtcacaaaatgttcttttgatttgtccaactattttaaaatgtaaaacccattcttaacctgtgagctgtacaaagactggcagtggactggatttggcctgtgggtggtagtttgccaaccctcaggctatataataggtgacttggtaatagacatttattatattgagggttctagatatactgcaatgatagggtggattttataatgaaaaccctaaattcagcatgtatctcataattacctttcgtattttgtatttcagctggagttaaccgaatttcatactggcctgctgatccagaaataagtttgcttacggaggcttctagttctgaagatgcaaagttagatgccaaagcagtggaaagattgaagtcaaacagtcgggcccatgtgtgtgtcttacttcaacctttggtgtgttatatggtgcagtttgtagaggagacctcttacaaatgtgactttattcaaaaaattacaaaaacattgccggatgctaacactgacttttattatgaatgtaaacaagaaagaataaaagaatatgaaatgttatttttggtttcaaatgaagaaatgcataagcaaatactgatgactataggtttggagaacctgtgtgaaaatccatactttagcaatctaaggcaaaacatgaaagaccttatcctacttttggccacagtagcttccagtgtgccgaactttaaacacttcggattttaccgtagcaatccagaacagattaatgaaattcacaatcaaagtttgccacaggaaattgcaaggcactgcatggttcaggccaggttattggcatatcgaactggtgagttacatagatcgtaaattggggctgattggttgggttgtatttgtctctgaagtgttcgtctcatttatggtagagttcatttactcatagttacttaagttttgctgttcatacaatatagagaagttagtgagacccttgagtagacaactctttctcccagcagttttgggattccttgtagccttatattcagtaccacatttctacatcaggccctcattaatctaggcccttctttctgcttcttgcttttatgatttcactgttccttgagccctccactaaaggtaggacaagaagagaaaggagaggcccagtgcagtggttcatgcctgtaattgcaacactttagaaggctgagacaggaggatcgcttgagctcaggagttcaagaccagcgtgggcaacatagcaagacctcgactctaacaaaaaaattagctgggcatggtggtgtctggtggtgcgtgcctatagtcccggctacttgggaggctaaagcaggaagattgcttgagcccagtagtttggggctgcagtgagctacaatagcaccactgtactccagctccagagacacagcaagactctatctccaaaaaaagaaaaaggagaaaaccaaaattattcatttttgttaactcttcaatattttgatgtactgaatatttaacaatttttaaaaaatctttacaataacattaattcaaaataactaatagaatcaaggtaaaggaatggtgattattgcagattcttccagttgctggtatgtcttcaatcagcaagttgagaaacatttttactgtattgtattaagttgtatatttggaaaaggaaaatattacttgggatttttctttgttatgataaaagatggcatctgtatttccaaacatggaacaatattatcacatcttacctgatgtaagatttctcaaagtagaatcatgatcactttttaaaatgcatctttgtgataaaggggaaaaaacatagacaggaggagcagtagagtaagatttgtttggggagtgtactgtagtaggatttaaaaattatcccaagaaagaagagaaagtcatcagaaaaggtctctacagatgctgctggtctgcagtagtcaacagaagggaggttctcagctggcagcaaatagaatcgccattgaaacttttataaaaagtacagatgctatactttttacttttataaaaagtacagatgctatactttttacttttataaaaagtacagatgctatactttttacttttataaaaagtacaaaccccaacccagacctattaaaccaagtccctaacaaaatatggccaagttctatgtttttaaaagttccacaaggtgttctgatgttcgcagagttaataattgctcaattcttcttaaagattttgattctgtaggcacacattatatgaccccaaacaattgcattgtgtaaaagtctggtttcatgtaattatattctattgtgggttatatatttgtttctttgccaactccagctttgtaaagaatttttctgtaaaccattcaaaaagatagaaaacataaatgggaacagctgttgtagctataattcactaattacccttcactaattagaattcagcagaaccctgcctgtgttccagagtaagagggcgatgtgaatctgctattttactggatcttagtacctcttgcttctcatagaacaccttatcataccagctgtgattccagtgtttaaagacgcagtatgtatacatttgcatttatattgtttattagatactctacactactgtatagttataagtatatccactattgtgcagaattttgtacataaagccctgcttacgcatttgatggtcaatttaaaagatttttcaaggttaattgttggtgattttttttttacatggaactcaaatcctgaatagggtgcaactcctctgtcactcactctactccactgtgcactcttccagggaagaaaccatgtcttaatcattttttccttagcactaaacacaatgtgcgttgaatggataaaacaaatctttttatccaaagataaagggtccacaatcccttatgcaaaacttttggagccaaatgtaaaggaattcagaatttttccgattttattttattttttttgagacagggttttactctgttgcccaggctgagtgcagtggcactcatggctcactgcagccctcaacctctcagcctcaagcaatcctcccacatcgacctcctgagtagcttgtactacaggtgaaccaccaccatgtccagccaatttttaattttttgtagatatgtctcactgtgttgcccaagctggtctcgaactccttggcttaagcaatcttcctgcctcagcctcccaaagtgctgggattacaggcatgagccatcatgcccaatccagattttaaaaaggtaatatggtacatatactgttatataggactcccagtggcatctgggacagtaccctgtaatcacattaatacatacagagtgaaaaaagtaggaatatttgcactaagaataattgagggctataaataactcaatttgggtcagatttggccgcaaaataagtgcatcaaacttcaaaaaaactggatgtaaaagatttcagatcagggactctggacctgtaattcttccttaatgataaataataacaatgacagtttatggaacacctactatgtgtcaagcactgagcttggtgatttatatatgtatctcatttaacattgagggtacttcagtaaggtggatatccctatgatacagtgcgcttccaattaagcttttaatttcacattattcagtttggtttgatgacctcatttctccctaattaatagatgaagataccatttcatttaaaaatgtacatatgattaaaatgaattccaaaacctctaacaacagagttctaaaatgaattgaaagtagttgcttataattgctttttgaatgatgaataaagaggatccatagagatgtcatgaaaagtatgttactagccaggtgcggtggctcccgcctgtaataccagcactgggagactgaggcaggaggactgcttgaggccaggagttccaaaagtatgtttctagaatacccgaaggtagcaaaaaagtggaaaaaaaaagtgtttagactcttggggaaaaaagagcaggaggaaggcatcaaaaatcttatctatctgctttaagtactgagttgtgatctcttcgtgtcttgctttctcatcagattaggtgttttccaaagctaaggattatgccttcctcctgggccacagtactgataatgagagtaggctggagtaatcaagaaagttaacttttaaaacagaactcagtggttctcagatatgagtatgcctgagaatcaagggggagctcaggagtaatgcagattcctaagccttgcctgcctctctcagagaggttgatttaggggacttccatggaagccaggagttgcctctttttttttttttttaaattttaaaaacaagcatccagtaattttgatgcaagaggactgtggagcaccttggacactgacatgaccacaggattgggagctaaaataaccacacctgtgttctagaacaaaaagttcccctctgattttcagtgatcaaagagccccaggaatttgactcaatgattgtaagttgacctttccttcaaagttgtacagagaaaaccctgtgaatgaccagatcatagggagcaatttctgtaaaaattatagacatgaaaagatttttgagaaattacctcatctgtcaccagccttgatgctgagtgacatcaaatctgttttatatggatgaaaatttattcctattttaaaagacaagtagtaaagaatattctcttgatgtaaccaaccttagctaggcagcagagctgcatgctgatggaaaaatcacattttttttttcctcctaacaaggtttagtctgtccccaggctgaaacagaaaaagtggcttctgtgactaagaaacataacattaaaaatatgcagtgttgatggtagaaaagggggcttttaatatggagaatttttattctggttttttattttttcattttagatttatgcataaattaaataaaactttaaagattttggttttgcaggcaaatataatcttatgtttataacttctgccacttaccttagaaatgagcataaagccattgatttgtattcttgcccactcatgttaaactctaaaggtctaggaaggaacccaattttgtttacaccaaaatcccttttccctctactctgtagaaggaagtcatctcgtgcactctgctgttcagcctcatttatttccttcagagcacagcacataaagtactgtttgtttccttgttgctgttctccttcaccatccaactgtaagtcgtatgaggaagggactacagtttccctcaccactgcatcctcagttctcacagtacttggaacataagaggcattcaataaatggaaatttttgtcaaggatttctttttcttttttttttttttttttgagatggagttctgctctgtcccccaggctggagtgaagtggtacgatctcaactcactgcaacctccgcctcccaggtttaagcaattctcctgcctcagcctcccaggtagctgggattacaggcatgcaccaccacacctggctaatttttgtatttttagtagagacggggtttcaccatgttggccaggctgtgtcaaggaattctttatgtcacggtgcaaggtggaggaaaggccaagcaggttggatctggagggctaagttttagtctatttctttgcctgtttctgcatctagaaatggaaattttatctgctttacctttagggtaaaaatgagatcatgaataaacatgtttaacataaattatacaaatgctttgtggtataattttgaaaaccagggtttgcttgaatttgagatgggaaattttattagagtatcataactgttttaaagttaacctcttaataagacattcattctagtttttaatgcaattgtggcacaaattttctttgtacctttactggaaagtaggtatttaaaaatgttatcattggagggattcacttttaggaaattgtagggtgaaaccacggtttcagttaatcctccccaaaatgaaaatgccttagggtaagttcacagataattgttattttctacgtgtaaatgtgccacttaactaccttagtcccttattaagattttgataaatactatggttttcataattagtgtaatttgtcttagaaatttgaaactcaacattgtatagaaggaaaaagtaaatccttaatatgtagaatttctattttgttttttaattttctgtttcagattaatggttttaagaagtacagctttacttttgcaaaggttttggttctacagggaaattataatcttatgtttgtttataacttctgctatttgatttagaaatgggcaagatgtcattaacttgcattctttttccctcaaggtaaactgaaggtcaaagaaaggacaacattttgtttaaatcagaattctcttcatgtactttctagcaatagatagatagatccataaagatttgtttatgttcgtatgagaagtttgaacttttttcttagcaagaacattttcataagatatattttccatgattagagtataaataatgctgggaaaagacaaatttggttgttgtgaacagttattacacaaaatccattagttctgaaacctttattaaattttatcacctatcagaagtagttgtttagaaaccggcttgttaatggagaatcaatgaagttgcacttagttctggctacagctttgagggacctgactgtggacactgccatttagtggcctccacatacgtatgtgtgactgagttggtagtgactctctctagttatttggtacctagctcccatattccatacttaaaagtgtttattttaatacttttctgtaattagtgaagatacaaggattgctgctacatttatgaagtatgtttcaatacaagtttttattacttttggaaaaatatatttctaaaactaacatatcataatttttactgagttaaatgccatatatctttcagaggatcataaaacaggagttggggcagtcatttgggcagaagggaaatctgtaagtatgaaaacaattctttaaatatttaacctggattttgtttaaacatagttcagtcttcggtgcattacaggttactgactgccaaggcgggcagatcacaaggtcaggagattgagaccatcctggctaacacaatgaaaccccatctctactaaaaaaaaaaaaaatacaaaaattagctgggcgtggtggcgggtgcctgtagtcccagctactcgggaggctgagacaggagaatggtgtgaacccgggaggccgagcttgctgtgagcagagatcgtgccactgcactccagcctgggtgacagagcgagactccgtctcaaaaaaaaaaaaatattaatatttttgtaatggtgcatttatgaagatctataaagatttgctcatccctcaacagttttctagatagacgcattcattcagcaaacatttgttaaacactctctacaggttaggcactgtgccacagtgaatgctggggattaaagatcacattttatggcctcatagtttagtgatggagatgtagaagtaaaatataactgatatgtaagtgtaattataactgatatcatgagaacatagaggaggaacctttgcttggaaaaataagtaaatactgttggtgaatattattaatgttactaatataatattcttgaagaataagataatttcttcagacagagcaagtcaataggaccaggaggataacatgaatattcttggtgaacattcttttttttttttttttgagacagagtccccctctgtcacccaggctggagtgcagtggtgcaatcttggctcactgcaacctctgcctcctggattcaagtgattctcatgcctcagcctcttgaatagctgggactataggcatgtaccaccacacctggctcatttttgtatttttagtagagatgggattttgccatgttgaccaggctggtcttgaactcctggcctcaagcagtccaccctcttctgcctcccaaagtgctgggatcacaggtgtgagccaccatgcctgccctgaatattcttaatattaatattaataatgttaaaattcttgaagattaggaggatatcatcaggcagagcaagttaatgggaccaggagaataacacacagagactggggtgagagagagaatatgggaaaacgcatttgatttggcacatagagtaagcaacaaagtggacgggaccatgaagaactctatattccatgtaaagattttggactttatcctggcagtgacatactatagcacagcactaaccagtagagagaaaaggcaaggctcaaactgaattttaaattttctaggtgttatatatatatatatatatatatatatatatatatatagagagagagagagagagagagagagagagagagagagagagagagagagagagagagagagagagagagtctcactctgttgccaggctggagtgcagtggtgcagtctgagctcactgcaacctctgcctcctgggttcaagcaattctcctgtctcagcctccccagtagctgggactacaggtgtgtgccaccacacccagctaatttttgtgtttttagtagagatggggtttcaccatgttgtccagaatggtctcaatctcttgacttcgtgatccacctgccttggcctcccaaagtgctgggattacaggtgtgaaccactgcaaccagctggagccatgtttttaaaaggaagacagataaattaattttaagaaaatatttaatcatgtaatcaataaaaaattattgatgaaatattctgcatttaaaaaatattaaatcttcaaaattctatgtgtattttacacctgcagcacctctcaatctagactaaccacatgtggctagtggcgactgtatgggacagtgcattccaagaatgttctaagtggggaaatgatttgatcagatttgcattataaatagaatgaggtagggctagacagaaaataaggagattaataaaaagagatgaggacttggagatgtggggatgggttaggaggctagaatcaagagatatttagtaactatatagctgactgaaaggtgagcctacattttgcctcagggacttcacagaaagtaatctgacaatttgctttgatgtttcacaaactcctcaagttcactcatccagtatcttccctgctaacctcctccctcatcagtggtcaccatcttgtctgttactgtacacatacaatcacctagcacaatggattccaccttcaaaatacctcttgactctacttacctgtaccccaactgttaactcctactagaatactaggctcctctgccagaaattcctcagcactctgtacaacttgtctgtgacattcatcacagttaaagttatctgttcaatttcttaccctccccagactagaaggctcatgagggtagggactctctgtcttgtttacagttgtattccagcacctagcataggtctaactggtggttggaactctcatttgtgtgtacatgaatgctcagcagacttttggcttaacatctggttgttaatgattttgtggagaatgtcagtttctagttatctctagagtaggccagcaggcagcacggtgaaatggaaagacacatggcttagagtcaagtaatctgggcttgaattctggctatgttacttactcattttgtgaccctagacaattaatcactcttgtcctcagtttccttatctgtaaaacagtaatattaatagtatcactctttaggttgtttcaagaattgatcaaatgaaatgatccatgtaaaactcagtatggctgggtgcagtggctcatgcctgtaatccagcactttgggaggcgggggtgggaggattccttgagcccaggagtccaagacaatcctgggcatcatggtgagaccccgttgctacaaaaaaagaaaaaattagccaggcatagtgacatacgcctgtggtcccagctacttgggaggctgagatgggaggatgacttgagcccaggaagtcaaacctgggtgacagagtgagaccctgtctctaaataaataaataaataaataactcagcatgatgtttgacatttagtaaatgttcaaacagatttattaatgagataatattttgtttgcaggcttttgttggctcactattacatgatttttatgaagctgctacagtaatgagtctgttgatattatcatgagtaattataatatattgaaatttaatgagttttatagcatattccaaaaaactattacacacacattactaatatttcattctaataattgataaagcattcatattaactactatttctctttaaaagagaaataagagccattgaagtaagaagttctataataatatgcatataatagaggcttaataaatactgaagatgaaaatgcattttttattttccaactaaatcacaatagcacatttttagcccaacagaaattttctgtttaaagtatttaaaagtttttgacttgctaaccagtagcatggcacagagcacataagaaattaacaatcacttgttgagtacctgctatgtacagaatactcgaacatgttgaagggatggaaaagaaatatataacatggtttctgctctccaggatctataatttatttgggaagtaatatctgaatcaagtgaaataatttgttagttaagtaagatagtatttaattaattgcaaaaaacaaggacttccttgagattatagattagagaggtggttggccttcttggaatttagctttgacaagatcacactgcagtaggagtatctggtattatattttttgatagctcagtttactgtagaaaattgaatgaatattcattatacaaagtatgatagcaagcttcaaaaatacattgcaaagtgtcttttcagaatgttgaaactaaccattggtttgctcactctcgtagagaagttgtgatggaacaggtgccatgtactttgtaggatgtggttacaatgcttttcctgttggatctgagtatgctgacttcccacacatggatgacaagcagaaagacagagaaataaggaaattcagatacatcatacatgcggaacagaatgccttgacatttaggtatgaaatccttcttggtgtacttttctttaaaatgtagcaagggttggttgaaattaattttcttataattgtaatttatttcctttttcaaattccaagaaagtttcctttcagaagtataactttggtaaagcttggtcctcactgccagacctgaagctatgacctgacctgaggtcatcgcctcttcaggtcttcccaatttgttgagcatgtctttttttcccttgcctctctccaatatgaaactgctttaagtttatcctttgggatcttgctcagcctctcatatttctggatgttaaggctcctttgttttctaaatctggagcacgcatttattaatacagttacacgccacagaaagacattttgagcaacgatggactacatgcacaacgtgttcccataagattataacagagctgaaaaattcctgagtgaagtagccattgtaacatcacacgttaccttttttatgttcagatacgcaaatacttaccattgtgttacaatggcctgcagtattcagaatagggatttataatgaaccaaattgcttcaaaagagcttttgttagtgattatacctgttaatttacatcattttcacaaacacttctcagcctttaccattaaggttaagggattaaaaaactgtgtaagacatgactcctgtccttggagagcttctaatgcaataggggatatgagacggcatccacctcgtgctgtggattctgtgggaggggcaaatgtaaagtgctgcggacattctggagctgctatggacaaatgggagagtgcaagggaaaggctttagggaagaactggcatctgaactgagctttaaaggattcctagactggggcaattggaagggaagggaagaccattcttgcttctagcataagcaacggtctagaagtaggaaaatccgtggtgtgtttaggagcatgaatattccagttaggttggaatgtggacacaagggaaagacagctcacaaggacaggctgggactggactcgagaggactttgagtttatgctccatttggtaggcagcggggaaatggaatggcattgacagagccatacgctatagattatgtaggtagtattgtttgaacagactagatgcatagaattctgttgccctagtccaggtgaacgtaaataacagtctcaacaaggaagatggatgtggaaggctggcggtggaggaattgaagatggctggctgagagctacgtaagcctcagaacccggaagtcagtccttgcagccccagttgttagtcctaaactaccctcagcatgcaaaatttcacccaaaattccctctattcttttccttgtcctcttcattacagatttacttgcttcattttgtacagaggtgtgaatatatcaaatagaaacttttctttttaaaattatcctatgatagggaaggggtaagggaactataagtcaaaacagaacttaagtatttgattattcatttagtaaacatttattgactatccactaggtaccagatagggctgtgtcatttgtctaacaagatgagttagtgtctaatcagacatgattagctcttaaggtatcagtttcaaatctaattccagtattctaaacaggtacttatttagaaagcattgggggttttttctctctttctttggtgtctgtatcttcctgatttcatttattttgtaatctgaaactgaacctcttacttagaatcaataaattatttttagttataataattgtcatgttcaggttgtatcataacacttttgtgggtttacatactttgaacattcagtaattcagcaagtctaaggcttgatgatcattattaataatgtcataaatctgtttttaaaacagctcaattttagtgtttaaagatttttctaaaaaataacttaccctttcagaaacgacctttctgatattttataattttttttgtaggtgtcaagaaataaaaccagaagaaagaagcatgatttttgtgacaaagtgcccatgtgatgagtgtgtacctttaattaaaggtgcaggcataaaacaaatctatgcaggagatgtagatgttggaaaaaagaaggcagacatctcttacatgaggttcggggagcttgaaggtgttagcaaatttacggtaagtagatacacatttttttcaggtgtattttgtattatgttgttaggtaccctgctgcaatattgtaagttagtgattcccacccttttaaagagtttcaacaaattattattattattattattattattattttattattattatttgagacagagtctctctctgttgcctaggctggagtgccagtggctcgatctcggctcactgcagactccgcctcctgggttcaagtgattctcctgtctcagccccccgagtagctgggattacaggcgccggccaccacgcctggctaatttttgtatttttagtagagacggggtttcgccatgttgtccgggctggtctcaaactcctgagctcaggtgatccgcccgcctccgtctcccaaagtgctgggattacaggcgtaagccaccgcgcccggccgagtttcaacaaattattattattattgagtttatttatatgtgcaaacccttacctaactgcaactgttcagctaaggattcctgccttatgaatttacatctctgtagagaattgagccagtggatcttttggtgccatctggtggctgataaaagaaaaatctctgacccatctcttccctctcctttctggcttagagaggtggatagaggtgaaaatacttcagcagtccccacccttttcggcaccagtgaccggttttgtggaagacaatttttccacagatggggttatggttttgggatgaaactattccacctcagatcatcaggcaatagattctcataaggagcacgcagcctagatccctcaggtgtgcagttcacagtagggttctgctcctatgagaatctaattccaccgctcatctgacaggaggtggagctcaggcggtaatgctcgctcgcctgcactcacttgctgccgtgcggcccagttcctaacaggccacggaccagtactggttgctgccaaaggtttgggatcccctgcaatagtttaaaggtcacccccacccccaaacaaagggaggtgcacacacacaaacacacacatttctcatgagaaaaatcaggaaaacaagaatatttgtttatttatttatatatttattttgagatggagtttcactcattgcccaggctggagtgcaatggcgtgatctcggctcactgcaaactcagcctcccgggttccagcgattctcctgccttgctacccccacccccctccccccaccccccagtatctgggattacaggcgcacgccaccatgcccagctaatcttttgtatttttaataatagagacggggtttcaccatgttggccaggctgctcttgaactcctgacctcaggtgatacaccggcctcggccacccaaagtgctgggattataggcatgagccaccacgactggcccgggaaaaaaagaatttcttatttgatagttccaaaaatgtactgaggtagttcatggaaaacacaagaacttttaagtctttatacctcttcactatttgggttctggtttttgtgggtttttttttttttttttttgcttttgtttttgttttgagacagggtctcactatctcacccaggctggagtgcagtggcgccatcttggcaatctctgtctcctgggctcaagcgatctgcctgcctcagcctcccaaagtgctgggacaagcatgagccactgttctcagcctattttggttttcaaaaagctttttatttggaaaaaaccttaagcatacagaaaagttataaaaacactacaaagaaattttttcccagaagttgttgacatgataccagctcaccctttatttcctcaaatgagaaataaccacataattacaaccataaaaatcaggaaattaacattgatacattactgccactaatccacagattccagtcaaggttcattagctgcccaagaaatgtcttatatagcaggtttccccaacccctgggtaccagttaagaagcttcttctgtatttatggtcactccccattgctcacattactgcttaagctctgcctccggccagatcagcagcggcattagattctcatgtgagtgtgaaccctattgtgaactgcccatgcaagggatctaggttgtgcactccttatgagaatctaaagcctgatgatcccccattcctcaccatctggtctgtggaaaaacttccatgaaaccggtacctggtccctggtgccacaaaggttggggactgcttttatatagcaaaaggatcctgtccagaatcatacattgtttctatgacatccaatgatttaatcctggcattgaatgagttaatgtaacatttaactactagaatttgcagtgggaagaaaaatgatataaaagaaccgtttatatatttcagctttacattcctgccatatacatcagtttgagtccaggatacctggaacatacatatatatgattaacttggacatataacatataattatatatgtatataattttaaatatagaaacatactatccagtgtctgtcatgtgtatatgaagtatcataagtttttaccatttgtaatattgtcatttttttctaattgtcttatttaaagtttatcacatttttaaatgagggggtgttgacatggcactgaaagaaggcagagatgggaaagataccttttttgtaaaactcaataaaagcttatatccaactagtcagagaaatctctacttccgtgtttttgttttctgtctcttcattcctcctgaagagtgtgaataaataggtttttcaagttctcctcataaagattaagtgacttaatcataaagattaaggactatgagtgatgggttatggagaattctgaaatatcttgcttactggtagattttaatagcttttcaattgtaaagagaatgaagagatcagaagaacttaagaaagggcaagagaagcagaaggaggcaggaagactaaggggatcttcaggggcagagatgggaaaggaagcacccagttgggccagaccctcccggaaataccctcactcaggcacatgttccaaaggctgttgttcatggttgttctctgttctacctccagtgaagatgagctgtccatcttctcatccttctcatctggcctggctgcaaatattatgtagatggttagctagatacctagttttgtaaatgcaagtaattaacatgaactagaatttgttctaaatctgaatttcagtaccaagattatcaaaaatagtgtgtgtcaataaatttggtatttgtttttaagattaaagcaaattgaaattactttgaaagattttttgctttcctttttgataagttaccatagaccttgagataagtagttctattctgtggtgttgtcacaaaccaggctaggactgggcaacactgtttccaagaatagattttatcaatctatatccatgtccacatactcagttctttgttttctctttaatatgtgtggatttttctctattaggttatattacttatttttattatgaaagtagtatatgctcattgtagaagactaggaaaataaaaaagaacgtgtattatctcacaactcatagataccacaattaacatgttgctgtattttctgccactaaaagttctttaaaaaatattttaaataatttaacacaatattccaacccataggcctaacttatttaaccattcccatgttgttggacacctggattgtttctaagtttttacagttataagaagcctttttatgaatgtccttaaacataaattcaggattacttgtttttactttgtctgcccaaattaataggttttagtggtttgacgtctttcaaaaaatgcctaattttaaacatttttttggtaatttctcatgtagcttcctaccctttctaagtcttctctctttcttggtgctagcctaaaccatcccattcgtttaaataaccaaccatttctagatgtcctccctttccagggacttttaatacatggtaaaatgtttgtcctgtatctcatcccccctcaaggctcgtgatgttaactagttaatctgatgagtgaactgatgcttatggaagaggctcccgggtaatccatatttgtgtcctgagatggtgccctagcagggccttttggttaagtcattagtgattctgatagagattctatccagctgagaaaagaagggctgtgctataagataccgattactctccatttttattttctcctgccccaatattctatgtaatatctgtgaatcttcaggcttccctatttattcctgaatggttgagatgaaatacagtaatcagaggagatatatgatatgatataaaatgatatgatgcaggtaatagtttatgatataacaacattaaaaggcaaggtaatcttggtcatattttctttttcttttcttttttttttcttttttcttttttttttttgtgagacagagtcttgctctgtcttccaggctggagtgcagtggtgcaatctcggctcactgcaagctccacctcccgggttctcgccattctcctgcctcagcctctcgagtagctgggactacaggcaccggccaccacgcccagctaattttttgtatttttagtagagacggggtttcaccttgttagccaggatggtctctatctgacctcgtgatccacccacctcagcctcccaaagtgctgggattacaggcgtgagccactgtgcatggcctatcttggtcatattttcattctttaatacctaggccttttctagctattataagattctctaggacctggagatagaatacaatgcgatgttaattccatagtactgggcatgggttctaattctattgcctcctgtagttagggtgtaacctgagacaagtcactccaatcctctggtcttccacttacttccaattaaaatgaatgtaaagaatcttcaacttctctaagagtattgattcggatcccagaagttatatcattcaggatcactcagtgtggcgttattagggctttgttaatttgaacatgctaacttctttttcttctatttttttaattttttttttttttcaagatggaggcttgctctgtcacccaggctgaagtgcagtggcaccatctcagctcactgcaacctccacctcccaggttcaagcaattctcttacctcagcctcccaagtagctaggactacaggcgcgtgccaccacgcccagctaatttttgtatttttattaaagacggagtttcaccatgttggccaggttggtctcaaactccttaactcaggtaatccacctaccttggcctcccaaagtgctgggattacaggtgtgacccactatgcccagccatttttcttccatttttaagaagttgttttgatatttaaaatcaatgtgctggaatgctatgtattaaatcctctttaaacaagtaaaatgtttgtgcactcttacagtggcagctgaatccatcaggagcttatggtcttgaacaaaatgagcctgaaaggagagaaagtaagtatttatgtattgaggtgaactttgttgctgaggagaaaggatatacagtgaattttaatgatcaggtgatgaaaattgtgttaatagatggagcatattatttttgaaggttagatttttgccattcaatttgttcataaatatttgtgggtctaccatatgctaggtgctatggaaagtgccgattaataattactcctatagaatctacaggttaatacaaataattatgcacaaattgactttataaattaaatgcatatgaaacagtaaacagcaatgctcttctataacaaaacaaaagcttattggggagtgagaaaggaaaaatatgtataattagtacagatggattgggaccaaatgatgaggatatatacattcttctagagtaaacccacatttgcccagattggaaatgttctggtaacttgaataatctgattaactaagaatcatcacagctaccataatgaattactagtctttaaagctttattattcgtatactactacagatattttgaatgtaatataatctttgagaagtcttacaattctttaggcacataattttagatatgagtgctatataatattattctaaaatagtaactataggccaggtgtggtcactcacgcctataatcccagcactttgggaggccaaggcagggggatcacttgaaatcaggagttcgagatcagcttggccaacatggtgaaacctcgtctccactaaaaatacaaaaaatagccaggtatcatggcacatgcctgtaatcccagctacttgggagtttgaggcaggagaatcacttgaatccaggaggtggagtttgcagtgagccgagatagcgccactgcactccagcctgggcgacagggcaaaactctgtctctaaaaataaaaataaaacagtaactatattatcgaattatttggatttgaagtaaatggaagttttctgtaagttttcttgataataacaattttttaaccttgaaaaatcaagaagtataaaggtcttagaataatttttctgtgaatatattgattttcagtgttctgaattagctttatttgattcaaatagaaaatgtattgtttgcaatttggaaaaaagtacatatccactgcatctttctttttaaaaatttattagcaaaaaaggctgtatctatctatctatctatctatctatctatctatctatctatcggtctgtctctctgtctatctatacatctgattaaataatgtacactcaatgacagtgtttgaaggggccaatgaataatttcctatgttagggaaaggatacaaaaagcacgaatcataaaaaggttaatttatctatgctacaatgaagaatatctgttcattaaaatatattactaggccaggtgcagtggctcacacctgtaatcccagtgctttggaaggctgaggtgggtgaattgcttgagcccaggagtttgaaaccaggctaggcaacatggcaaaaccctctctctacaaaaaatacaaaaattagccaattgtggtggcacatgcctgtggtcccagctactcaggaggctgaggtggaaggatctcttaagcatgaagaggttgaggctgcagtgatccatgcttgtaccactctactccaaccttggcaacagagtgagaccctgccttaaaaaaaaaaaaaaaaaagatatcactacaagagtgcaaaggcaagccatggaatatgagaagatacttgccacttataatcaacaaagggcttgtatctaggatttattattcctagattactaaggaaaaggaagacatgctgtggttaaagccccaagattggaaggaggggacaaaaggaaggcttctggtttgctggcaatgttttatttattgacccagatgatggttacatatgtttgctttgtgacagttcaactgaacagttaagtttatgtttatgcatttttgaacaagtgtttgatctcagtaagcaataccccatttcctttttaattatatgatagttttactgatatgtaattcatctatcataaatttgcttctttagtagattcacgaagttgtacaggcatcactacaacataatttcagaacattttcattatctgagaaagaagtctcatgcctatttgcagtcactccccattcttcactccccctagccctaggcaaccactctttcagtttttatggattagtctattctggccatttcatataaatggaatcatacagtatgtaattcctttccaatttttgattcagttgagaaatagacaccagaatcaacagatgaaagttacaacaccagctttgttgttagactggggcttgacttttgggtaaatcagtctgtctaactcagagggggacttgctgctggatactctctcagtgccagtagcagggacaaacagagaaggaaggcaggcagtgtgactgacaactctcaagtgcccttccactccatgcaaatggaacccaggtaacccataacaagcattctttttaaagagtcatggagctttcaagaaaataagagaaatattctcctaagaacaaaatagagataagaaggcattttgctagaatctgaggagcaatagtaagcgaacacaatagccagagctatcctggggacaaatgtccatataagctgggatctgagatcaggtctgggtctgctgcaaggtgagtgaactgaacttagttcacccaatcaacacatgaaaagatgattaaacttattagtagtcagagaaatgcaaattaacattgcacggaagtagctttttttttgcttttttttttttttttttttttttttatgacggagtctcactctgtcgcccagtctggagtgcagtggcgtgatcctggctcactgcaacctccacctcccaggttcaagagattctcctgccttagcctcccaagtatctgggattacaggcatgcaccaccatgcccagctaattttgtatttttagtagagacgaggtttcaccacgttggctaggctagtctcaaactctggacctcaggtgatctgcccgccttggcctccgaaagtgctgggattaccggcatgagccaccacgcctggcctgaaatagcattttttataagcgtatgccctagagaaactcttgcatattgtataagagtcagagagacaaagaatttgttgctatattgtttttaaaagcaaaaactggaaataacacaaatgtttgttttgggtggttagataaaaatattatggtgtattcccacaatggactaccatatagcagtgaaaacaaatgaactagagctacattcttcaacatggatgaatcttagaaatataaatgttgaatttaacaaagcaaactacagaattatgataccatttctgtataaagttcaaaaagacataccatatattggttaaatgtggtaggccaggcatggtgctcacacctataatcccagcatattgggagactgaagcgggccaattgcttgagcccaggagttcaagaccagcctgggcatcacagcaaaactccatctctacaaaagatacaaaaaattagtttggcatggtggcctgtgcctgtagtcccagctaccgcagaggctgacataggaggatcacctgagcccaggaggttgaggatgcagtgagctgagatcacaccactgcactccagcctgggtaacagactgagacagaccctgtctcaaaaaatatataaataaataaataaaatatactttaatatatagtatatacagtaaagttattgttaagaagcaatcgattgataaacacaaaaatcaagataggagttgcctctgagtggggtgaaaggggatgggacgagagagggagcgcacgggaattgataatgttctagttgttggattcggcagtatgttttgttttttttccatctccccccaacacacataatgtagttttattcagttttaaacaaactgtaactcttttggggcagtaagttcatgagtgttcattttattgttaggctttagaactcccatctgtattatgtatgtattattatatattacataatacattatatatagagagagagaatgtttcaaatattacatgatatgatgagaacaagaaagagagaggggtggctttccagatctacctctggaaggcaagtctgagccctggcccaggtgtccttaggacaaggaaacagcagggcagaacatacaggctcagggcaggaaatccctcaaaagatgggaagaaaggggcagaaagaagcttttgcaggtgatagatatgttcattgtcttgactgtggggatagtttcatgaatgtgtacttatgtcagaaatcatgaaactggactaagcaaaatggctccttcctgtgatcccatcattttgggaggctgaggtgggaggattgcttgaggccaagagttcaagaccagtttgggtaacagactgagaaccccatctctacaaatattacaaatcaaaaagtaaattaaaaaaattcatcaagctatacactttatgtttagtttattgcatactttaaacatgtatcatttattgtacaaataaagctattaaacacaaaagccaggaagaggttgaagccatactcttttcccagcctgcccagtcagataagtccgtcttccttccagtccccagattctccctaccccacacacagtccccttctcccttaggaggtacattttatttcttccagtctagtaataggacgtccccccaccaaaaacataaaacaaaaagttttatgaattacttgccgtacactgttgagtgaattcagtttttggttttttttttttttgagacagggtctcgctgtgtcacccaggctggaatgcagtggcacagtcatggctcactgcagacttggcctctctgggctcaaacagtcctcccacctcaggctcctgagtagctgggattacaggtgtgcgccacaacacctgtttaaaaaaaaaaaattttttttgtagagatggggtctccctatgctgcccaagctggtcttgaactcttgggatcaagttatcctccctcctcagcctccaaaagtgttaaaattacagacgtgagccattgcacccggccaatgtgaatccagtttttaaaagccagattctgtattgcctgagagtaagttatctagattggattctctacaattgagaatttgaagataaaataaagtgaaagttcctttaacttaagcattgttttgctcttacaacatgtaaggctgaaacaagtgcccatgggtttgaaatgaagctgtcctgacctagcgttattctcaatgctagatggtgtgttgagacctgtcccacagaaggaagagcagcaccaggacaagaagctgcgcctcggaatccactaagaaggcctgtctacactgcaggggaacctcaagaacttttcattgcacttctaaaattcagccttgttcattcagaaaataaggatggattttgtgaataattgaaaagattttttaaggaagctaatttatttctaggatacaaatggtgttaataagaatatttgtcttttagatttatgtgtgggttttccataatgtagtagtgtgttattttattacacgaaatgagggagcaataacttcaaccaatgtaatcaccaacagggactgatttctatttatcttgactttatattagccaatttgaaagggtctgcttcacaagaggtcatgcctctgcagggaatcacacaccttttgagaaatattaattcttttgaattacaagagtgacagttagtaaactgctccagggaaataagtgtcatcttttaagagtcagtgtatagcaaaccaaaagatcacatttatacccaaagctttctagtaatcagaatttacttaattagaattgactcataaaaataaagttagtggactttgtctccatttttaaagtatattttgtaaatgttaattctgtggtcctgtttatcacagactttgggtagcaataggaagagagtgttattctgagacagtgtcgctgcttgatatcactgactcttgaaatcactaacagtgaacctcaaatttggttatgatgttaacagagaagaaatatttgagtctggaatattgaaactagctttcctagaattccattaataaatgctgctcccccatatagtcttcccttctgtataattaacataggttgtctcatggctttgatcttcaaaaggaagagccttttaaaaacatttgccaacctcaagaataaatactgaaagtcttgaaagtatggtcatttcagctattccagattgctgtctgtgatttctcacatttttatttgctgagaaacattcagaaaattattccaaaaatgaaggtacattttctgttctctcctaggttagagaggggtggcctggggtgcttcatgagaaatgtcttcctggatctgcggtggtcaggtttgcctctgcttttgttccctgcctttccgccacatcacacggcctcactgggcttcctaccagtttctcagaattacacgcacgaccatccaaacattggctccatgccagggctgtgactgcagcctgtgtaggaccatggggagttcagagtcatcatacaaggcagccaagaactgccataaacactacacagatggagggcatgggataggacaggagaggaggtgatgtacacttagaggtaactaaggctagtttgaaaaccgtgaattaagatattcttatcagtataaaaacactgagattgcttacctcccaaattgctttattgtattaactctcatgcttcagctcttggatttgttgtttctaactaacatgtcatgtacaccaaacattttataaatcaatcagtaaatattttgtaagacccaaaatcctggcatattgccaggtctgtggatttgcctgttgggtgttgggatgggatatcagaggaagaagcatacaagtgggaaaaactgtgattagaaagggaaaaataggcatttccacagtactattaagagaggcatgataatgccattttttttcttctgtacaactggtcagatttcaataaataatcattgatggtttactgtgtagcctcagaaggtgaagtctatgagggcagggaggtgtgtgtgtgtgtgtgtgtgtactttttaactgctgaaccccagtgtctagaacagtacctggcacacagtaggcattccataaatatttgtttattgattgaatgactgctaaacactgctagactgcggggatgagatgtgtgagaaatgcctcctgatcttaagacactcacagtcaagtggaagatacaagcatggaatcaagtaattaagaaaaatgattctcaggccaggtgccgtggctcacacctgtaatcccagcactttgggaggctgagtggggtagatcacttgaggtcaggagttcaagaccagcctggtcaacatggtaaaaccccgtctctactaaaaatacaaaaaaaaaaaaaaaaaaaaaaagctagacatggtattgcatgcctgtaatcccagctatttgggagactgaagcaggagaatcacatgaacccaggaggcagaggttgcagtgagctgagatcatgccactgcactccagcctggacaacagagcgagacttagtctaaaagaaaagaaaagaaaaaaatgtctctggaccagcagactatttgttagaagtgcatattcttagggtgctccctaggcttactgaattagaacctctcagggtgggcccagcaagctggggtttcacgaccttgcgggtgattctggtgacctttaaggctgagaactgccattgtggatgtaactgtaggaacagtgggggcacacgaggatttaccagcactctggggagtcatggaaaggaccctgtagaggcagaggtgatgaggtggggcctgaggggatccaggggtttgccaggtaaacagtgggaatgagacaaatttctgggaaaaagtgatggagacagactgctgagccaccccaggagcccgcctgggtttggagaagctctgtggggcacttttgacccagatctataaattcccagtcttcatcccttagcctgagaaatcagaacttacacttaaacaaaaaatacaatgtctttctaaatttcaaagaatgggaggatgatggtaagttcataatttgtaaaaaaaaaaaaaaaaaaaaaaaatagctctgccatttgtttactgcctaagtggccacagaatatgctactgtgaggggagctaagtgtaagcatttgcctggcttccttcatcccagtcatgcagaacatacgcaggtgtgtgtattttcattgtattgctgctgaagctttttctttcctttttcaagacagggtctcactctgttgcccaggctggagtgcagtggtgccttcatagctcactgcagccttgactgttttctgtgctcaagcggtcctccccacctcagcctcccaagtagctgggactacaggcacgtgccaccacgcctggctagtttattttttatttattttttgtagagacaggggtcttgctatgttgcccaggctggtcttgaactcctggcctcaagcaatcctcctgcctctgcctcccaaagtgctgtgattacaggcatgagccaccgcgcctggccaagttagctttatttctgggtcaatgaatggtaccaacactctataaacatgaactctatctttagtgacactatgatacataaatgagcttatcgcccctgaatgtctatatctaaacccacgtaacacttgggaaggagaaagaaagaagtgagcccatcttgggacaggagctcctttggtgagtgtagcacagagtgatttgttagggaaagcacatgtctttccagaaggacatgagccagaactttcctggaatacttcccaccaccccatgattctcagaaattggggtccaggccaggatgaacgagaaagaaaccacagttcatcccagtgctgacacccgtacccagagaggcccgggccggggatgtatcccaaggacaaaaggtggagggaggaggctggggggagttcacttcctgtggagtgaatggaaacagcctggctctgcctaatgtgcatgaggggctgggggtggcttgaacagcttgaagtaccttgtgtagtgtgtgcgcacattcacaatgttagaaaaaaacaaaaacaagagctaagcgagaagtctgaaatactgtggtgtatgatgctgttgagttgcaagaaatggaagctcgtgagccgggaggcttctgtgtggcagatcgtaactcctgaccaactttgtttcacccatgatgataaccagcagaggttctccaggttgtttatttttgaacatggtacaattcattaacaaatatttgccagggcttagcttaccatgagccaggcactgtgaggagtgcagttacagtggtgaggaaaaccagacacaaaccctgccctcgtggagcttatcgtctagttggggagatggacatacatcagtattcatgaaaatgaatgaaaggtacacagaaaagaactggcctcccaacaaatacagggacatgttttttcagttcttccacttcacagagatctggtactattataatggcaccatgggctgcacttagtggacccagaaagttctactggtttgggttttttaaaagatatcctacacgcttaagcagggaatcttttggaaacctctggaagaacaatcatattaaacatgcaaatagggctgggcacggtggcgcacaccagtaatcccagcactttgggaggctgaggcaggtggatcatgaggtcaggggtttgagaccagcctggccaacatggtaaaaccctgtctctactaaaaatacaaaaaaaaaaaaaaagaaagaaagaaactagccaggcatggtggcgtgggcctgtaatcccagctactcagcaggctgaggcatgagaatcacttgaatccaggaggcggaggttgcagtgagccaatatcgtgtcactgcacttcagcctgggcaaaagagcaagactatataaaaaaaaaaaaaaaattggaccatgacccttaacctcaagattctgtgacttgtcagggtggaaaaaaatgtatgtaaataagtatagatgtgataagctttaataaagagcaggggaatttagagaaactgtaccaagcattaaatgtattatttttagtaaccagaaattccttctattgatgtaattaagattttatagtgtttgagaggccaaggcaggaggaccacttgaagccaggagttcaagaccagcctgggaaacatagcaagaccctgtctctccaaaaagaaactaaaaaattagccagttgtggtggtgcacacctgtagtcccaagctgctagagaggctgaagcgggagaatcacttgagcctaggagttcaaggctgcagtgagctatgcttgcaccactgcactccagcctgggtgacagagtgagacactgtttcaaatagaaaaaaaactgcatatagtactttactctcagatatgagtgtttctgttgaccaggaattttaccattcctggttctctgatgcggaggtggccttgtgaaaggacacagtttctgctgagctgaacacgctttagtgtaatctgatgaagaacttctatgctggttgcggtattggtggaaagtgttttattttgcagaaaaagcacaaattccacagagggcaacagttatccattcactccatagctatctattgctgcatgacagactaccccctaaaacttagtggcccatgccactattttattttgcatgattctgtgagccaggaatttgggcaagattcagcagaacagctctactccctgtggcactggctggggtcatggacggttgtgtgccactggtgggtcagttgagaggggggcccagccggcacagggacagtgaggctggaccatccaaggggcttctttcaggtttctggtgcctcagcttggatggctgaaacagctggcagctggccagggctctccagcagggtggccagacctctatgaggtggcaagggctctgaaagtgaatgctccacaaggatgggcccagtgtgtcccccttgcatcatgctggctcatggatcactggccaaggccagtttcgtggccacacccagagtccatgtggaggggcctgcacaggacatgaagccaggaggtatagttcacaggggaacacaaaagtaacgttcactgcagggacagagcagatcactgaagggaatgccactgggaatcgagccccatgtcctggcccctgagcagagttctgtccccaagaccattactcctcatggaacttttcacctccctcacacttacggcaatgctaacagtcactacacacggttctgagaaccttcaaattgaagccctcatgatgtttcctaagaagttgcagttgtccaaatccacaaacccagattttagttggcaagtctgagaggttctgggtaactgttttgctgcacaaacgtgggtattcctgaaagtttaaagattcatcttcaacatgctagggaaagccaccatgatagctagtctaataatgcccagaccatcccctcattgatgaatggaaggctcacattttaagatgaatatgggccagggaggtttcacctttcttggctgaggttgatgccaaagtgataaaccttggtgcttcccgcctccctgttccctggggatgggccagaatcagatgccatcagggaccctgcaggcaattctgagaattccttttaagaagacacctgcaggaagggtgaaccgctttctagcccttctgcagccagccactccccctgccttttgatgacacaggttctgcataaggtgagagggaggacagggtgacatccatttcttgtaaaaatgcctcaatgagaaaagggccacatgcatttcttgtaaaaatgcatcagtgagaaaaacaacagcagcagcaacaacagcaaatatttactgaatctcctagtatgatccaagcccccaaatcaagaaaatgtgaatgctgatgtaaaaaaggaaggtatttgttcaaactgcctggccagtgtttttgaagaaaacagagatctccagagaccccttttttggtcctaagtagcaagcaaacaagttcattaaatgtgtactgtttatttgtgatgtctccaagcagagtagttggctcttgttatatatctgggagaataatcaatgatttatgcttctgacagtcttatcatagccatttacataatggtcatgtgtatttgtgactttaataccctctgcatatagccttaatttttaaatggattacactgttttgctgttgtgactttgcttgtttaatcatagctaagacttttctgaagtcaaatactttttccattatcacagtgaggcgttggcaaaaaagtgggggcttgctggttacacttgctgaaaataaatcttgcgtttatttggactctcaagattggagctctgaattcacatagtccagtgtttatgcacagagcaccactggcattgccattgattacgactggcatgaccactgccagaggtttagcagccctggcacacatccaccaaatgccatttcaatcactcagaaatttctacaacaacagaaggccccccacatgttgggatagtgggctgcccttgcttgagcacagctgatcgatccaaccactggtcagcggttgcatctcctcttcaacactcccctaaagggacagatcagccgggctctgctccagcatccccagcgatgaagaagtcaccacctcctgaagccacattggcctgtcctcattattaacatgttatttttatggagtaaactcctcccccatcaccccctcagaccttgtctataacacaggcctctttgtgtctcctcccctacaggaatgccctggagtacttgaaagtagccattgtgttcctgctgtcctgtgacagcctcccacctctcctggaaacttactgtgtcattgtagctaggtttgcattttacagtgaagcattttttacttcacctcattaaatgttcacactgtgaagcagggattagcatttccactgtacggataatgaaatggagtctcaggttaaacgacttacccaaggctacactgctaacgattggcagagccagaacatgaatctgctccaaattcaatgcctttcataattttcccaatatgcacttcatttttttttcttttctttttgagacagaatgtcactcctattgcccaggctggagtgcagtggtgtgatcccgactcactgtagcctcgacttcttgggctcaggtgatcctctcaactcagcctcccgagtagctgggactataggggcacaccaccacaccttgctaatttttgtattttttgtagagatggagttttgccatgttgcccaggttggtctcaaactcctgaactcaagcagtgtgcccacctcggcctcccagagtgctggaattacaggcgtgagccaccgcgcccggcacaatatgcaattcgttttgtccagcctctccctctgatgtcttcattcttcccattacaactccgcatgtctcctgtggtggaaggcatcagtggccccaatttttcacccttccctttcacatgttttgccagttccatcagcaggtggaacttgttgggggactttgttttcaatagaataagatggaaatgtcctcgtgtgagtttcgacattaggctcaagaagcctgtgtgtttccactttgcgtttctgccatcaccaaacatccggagcagagccaccccagctagcccagccgagattaggtgactcccagccaccccacagacttaggaagaaaacattggttttatttaagttattgcgtttcagggggctggttatgctgcagttgctaagcaatacatttctccaactttcaaaaagcttccctttccccacggggttcctttcccttcattacttggaagcctgtgctagctttctcaacatcctcctcctgtttattccacaaaccactgctgcctttctgctccccctccccatgggaaggtgctccccaactcctagtggcctaaccctgcttgggccctgggccttcagtgtgcagcatcaactcgtcctgaacctctccttttttggcttcataacgcttacctcttgtcggcctcgacctgttcttgtgtttcttatctctctcctctcctcccatggctcttcctgggccctctcacctctttgcttcctctccagggcccccatcctttcccaggacctcgaggaccaccaaagtgctgacgactgttcccagcctgcgtctcttcccaggtgcagctgtgtgtgcacgcccctagaccgctcccccgggggcctgattcacagcaatgatcaccagcacgtgaggaaagactggcgtaggggagagtggccagggttcccgccagagaggtgttgcaggagtccaggcgagaagcgatgcggcccaacagggcattagggtcaccagaaccccctgtctgggcacccatgcttctacctgcagagctggagttttgtttgcagaccttagtgtgggacttcacatttatccttattaaatctaggcatggtcagattgcacccaacactgcagcttgtcctaccgcttgctaattttgtttcagacactaattaggcgtcgctctcagagaccagggtcactcaggcatttgatcaatgtgttacttgtgtcccatccaagtcatcgataatgttgaatagaaagggcccagcaggaacacagtaaagactgttacttgttttagccactagagggctgcatgtcccagaaattgatgcaggtgctgcttagaagtgaaactaggaaatgtgagcactgttgggttctatggggtttggagtttccagggcgggggcgcagaggagagtgtagcacactggggagcagcagatggttgtagcattcgtgggcaaggagagggaggagtagggggttggcagagaccacgaagggccttaggaacacttctggggagcaatagggagccatagaaggactttaagcagaggccacacgatcatatttgcttttttttttttttttgagacagggtctctctctgtcacccaggctgcagagcagtgacatgatcacggcttactgcagccttcaccttttggactcaagtgatcctcctgcctcagattcctgagtagctgggattaccggtgtgcaccaacacacctggctaattttttatttttatttttgtagagacagtttccaggctggtttcaaactcccgggctcaagcgatcctcccacctcagcctcccaaaatgctgggattacaggcactagtcactgcgcccagcccctatttgcatcttaaagcagtcactccagcatccgtgtggaatggagggaggaagaagggaattggatggctgctggttggttcagaatgagaaatgataaaggtctaaggtgacatctgaagggaataaaggaggggacagaggaatgtaagtgaactgagcagaatgagggcagagtggcaggggacagaatggcaggagccacccaacaggaggggagggggagggaatgggagggaagggagggtcacctggaagatgtgagggggccagggagtgaggagagaaagaggaaagtgaaattgtgctttgtaaagaatgagtcgtacattcactcacgatagagcatttattatgtcgcagacactgggctagaccctggggatacattcatgagggaaacagacactgcccctgccctggagttttgcaccctagtggagagacagcaggtatttggggcgggaggctcctgtgctgggcctgggaagcccagaagtgggtatttaagctgagagagcaaggatgagaagcagcagccggtgaagaaagctgggaagactattcccagcagaaggaacggtatcagggaaggccctttgggagggatggaaaagcagccaggcttgctggacttgttgcaggaggaaggctcggcctgatcctgtgtgctttaaggacagtggtcagggctttgggtttgattctgtgcatcaagggaagccactagagggtttgggggcaggagagaaccatgaccagatgcgacctatgaaaagatcactttggatgcttgcagagatggggtgcagtccaggtgggagccatgcagatgcagagagctgctcagatgggacacaagtctcagaagcagaaatgctgatgaattggctgcaggtgagaggcagagagaactcatgtgccttcctgggtttctggcatgaacaactgggggaatttcaggggcatcagcagagctggggaagccaggtgcagggagtgacaggaagtcacatgccatattttgaactgtaccttggagagagggagcctgagaggcatccagccagcaggtgagtgcatgcatgagcttggagattgccgaagtcggcccggagccacagaggtgggagccacggtggggcacgcacagaccacagacctgaagccttgcaggaagacagggagatggagaggagatgcgcaggagactgagtccaggcacaacggtgctcagtgctcggctctgaggtggaggaggctgagctgagagagcacaggagggtgaggttgcctgggcgacaggagaggagagggcctggagaagaggccaccagctctgtcacctgctgctgaggggtcagatgagcacaggaaatcgctactggatctggtggctctgaggccctggatagccctgggaagagcatcttccagggaggtggggaagccagagatgggtgggttgtgaggtacatcacaggtgaggaggtgtagcccattcgtggagaaattggagaagttttgccctgaaggagggcagagagacagaaaaggggctggaggggcagctgagggataaatggtgcttttttgacgggtgacgcacatcttgtgcaggaactacctgaaaacttgtgaagacattagaaagaagagccaagacccaagaagggaattgaaggtgcgagggaaactgtcatgcccgccctgccctggccttcttatacgggtgcctgttccctggctgcaggtcacgtgccacatcttgattctgatgggcatagcacattgacaactgaacaaagccacccggcttggaaatggtccctggtcaaggtgaaggacacgcctggtgctgccagaggccaccaggcagctgcaggcacgccctcttccttcctcccacacgcttggtagcacagagcctcattcatccaggccagcaggtcacagccatgggaatgtcatgctcagttcccagggaaaagggcagaggctttttcccctgcagaagaaccagtctgcacctagggccttgcccgttttccccaagagtcctgtgattatataagcatcatctgtccctgatgctggggtcctggtcaagacttccccagggcggggctggggtgacacagctaggccctggcctggagttcaaccaccctttgtcctgatggcactttataaaaacactgtcagcctggtctctgggataacagggttacaagcctctggatgactaattggccctcagaactaactggatcaaatacaaactttgggatgatattgcgtgcccccaggccaggtggagacctagactgagcatggacactgccatggagaaaggacatgggaaccgtggggtccccctgctgcccagccacccccacacctcgggttgaggtgggatgtaggttacagataaggttaaaatacaaatggaggcaggtgaaaagttgggtgggtccggaggtttgaatcgcagcaaggaatggatcgcttcctcttcacccagacctcagctgctccctaaatctcagtgaccgccaaatcggtgcctctggcccacgtctttcttgagccccagactcatttgtccaacggctgcctggacatccccacgccacgtctccaggcacaggacactcgtgtgcctctgccccccatcccgggctccctgtcttggctgagcacatccccttctactcaggtcacccacgccacaggcccatgtcctccagaaatggttcagctatgcctggtcaatagtaaatcctaagtatctcccaagttctatggctgctgcctctgggctctgggtttgaatcctgcaccaccatctgctcactgtataattgggtgagcaaccctctcagtccctgtttccatgcctgtaatattgggattgtgaaagatgtcataatcagaatggagccacttttgttaaaaacaaatcctgacaaatagagccaagggaaggccatgaagagaaatattcgcatgcataaatgcctaataacaaaaactaccacggcagactatgaaaactgcaaccttgcacaaaaaatgcttctaggaggacagctgcccagtaactacctgtccagccttggactggtgtccctcttgcaattaacccttgcagccaaggatcattacttcaaagcaacaatacagtcctcactttccttcacctttgccttccttcatctccctgaaggcacacgtgctttttactctggcaggcatactccctggcagtgccctattcctgagtaaacatcactttctttgagagccactctctggttatttaggttgacaggataatcacagtacgcacctcataaggtttctgaagactgatgttaatactctaaagcatctggagggggactgccagcagcaccgagttcgcactcgctgttaccagctggcgctcatcatcccaccctccctcattgttccccctccaggcccggctccagagctctcccccaccagacacacaggtgttcaggtcacttcctgaataaaggccagccgccttaatgatggcgtcagacccttagctgggcatttaaggctccctcccggccctctcacatccccacatgccccggacaaagcgcacacgcctcgtcattttccagccatgcttcgtgcccacggccctccctgcagcgggaatctctcgctctggtgacggggctaatgtgggcgccgaatctgagcccggcatgtcacctactttacctcgttggttcccacaacaatcctgtgaggcaggtcctcttttggcctgtttcctggaagctcggtgattctcaagagggaacagctagccgtggagccaggatttcagtccaggtgtggcctatcccaaagtccaggtggttctagttaatccacacaaacctctcatgagtagatgacatttcaaaggaaaaagggacctgacgtctccgagatgggaaaggatggtagcagggtgtatgtcagcatctccccagggcagaacacatctggcggcatctgcaatgtctgttttgctaagcatgagcgtgtttccacaattccctctctggcaggtgatgaattagagttggtcccaagagcacatcgtgtcagctgtgaggggaggtgaactggggcgggccccgtgtggtcacagctggctggcgttgtcagagacctctggctccccttgttgtcagggttccccattccctgcacctcccccttcagcttcaccactgtgggcccagtgtggggggctctgcactgaagggtgcctgcccttctgtaggtccgccatgtcctcagggtcggcagagggatctgcccttccccccgggctcctcacctcctgtctatcctcccttctctgctgactcggccccagtgccagctgcaggggacagacttacaaaggcctctgattcccctgccccacgagctccaccaccacaggaggcctacagtaaccccggtgtgtcactcggggtcctgtcccaggatccatccctaaccagcaaggagaatgaattcaacagatgttaaatgaacaaataaatgagtagttgaatacatatttttgctttacagctttaaatatcagaactaaaactaaaagtgatcttattttttccaaccttccctaaaggataaattatcaatgtatattgcaacatattctccaaagggaccctatgatcacagtattttaaagtaacacagatggctctcagtggagtgattaaattgcatctatgttacattggttgatggtaaaggggttgcggctttttgtgtgttttgatggcgactttattttagggtattgtaactgcacatgctcctccatgaggaggaagtgatgagggaaggcggggaccctggcaggtattggatgtgcatccaccatgaacttcagcctctgtagccccatggtgctggggccactgggaaatggtggaatggctggctgagtggcaatcgctcctgtcaggaaatctaagctaatgttatgtccaactgaaaaagaaagccaagaaaacaaaacaggtgcagaattgcaatctgaaaaaattttttaacactttaattatttaattttattttctacagatgaagtctcgctacgttgcctaggcttgtctcaaactcctgggctcaagcaatcctgatcccccaactctgccatacccgccccccatccccagcccacccccatctccacctcccaaagtgctgggattagaggcataagccactgccaccgctgcaatctgaaattaatgcctatgtcaagttgaaggactgctcaaaatattggagaggttcaagactgaatgtccctacgctatacagaggtctaattagatcttccaaacatcagacaaccaagtgaagttaagttacctacccccttgaatgaatctagcttttgaaatctttccgctgagttatcctttagcgctggtatccagaattcctttttccgtgggggctgggaggagatgaagttatctgtcctgggacagagagctgaagaataggccgaggggcctgaattcacagcctggtttccaaagacatggaccttggggtcagccctggccctaaatcctggctctgtggccagctgtctgatctggagggagttactcaccctctctgtggtccaagtttccctccatcaggtggagactcgagtgagatgtctgtgcaggcttagtgcagaccagaccgaacactcagcttttctctgcttattatggcagctacataacagcagtttccatgtttcaaaaacaaaatcacaccttgtttacatccatcttcaatcttttcaatctttttatgtagactaagtctagcttttcagggtatcccaatagtatatgtttcagacctttatctaactgtgagcccccaatacaatatccaaaacctttctgaaagaacactcatgaagagatggtgttcattcatgccacatgtataatattcttttggataaaatggcaaaacaagtaaaagacataaaatcgtaatgtcctctaatacaacaggccagcaagatttgtaaatctgttttgaaacaactatcttttgacattaaaaacgattccaggaatctttgaatttcattttccttcacattgttacaatcactttcagtcttatataatttctagactgtgctatggctcacagcagctgtgtctcatgggaaatgcagacaaaccagtctggctggtgaggggggctgtggaaagctcacagcccctccttggacagccacattgctcccccagagccatcaaaggaggtccgcctatgaggctgagggtctgggacatttccaaggggagggtgctcctgagtgttttctccaggagcaatcctaacttctgggcagatgcctggctctggccaagagcctcgtccaagaacattatgatctcagtccctactggcctaacgctaggacgcttccagctggggaacctcccaggcagcagtgggggagagttccacatggtttctgatgccctggaccatccctagttcacagccttgacgatgggacgggtgcagggtcactggttggtggggcatacaggaaggtgtgctggggccctggggcagcataaggctttccctgcctggaacggtggcaagaacaaacacagccacacacatgcaatggaatgaaaccaaccaagaagtgtgtggtaccttttatttagtcagtcttcatttaaatgtgtgcttttgaaatcactaaatatgaccttttcagaattcaattctcacagtatttacagtgaactttgtgcaaacaaatccccctttgtgcaaagggggagcttcctgctccccctttcacattaataacttacaaattcagatcacaacaaaaccccagactctagttttctgtttgaaaggtactgagctgggataatgggttgctaggaaagagctaatgcaagcccaaaggaaataaaatgttttctttatcagaaaagaataataacaaggcctcactctccaaaggaaaacagacgtcccaagatgttgtggaacagtattaagtaaccaaatacaattccaatggttatttcaccttcattttttatacttacactcatctcttttaattaaataagcgaaaccagaaaagtgcaattcgaagggactctgaactgtcagggaacgttataaaaataatctgacgtcagtgactaaagagtacgggtcatcaggctgccggccggcctcctgcaagggcactggccagggaggccacagctgccaaagcggggaggtgcgccaggccccacatcacctgcctcggggtccatgccaggcaagaaagaaacacacacctgggcctagccaagggtggtgccctgccaggtaactcttcaggtacaaaatctacaaaggggatcagtcctggagaacacatttctcttcccctctctaggcagagaaatacctggctgaagaaaaactacacaacactcaagtaatgtataagggagggttcctgtggaaggcaacgattcatgatttagaaactgaagtgtaaaaaatacagatcaacaattgtgcctttcattcttgtaaaatatcgctttaaaatcccgttttagatggttgatgtctgaaacgaaaccacggccttttaaaatatttttgattccaagcctttttataaggaagaggaattaacacctcaatcatcctagtcacaagagactattcaggaccaaaactgtataggctttctatgtgttcactaaagactgtgatgggcaattatagaatgacagcttattagaaaaaaattgcttttatcaacatctgatacaatggctctgaaaaaaatttattgatggatctgagaattttttcacacatgaatcatttctccttccaatggttattgatactgatagaagttccccgctgagactccctggacccatggtttgtgcctgctgggcatcccactatgctgattcctactctaaaagacacttacagcagaaagcattcacccatgaccattatgaaggaaatattctgtccctcactcaccctctggaagctaatatggagcagcagtcactctatccagagccacatgttcacagttctctagcaagcaggtcacaccccgtgggtcccctattccccgtgacccttgttgatccatcctcttcctgctcagttgctcccctgctcacctggactgcgggaggcatgggtgcgcccactgaggccatgctgaggagctgggatggaatgcaggacagggagagaggggagactgagctgagagggagcactggatcctgggaggtgtggatgcactgattacagtccaaagacattggcagcaacaaaggacacacaatgactgaaaacattaacgttaccttctgggatctctcagtgccctgagcgatctgtgtgtctacctacagatgggcaaagcatttttgcaccctggccccattcccagttctcccctgagaactcagtcctccttgaagacttggtgatgcctgtcaattgagctcccatttagcggctcattgtgcccaggggctcacatctgcaagttaaaattgcttttatcaacatctgatacaatggttctcatttcacataaataatcacagacttgactaaaatgaatatattattctaggttaatttttttccattcaaatgtttatactccatctacccagaacaattacagcagaaaaaataggcacctccaaagtcttcccaagaatgatgactttctgaaatgacacactgtacaaactggacaaatgagacgactgactgtgacaggggccggggagctcttcaaggggccgttttcttcaagtctcggatctgtttaatcaagtagttcttctcgtcagcgaactgctcatcatccgtcctttctttttggaagctgctcagaaactcaatgagtttgggctgattttttaacaggatctccacaataggctgtgttttgtgaggactggccacaaacacctgaaacaaaaagaaacaaatacttaggagtgcaagccagggacctcacccacgctacagcagtgcaggccagggacctcacccacactactcgcgtttcatgcgtgactgatattattaatgcgtagaagcccctgactctaattctcagtgagggtgatcaatacagtcacacaccacataacgacatttcagtcaacaacagaccatgtatacgactgtaatcccatagcaccataatggagctgaaaaattcccattgccttgtgatatcgtaggtcagtgcatttactcatgtgtctgtggtgatgctggtgtaaacaaacctactgcccggccagctgcataaaattcaagcccgtacaattatgcacagtgcataatacttgataatcaacgacgatggtactggtttacgtatttactatactatacgtctaatcattattttagagtatatgccttctacttagtaaacaaaaagttaactgtaaaacagcctcaggcaggtccctcaggaggtatccagaagaaggcactgttatcgtaggaggtgacacctccatgggtgttatggcccctgcagactttccagggggacaagatgtggaggtggaagcagtgatactgatgatcctgaccctgtgtaggccgaggctaatgtgagtgtttatgtcttagtttttaacaaagaagtttaaaaagtaaaaaataaaaaactttaagcacagaaaaagcttatagaataaggatataaagaaagaaaatgtttttgtacagctgtataatgtgtttgttttaagctgtgttattgcaaaagagtaaaaaagttttaaaaaattaaaaaataaactttttataaaagtaaaaagttacagtaagctaaggttatttttatgtatgtatttatttatttttgagacagggtctcgctctgtcacccaggctgacgtgcagtggcactatcagagctcactgcagactggaactcctgggctcaagcgatcctcccgcctcagcttccccagtggctaggactacaagtgcatgccactgcacctggctaatttaaaaagtttttcgtagaggcaggcctgactatgactgccaaggctggtctcgaattcctggtttcaaacaatccttccaccttggcctcccaaagctgtgggattacaggcatgagccaccatgcctggccctaaggttaacttattattaaaacaagaaaaaaaattttttaaatcaatttagtgtagtctaagcagtgtttatgaagtctacagtagtgtacggtaatgtcctaggccttcgcattcactcaccattcaatccctgactcccccagagcaactgccagtcctgtaagctccatttatggtaagttccctatacaggtgtaccattttttctcttttatgccatcttgttactgtatcttttctatgtttagatacccaaataccattgggttataattgcctgcagtattcagtatggtaacatgctgcacaggtttgtgctctaggcgcaatagcccacactatatagcctaggtgtgtggcaggctccaccacctaggtctgcgtaaatgcactctgtgatgttcccacacaaaggacatcgcctagtgagcatgtttctcagaacaactccctgctgttaagcgccacaggcctgcacttcacctttcctatcactctcctaagtcactagctaggagcacgtgggagctatctatgaacatttcatatttgactttgttttacttttaaatatttgttcttaactataaaatctttcaaacagaaaataacataacaaatccagtatacgtacctcacaaattgaatagattttaccattgtgcctcaagagtctctttttaaacaaataaaacattacaaatggaaccaaaccctcaccttccacctttcccctcccacctccagcagtgtgccaccatctctgggcacatttcaatccttatcctcctattacatagatatttaaacataaacaacatatagtatgaaagagcttatgatttttaaacataatttattttttgaacacataatatcatcacctagttcaaaattcaaaaaggacaaacgtgaatagtcctcctctcaccttccctccctggaggtcaccaatgtcactgtttgttacatatgtgaagctttaaaaattacaactgctgggccaggcgcggtggctcatgcctgtaatcctagtactttgggaggccgaggtgggcggatcacgaagtcaggagatcgagaccatcctggctaacacggtgaaatcccatctctactaaaaatacaaaaaattagccaggcgtggtggcgggcgcctgtagtcccagctactcgggaggctgtggcaggagaatggcgtgaacccaggaggcgaagcttgcagtgagctgagatcgcgccactgcactctagcctgggcaacagagtgagactccgtctcaaaaaaaaaaaaaaaaattacaactgcccaggtcctacctcccagatacgtcaactcagcaggtctgtggtggatgtctagcattctgtatttctatgaagttccacagagattcttatgtgaactcctggtggaaaccacgatctgatactgactggtgcactattttgtaaaagacacactccttagttactgctacatacatgaccacatgaccagaatgcagatcaaagtgtctctgagccctacagagctctctggtgtgatggtctggcctcctgcctctgcctggcaccccctctgcccacccatccctgtcccatagctgtgcagtgcccaactctacagggaacacactatgaaagggcttagttatggggcagtgggggtttcatggctaagcctttaaggttcctccaccctagcaagtgtggggaaggagaaaactaccctaggatgttgagtaccaatgtggagaatacaagactgcagaggctcccatcccaggaggtggcgatgacattacatttccgggtttggaacaggaaggctcatggtgtgggcggcatgagagctagtccatgagtcaggcagagaatgtttacacgtggtggtaagaaaagcagcattccaggaatactgaattgtcccactgcaggctctgaggtgggcgggacaggacgtgggagcaacagtaagaatgagtaagggaacgtgggagctaaggcggcgccggctctggaacctgggttcaaattccacctctcctacatgttagcagtgtgtccaccagcaaagttttgttatctagaaataaaaggacctctgcctgtctgggtggggagaatgtgctggagaacatcagcagcttcagcacaagtaagtctcctgaaagccttctgttgtcactgtatgtggggagtcgtgcttgctggaggcaaagtgcctgaactgaattcaaggcctcgtcactgccccatcaccctaattctggtcaactgtacacacgaccgtgggcagccagttcatagccctcccagctggttgtcttcattcatggggctaagtgtttcacactcatcgaacacttaaccctcacaacagccctgaagtataagagctgttatcctcatctgttaataaggaaacaggctgagtcatattaataaacttgaccacatagtagtatggttaacagcgcagattcagaagcacacagcctgggcccaaatcctagcaccatctcttattagctttatgatttcacaaaacttgtttacctctctgtacctcagtttcttcatctgaaaaatggggatgataacagtacctgagtgccattaggtaactgtgaggcttaatgagaacagtatatgtattctactccatgcattcaaatggtacatggcacacagcatgcaccattcaaatgcatggagtagaacacatacattgttgcaaaattgcttttgccaggctcacagaactagcaagggctgaagctgagattaatcccaggatgcttgttctgagaactgatgagatgtgacattttaccaggtgaggttcagaactagaaatcaaagcccacaaatctgatactcagttcatttggccaatttagttctgaaattgttcataaatatgatatataaattcttcatgtttctgttctttccatcaaaggtcatggactcactcacacagcaagtgctaaggaatacagaaccctctctgggaacactgcacgtccctgtggtcacgagtggctcatgatgagacagtctcttggcagcccacatggcttacttacagtgagcccaccgctcagccaggccaggggacccataacagagaaggaaaagggtttcctaagcttctgcttggtgggtctacagccatggggtgacaaggaggaactgacctttgaccttctgggttataaagtatcctaggctcctctgaaacaaccaatgggaaatagaaatcacaaagaaaattagaaaacactttgagacaaatgaaaacaaaaacaaaatatatcaaaactcataagatgcaccaaaagcagtgctcagggggaaatttatagctataaatgcctacattaaaaaagaaagatctggactgggtacggtggctcacgtctgtaatccagcagcgtgggaggccaaggcgggcggatcatgaagtcaggagtttgagaccagcctgaccaacatggtgaaaccctctgtctactaaaaatacaaaaattagccgggcatggtggtgtgcgcctgtaatcccagctattcaggaagctgaggcaggagaatggcttgaacccagaaggcggaggttgcagtgagccaagatcgtgccacggcactccagcctgggcaacagagcaagtctccatctcaaaaaaaaaaaaaaagaaaagaaaagaaaagaaagatctcagattagtaacctagttttatagcttaaggaactaggaagagaagaacaaactaaaccaaagcaacataaggaaggaaagaataaaacttagagcagagataaacaaaacggagaacaggaaaatgacagaatcaatgaacccaaaagttggttctttgaaaaaaattaataaaattgataaacctttagctagattgactaagaaaagaaagaagactcaaatgctaaacattactaatggccttatagaaataaaaggggattatgagagatgctatgaacaattatatactaaaaaattagataacctagatgatgacatggccaaattcctagaaacatgcagactacccaactgactcaagaagaaacagagaatctgcagacctctgacaagagatcaaatcagtaacttccaacaaaaaagagaccaggaccagatggcttcactagtaaattctacctaacatttaaagaagaattaacacaaatctctctcaaattcttctgaaaactgtaagaaatgggaacacttcctaacttatgatatgaggccagtattacccaaataccaaagccagagaaaaacaacacaaaaaaactacataccagtattctctatgaataaaaatgcaaaaaatcctcaacaaaatactagaaaaccaagtccatcactatatcaaaaggattctataccatgaccaagtgggatttattccccagaaatacaagggtggttcaacataagcaaatcaatcaatgtaacacatcacatgtactgggttaaactgtgttccccaaaaagatatgttcaagtcctaattctcagtatctgtgagcgtgattttatttggaaacacagactttctttacagatgtactcaagataagatgaggtcaatactggcttagggtggctttactccaatgactggtgaactctggacacagagacgcttagggatatagaggagaacgccatgtgaagatggaaacagagatgcttctataagccaaggagcaccaaggacctctggcaaccaccagaagctgggagagaagcaaggaagattctccctgagagtctccaaaagaagtcaatgctgccaacaccttgattttggacttctggcctccagaactgtgttttctgttgttttaagccattctgtctgtggtactttgttatggcagcctagaaaactaacacaagtgtaccgcattagcagaatatagggaaaccacatgatcttctcaattgatacagaaaaagagtttgataaaatccaacaccttttcatgataaaaacactcaacacggaggctgggtgcagtggctcacacctctaaacccagcactttgggaggccgaggtgggcgaatcgcttgagcccagatattcaagaccagcctggggaacatggcgaaaccccctctctacaaaaaatataaaaattagccaggtgccgtagtgcacacctgtagtcccagctactcgggaagctgaggtgggaggatcaattgagcctgggaggttgaggatgcggtgagctgtgatggtgccaccacactcccacctgggcaacagagtgagatgctgtctcaaaaaacaaacaaacaaacaaaaaacactcaatataggacatttggatattcacatgcaaaagacgaagctgagcccttatcttactctaaataaaaagtaaaatcaatcaaagacctaaatataagagctaaaattttcacaggaaaatacagggtaaattttcataatgttggatttggcaatggtttcttagatatgacaccaaaaatacaagcaatgaaagaaaaaacaggtaaactgaaccaaattgaaaacttttgtatatcaaaggatactatcaagagagtgaaaaaaacacacagaacgggagaaaatatttgcaaatcatatatctgatcagtgtcttgtatccaggatatataaagaactcttacaacttaacaacaacaacagaaaacccattccaaaaaggggaaaagaacttgaacagacatttctccaaaaaagatatacaaatggccaataagcacatttttaaaatcctcaaaatcactagtcattatggaaatgcaagtcaaaatcacaatgagataccacttcgcacccactaggatgactgcaaaaacaaaacaaaacaaaaaaacaaaaacaaaaaactctgacagtaacaagtgttgcaaagatggatggagataaattgaaaccctgggccaggaatgatggctcatgcctgtaatcccaacacttggggaggctaaggtgggaggatcacttgagcccaggagttcaagttcaagaccagcctgagcaacacagcaagaccctgtctccacaaaaaattaaaatattagttgggcattgtggtgcacattgtagttccagctgctcaggaggctgatgcagcaggattgcttgagcccgagaagttgaggctgcagtgagctgtgattccagcccgggtaacagagcaagactgtgtcaaaaaaaggaaaggaaaggaaaggaaaggaaagggaaagggaaagggaaagggaaagggaaagggaaagggaaagggaaagggaaagggaaagggaaagggaaagggaaagggaaagggaaagggaaagggaaagggaaagggaaagggaaagggaaagggaaagggaaagggaaagggaaagggaaagggaaggaaaggaaaggaaaggaaaggaaaggaaagaaagaaaagaaattgttgctggtgggaatataaaatgacacagcctctgtggaaaattggctgttcctcagtaagttcaacaatgaattaccatattaccgagcaactcctttcctaaaaatggaatacattgttcaaacaaaaacttgtgtagtagtgttcatagcagcactatttacaatagccaaaaggtgcaaacaacccaaatgtcccttaactgatgaatggataaacaaatttgtggtatacccatgcaatggaatattatttggccatttaaaagaatgaagtaccgggccgggtgcagtggcttacacctgtaatcccagaggccaaggcaggtggatcacttgaggtcaggggttcatgaccagcctagccaacatagtgaaaccttgtctctactaaaaatacaaaaattggctgggtgtggtggcagatgcctgtaatcccagctactcgggaggctgaggcagaagaatcccttgaacctgggaggtagaggttgcagtgagccgagatcgtgccactgtactccagcctggtgacacagcgagaccctgtctcaaaaaaattaaaacaaaataaaaaaagaatgacgtgctgatggatcatgctacaacatggatgaaccttgaaaacagtgtatgaacaaaacaccacacaaaaggccacacactgtatgattctatttatataaaatatctggaataggcagatccatggagccagaaagcagactaatgatcgccaggggatggaggtgaggggcaatggggaatgactgcttactgagtacagggtttccttttgggatgatgaaatgttctggaactagatattggtgacagttgtacaacatcgtaaatacactaactgttactgaattgtacactttaaaatggttaatgctgaattttatgttatgtgaattttaccacaataaactaaaattgttacttatattaaaaaaaaaaaaaagggactccaggcctgtttatacaaactgcctgatgtttatgtaatacctatcagaaatgtgtggctgctctggttaccatttgtttacaagggagttgctgtgaagttttagctaaaaattgcctggcattttgtggtgactacataaataactcatgacagtctttctttcttaaaaaaaaaaaaaaaaagattaactataatagacaaactgatgttgcaaaccaaaataatagacaaactgatgttgcaaaccaaaataaatgtaaaatgtactggaatttgcagacaggcatcactggttcaattccactgaattcattcactgtaccataaacctaaggaaaatgctaagtttgtgcccaggttttaaattttttcttgtttttattttttatggcttctgaactctgccgcctctaaaagtagttgctgactggagtcagctaatgcaatagtgcatgattcccttggggcagccaggacactggtcaaggcctgagattaacacactgatgataagaaacacacttctaattcaaggtatatggaagcaagtcttttgaatattatgtccagggtagaaatttttttggttgtctttgttgtccctgttttttaaaaaatgtaattttcaaaccacccccaaacaaatgaaactacccaggacttctccttttagaatgccgccttattgcctgtatccctcagtttacataacatgcctgagagatgtgatctgtggagttctcaggcgtggtgagaggaaggcaaatatcatgaccacaactcaaatatttttagtttagaagactgaaaatattgcactctccattttaaaactgaatgcatttcatggaaaataaaatatctacatcttacacacatatccattaatttcattcaaattctattttgccaacagggattgagccagacaaggtatggggaggttagtcttctgcgttgctgacctcactgcctttgatgcgtgctgcaagcctggaatgctctgtatatgctcctgttacggttatgtggaagctactccaagcaaaatcccaccccatcgaagtgtcaaataaggcaaccatgtccttattcatatgactacacatctgagtaataatttagaatattttgacacaatacttgctagtactgatcagagacaattaactttttcctgtttaagaaaggacttgattgttaaatctgcaagctggttgggtgtctataagcatcactgggcccacgacagaattagactggaccccactgcacatcaagggaggaagaaaagccccaggaaggaagtgagggtggtggaggccagcagcctgaaagtacaggatgctctaaaaacctctagaatctcctgaaatcctcctcctcactgccaccattcttaccatcactctgattacacaagtgatacatgtggaaaactagtgaaataaagaaaagcacaaagaagaaagtaaaaaaatcactgacataattcctccacccagagataacccctgtgaatatctggtgtatgtatgtgcagcatttttttcttgtgcacgtcactatttgtagaaatattttaaacaaaactgggcttgcattctgtacatagtactttgtaaactactttttccttaacaatatgttttttaatgcttgtagattcttcttacattacatgagatgatcgccatttcaaaaagatagatatcatctgctgaatccttgctatgcactgggcattgtgctaaacagtttatacgaattgtattcttttatcttgacaacggctctgggaggaagatacaatttttccccaatctccaggtgaagctgagagaagttaaagcagcatccctgaccactaggctgtgtgtgcagcgtgcgccttccgggctgtgctgggtgcttccgctagtgactacacgacagtatggctgccagcttcgccctctccatgtgtggcagtgaccgactatttcgttcaaatgttcttaactacttatctaaaggtaggggcaaggaggggaaaaggggcttggggtcaagctataatcacgtttctcatctttaaaactgttaagtaaactagtggatcaaagaaatgggaacgccttctttccaaagttttttcagcattttaatgttgcctttagacagctaaatgcaaggtggatgtctggacacttccttagagtaacagaacacgttgatttgaactgaacaattcaagcctgtaggcagttttgtaaaaggaatatagcatagtgattacctatatctcacggagtttttaaaaagtttttcttaaaaacagctttattaaaattcagactatatagttgactcatttaaagtatactttttaatgttttacagtatattcacatagttgtgcaatcatcaccagaatcaattttagaacatttttatcatcccaaaaagaaaccctatacccattagcagtcgcccgccccctccgcaccccaacatgctcccagctctaggcaacactaatctactttctgcccctagagctttgccgtattctagacattcatataaatggactaataaaatacgtggtttctatgactagcttctttcacgtagcacaatgtttttaaggttaatccatgttgtagcatgttacgaatgccacatcctttttgtggccaaaattggattgggttttgaaagtattcaatgagtatgtccttataaagtgtttagcagagtttctggcccgcagcgactgctcattacagttgctacttccttcaacgtgaaatcactgcagtgtcacatacagcagtaatcgctttcccaaatatttactgttatgcagatgcaagttattaagattcatatttaaacccaatagctcattttaactattttgggtaaaatattttatcttccatccaaagaatgagtatactagtatttcctctagtaatactgtaaaaagaggaattcatacttctaatatactttatcacagtcaattgtagaaagaatagactcttgtaactgggagggacctcaggaacttagctaattcatccttccacttcagacacaacccactggtaattcttggcaaacaagaattgattcctattagatcccctgaaaaggtgattctataaccatcctcaatgacctattccagtgtctacaactcccgttctcagaaaattggttttatttatagtcactctccgcagcctattgagatagctgctgttggcttgcattatgatattctatgaaacatgtgctctgccctcaagtaccactgttaaatttctctgtcagtcttcttttttggtgcataagtgtttttaaatctttccacataggtcttgttttccaaatagctcaatcatttctgtggcttctctctgctgagcctctctgtattctctataccctcctccaggtaagcacctcagaggaactgtgcagtctcctttcctaggatccttaaggagaagtcatttacctgatgacatggccaacctcaagattcccagagctgtcaatataaacttcatcccggtgaaatctgactcgagttgaagagaacactggctttgtgcatcaggggccttcactctgctatcacttgctcaccctggacttttctgctctttgtgccatcactttctcaatgattttatttccttcccaggtctgtgatactgtacttttcatcactgagcttttagccacttattcctggtttcatctacaatggacaaatactacagccattcagaatccttattcttcccggaggccttcagctccatcggaaggtctggcgaatgtgatgagcacacacgctgctgacctcattctccaagcctcagatggaaatgtggaccaggacttcccaggggaagccgcctgcacaaaacatagattccagacctacacattctcgctttctgaatggaatatgccaggaaggaaggatctaaatatattcacaagtcagaatagttctatttaacatgacgatgcttgtcaaacattttgtcagaaagatttttttaaaagatactatattactacccaggactctgttcttgtcccaatatttgaaaactgaaatgagtccctccaggttagcattaccagatttagtaaacagaaagagaggatgccccattaaattctgtttcagatgaacaatgagtaatttttttaatgttagtatgttccgtgcagtgctatactttggccatctcaaattcaaattgaatggggcatcttgtattttatctggcaatccttatctggttcagaggcacagaggctctcagtttccttcctttaagaacatacatattggctgggtgcggtggctcatgtctgtaatcccagcactttgggaggccgagggaggcagatcacttgaggtcaggagtttgagaacaggttggccaacttggtgaaaccccatctctactaaaaatacaaaaaaaaaattagccaggtgtggtggtgggtgcctgtaatcccagctacttgggaggctgaggcagaagaatcacttgaacctgggaggcaaaggttgcagtgagccgagatcacaccactgcactcaagcctgggtgacagagcgagactctgtctcaaataaaaaataaataaataaaaataaaaataattctaaaaaaagaacatacatattaatttacttactcagacattaattaaatatttaaatagccactatgtgccaaaaacccttctagttgttaggagatagagcagagaaagaacaaatcagaggaaaattcctgctcgcaaagcgcttctacgaaatacaaaggtctggcaaagaggcactttgccatttcgaatttaccagcctcagttccccacatataagtggggctatgtagaagaaagaacatgggatttggaagcagaagatggccttgtctgtgagagctcaggcttgtcacttaatctctcagacagtttcctcgccaatgaaacggacaccacatctgcctgacttcacagatggggtgaggatcacatggaattttgtcagggaaagtgttctgtacgctacaaaatgttaaaatgttactaacattattgttaatgcaattgctttggtattttggaaatcaaatctttgggatctacaaatttcatataattgtggaagttacataggaaactagacatgtatcccaaaattacatggaaaagcaacttaaatttttttatgctaggtaatattcacaaacattaagtataggctgcattttctttatatactactgcaaaaatattttgtaaagtaggtaacaacattataaacattcagtagcaggattatcaaacagagccgtaagtaacatatttatatacttgtttgatgatgttgctaaagtttgccagaaatacccattgcaaacctttctataaagaaacatagagttgattgttttatgaatttttaaagaaagtctttttaaaaatagaaaggagaagtgaggccttaattatgactttccacattttctccttggcttctttgttaaatatgcaaaagggtaaaataagatcaaatgaggacacgataaagctgaatgttcgacaccatttaaaagcagttggtgagacattaagtcagaagttggtatacttttcaatatgctgttacaattttaggggaaattatcattattaaactagttcatagccaattcctaaattcacttggtctcaattgctttctccatgagtacggttagatttggtacaccatgaccatagtagtttggtgtgctagaaagtgggtccttaggccgggagtggtggctcacgcctgtaatcccagcactttgggaggctgagacgggcggatcacctgaggtcgggagtttgagaccagccgggccaacatggcaaaacctcatctgtactaaaaatacaaaaattagctgggtgtggtggcacatgcctgtaataccagctactcgggaggctgagacaggagaatcacttgaacctgggaggtggagggtgcggtgagccgagatcatgccactgcactccagcctgggcaacaagagtgaaattccatctcaaaaataaatacataaataaataatattaaaaagtgggtccttaaggaagtgagtaattcacggttagtccttcactaaattcatctgtaattttgcttattttcagtaagaccacacggaaactattctcattcttgttctacatacttttttggctgaactgtcaagccgacttttatattctggaataagctggggacagaacttcttgttttgaagggaatagctattatagccaaatgctaggatctgagtgacagactagtgccatatttggcactggccatgcctgagttccagcagctctgagcgagcaaacgacacagaccattttcttacaccttacatggtttggtgggaaggggcaacacggccctttgctatcaaggttaacagggaaaggaaagggagaagatcatctcataatgtatccctcaatccatattgggcacatctctgggagagtcaggaccagagacaaaagtctcctgacctagtatcttagaattacacttcagcactttcattttgcaagtgaaaaaatgcatccaggtggatttgcccaaagtggctgctggcaactgagacagaacaaagaccttgctctcttgacctccatcggggctttcccaccacactatcctgctcaccaatagtaggaagcacgtgctgagcctattagcaggctaatgagagtcagccattaacaatccagcaaagacattttcaggactgggttccacattctttgcaccctacggaaggtgctctggggaaaaaaacctattaattaaacgatgtgaaaacaatcctaggacttagctgttacttttttctaaataacaaaatatttttggcaagtaaacaatgtagttcatacttcagtggaaggaacatagccggggtacggggcaggccaagttacacacatacaagtaaacaagcggtcaactatttttaaatgtacctaccctgtccaatgattaggtgacccaaattctgatcttctcagaggatggaaataggttatttttattttgcaacccactgtttccttctatatataatactgcatttttgaacaaaattatatgaagtttattctcatttaaagttctgtgggagctgaatgatatgatacacagccttctacaattccttcggtccaagggtcttgagagggcctatcattttataatgtgtaggcattttccaggcctacagcactctatttttgtttcattcttttttttgaaactttttatgaaataattctaacacatggaagagtacaagagtaacatatcagacttcatattcccaccattggctctatcaaaatctaatatcttttgccatacttgccttcagattttttttttaataaaatattacagatatagttgaaggctattggacactcctgtatgatatcgcttattctcttccctacttcttctcctgagatgaccattatcctgaatttggcatttggcattcccatgcattttgcaattttgtttgtttttttgagacagagtctcgctcagtcacccaggctggagtgcagtggcacaatatcggcttactgcaacctctgcttcccaggttcaagtgacaatcctgccctagcccactgagtatctgggactacaggcatgcaccaccacacctggctaatttttgtgtttttagtagggactgggttttgccatgttggccaggctggtctcaaactcctggcctcaagtgatccacccacctccgcctcccagagttctgggattacgggcatgagccaccatgcccggattccatgcatgtttttggactctaactgcatatatatgaatccacacttagtgttcttttgcatgttttcaaactttaaataaatgacatatttaaatatttggtcattccactcaacaaaatgtttctaagattaggcaaagcgatccacataactctatttattttaacccattattatgtgctattgtatttgtgtagcacaatttattttcccagtctcccactggtgcccatgtatggcttttcccattttaaacaatgttgcaataaacatctttgcacagtaagtccttatttaaggtggataacttcttagaaattgtaactttaagcaaaacaacagataaggcaaacaatttttccatcaaatttacaacaaaacatggttattcgaggacttgctgtaatgtacatggttttgtttaaagtctgcttccaagcacctatcaacgactttaagagaggatttactgtacataaccccttatgcacacatccaagagtgtctctaagaaactgcttagaaatggatttcagagttgaagggtatccacagcttcaagagtttattttgctaaactgttctccaaagtgattacaccaatttacacagtgtatgacagctcccactgctgtccaatcctacaaaaatctgatatggttggacattttcgccaatatgaagaacataaagtggtatctcattgatattttaatggccatttccacaattacaagtaagaagaacacctatttattggccaatcaggtttcctcatctgtaaactaccaacttgtatcttttaccaatttttctgttatttgtctttttcttaaagacttgtcagttatatatgtcacattctatcctgtcttttcagtttatgatttcttttttgaacagaagtttaaaattttagtgtggtcacatttttaaatattttctattatggctgggtatggtggttcatacccagccataatagaggccaaggcaggaggatcacttgagcccaggagtttgagaccagcctaggtaaaacagcgagacctcatcactgcaaataataaaaatagaattagttgggcatggtaagggcaggcctacaatcccagctactcaggaggctgaggcaggagaactgcttgaggccgagaggtcagggctgcagtaagccatgatcacactactgcactccagcctgggcaacatagtgagaccctgtctcaagaaaaatttctattatgttttgtgactttttatttctttttaaaggaattcttcctaccccaatattatatagacagcctcttattttctcttctaaaagttaaaaaaaattgcttttctagtgcagatctttatctagaactta

SEQ ID NO: 61888 - DNA, 565 bp, Homo Sapiens
ttttttttttttttgaatgaacaaaggtttttttggcatgttcattgttgtaaacagcatctggcatgaaaaagttttaccaaaaccttttttattgatttttataaattagatggtatgtcaaaatttatgtagaattgggttcattgagtacttttatttagcaaagcaaaaacttgctgatactaataaactctgcaatgaaatcatgttgactgcatcagtctgtaccatgacctgacctcattagcaagtttattcagaacaatgttaagacgtttcccaaaagttaaactacatgtaactacaaattgactctaaaaattaaaactggacttacaagcattctagaagattcaaacttgaagtaaatctttcaaactagatgtccaaagagaaaaaaattgaagccgctgaacagagaaacctcattaacaagggcaacgacaatcctatgggacctagcactgaggaacctcactgaggattacatttacatagattgctatacttctcaatgtacacaaatgtacagaatgaatgatacgtgaaaagaataatcatg

SEQ ID NO: 61889 - DNA, 759 bp, Homo Sapiens
  misc_feature (549)..(549): n is a, c, g, or t
  misc_feature (573)..(573): n is a, c, g, or t
  misc_feature (669)..(670): n is a, c, g, or t
  misc_feature (689)..(690): n is a, c, g, or t
  misc_feature (745)..(746): n is a, c, g, or t
  misc_feature (751)..(751): n is a, c, g, or t
aagccaaggaaacctcagaagaaatcttcctaggaagctcaaagtaggaagggaggatgggaaagaaaggaacagctctacttcaatacaaggttacagagcccaaccgcaagttaccaaagaacaacagcattccatgagagatatattccttggcaatcaatagacatgccccccaagagagcttccaggaataacctggaatgcctcatgaggaggtaggcagattaccaagggtacaagtggctctggacacacgggtttaagactttgaacctctgtaattgtacttatcatgtctgaggcttatttcagacaaacagaatatgtaatcattttaaggaaagatacaataaacttacatttagaatgtctatcacagagggcagatgccctcatgtcacatagccgaatagttcctttactgctgctgtatacaaatgtgttacagctgtttggatgaaattctgctgctgtaatcacctctgttagctcttccatattggcaggcttgatatccacaatgttaaaactcctgtctgtaatttncagatgccaaagattaatccgcanatcatctgcagataaatatgtttcataatcactattaatagaaaatgagttgatgtgatatgtatgagcattggcaaatattcttcgtggactggnnctcacccatagatccatanngcctaagactgccactcgtagtgagtaactggtagtagactctataccttccatnnctctntttcaagt

SEQ ID NO: 61890 - DNA, 457 bp, Homo Sapiens
tctaagtatttttaaacttgcatacaatcagttattttaattctctgtgtatacaggcatatctcattttattgtgctttgctttattgtgctttgcagatattagcttttttttttttttaaggaacagtgttttgctctgttgtctaggctgtaatacaggtggtatgatcatagctaattgtaacctcaatctcctaggctccagtcatcctcctgattttgcctcccaaagcgctggaattataggcatgagccactgcacccagctagatattgcattttttacaaattgaaggtttgtggcaactctacattcagcaagtctattggtaccattttcccaaaagcatgtgctcacattgtgtccttgtaccacattttggtaattctcacaatatttcaaactttctcatcattattatatctgttatggtcatctgtgatcaatgatctt

SEQ ID NO: 61891 - DNA, 557 bp, Homo Sapiens
tttttttttttttttttgatttaaaaatttttctactctaaaagtaggttgaggaggtacaggggtatttatagctcccctacaatttatccatctttgaatcaatccaacaaagcacatgtaattaaagctctaggctaggtgcagtggcccaaactggtatttaaagaaaagaacaatgaattatttataacttaattctcaatgtcatggttaacatgttccgtgggaacaaccaagggaaaaagagaggattttggcttttcataacatccaattggcaaaatcctttaaaatttttacagaagcctctagtaaaatgcatataacacttttctcaacatgcttcaccaggtcggtatgataatgatgagcgtatatacatatggtccctggtgacttttatcttctctttactgcatcaactataaggcaaatcccggattcaaagatgttaaaatgtgaagaaacgtgtgctttagaattcatggaataaggtcatcttctaagtgaagagattcgctcactggatacttacctcttcatagtatatgcag

SEQ ID NO: 61892 - DNA, 988 bp, Homo Sapiens
taaacagcatttattcaaactggtgcatatctttgavatcctcgatgattactaggtatatatcacaactgtttgagccaatgatattaatacgttattataaagtaatcaacatgacaatacttttgcccgcatccaaaagcgcagtacactgatttaggccagactgactgatgctccctcccgtcatcaggttctattttaggacaggaggaaaaacatgttttcccattcacagtttttaaaaatcttttttaatggatgtcctaattgtacacagaacacaaacctatcttcacttctcaatgtgtaaatgtgtatctactaagtatacattaatgtgcattaaagacattcagaaaacataaaaaccaaagaaacatattaactgcataaaaatttaaagttgctaaatggtaaagcagctagaaattataaagtagggaaatgttgaatagctgacataaagattcttagtaagaacattttacattccaatattacaaatgagtacaatatgcaatgcatgaaaaataagccaattctgagatgttgaagcacctatcagagcgtacaaatgagcgagctacctggtctagatggaatgaagtgttagctttaaaatttgagttaatttaataacttacatcttcacccaggaagcatcagagctgaggaaataaacctcagcagtcaagtgttactaaacctcatagtttgaagatattactccgtgatgtgtggagcacagagtagctaaatagtacttataataaattkgytatagttctaagattaatcccttgtggaagagggaaagttggccctcatcaagaacataaatggctgggcatggtggctcacaccatgtaatcccagcactttgggaggctgaggcagacagattgcttgagcccaggagttcaagacgaacttgggcacatagcgaaacccagctctaccaaaaaaaaaaaagabtaactgttgc

SEQ ID NO: 61893 - DNA, 272 bp, Homo Sapiens
ttttttttttacgactaaacatctcaattctagactcaggcactaattattaaagtcatctagttatatacaccaattctcaacagacacagttttttttggaaaggcatattaaacagactaagatgtgtactacccattagccaaagataattttattgatttttctaacaagtcttcaaatgttacattctaacatcttagcaaattatttccaaatactgctggaattacatgtaactatcaggaaacaaaagggcttctcaacaact

SEQ ID NO: 61894 - DNA, 567 bp, Homo Sapiens
  misc_feature (103)..(103): n is a, c, g, or t
  misc_feature (122)..(122): n is a, c, g, or t
ttttcaattgtacagccattttattaactccaaacacccattcaagcaactgagtaggcattcctgcaatacagaattgaacattcaaaaccaagggcacatnggagcaattcatataattnttgataattctgaaggcacagtcacataattataggtagagacaattccatgaaaaggccattataagtctttgatacagaagggaatgaacactgattgaatacctatgcacttataacttggtatcattcaatgctcacaataaccctacaaagttgggaggaaactgaagaccacagaggttaagtaatttatccaggaccacccagtttgtaaatgacagagctgggatttgaaatcaggcctgtgtgacttcaaagactgtattattttctctataccactttgcctttatggttaatggaaatgttctaaataatcacttggaacttttggatactggcgactccatttcattagtatacggggaccgctgaaagctgtggctttataggatagggagagtcatagcatatcaggtctcattatgccaaacaaaatcag

SEQ ID NO: 61895 - DNA, 566 bp, Homo Sapiens
tttacaaatcaggtattattttcttttaacaaattacataaaacagtatagattcatgatgtttgctacctaattgtcagtacaagatgaaagaagctgaataatttcctcttccaactgaagttgattatttaaaagtgctgcgatataaccttaagcttactatttatccaagcactcctgtaaataataagtgtaatcctaaatcccagtgggggaacaacttgaactgatgcaaggtataataaaccacaaatcaggagtcaggaaggctatatttggttctgtcacaaactaagtgttaggatctgggaagtcattccacccctctgggcttcatatttttatctataattaaaaaatgggttagtattaatatcagtgtggtccacagctcttgggccagtctgtgaactgttagtgacccacaatgagacaaaggggggcttgtaccaggctgtaaattacctatatcacccagcacactgcttagttcactgacagtttgtcaaaacaagaatttttcgatgaaggaaaataaaaatatcaacatattctaaaacaag

SEQ ID NO: 61896 - DNA, 499 bp, Homo Sapiens
tggaatcatagttcacactttattcgacatcatagaattcatagtggagaaaagccctatgaatgtgacaagcatgggaaagccttcagatggagctcagaccttgtgaggcatctggaaattcatattggagataaagttttggaatgtagcgagcgtggaagaattttcaatcagagctcaggtctaatgcagcaccaaagaaaccatacagaatcataacccctaggaagacagtaatgataaagatgtcagtatgtacatataggaagagagaaggagagtttgtttttgtcctaactatttggaaaattgtaagcttcctaagagcaattttcatctgattcagtgtatagtacttagtctcaggtcatgtgcagatatgtccttcccaaatgcttaccacaagataaatcagaaatcttgactggaataagcttctagttcctttgctttatcatgagaggttccacaccacaggaaaatcttgtaaatggtg

SEQ ID NO: 61897 - DNA, 454 bp, Homo Sapiens
  misc_feature (206)..(206): n is a, c, g, or t
  misc_feature (222)..(222): n is a, c, g, or t
  misc_feature (387)..(387): n is a, c, g, or t
  misc_feature (418)..(418): n is a, c, g, or t
  misc_feature (436)..(436): n is a, c, g, or t
  misc_feature (444)..(444): n is a, c, g, or t
  misc_feature (452)..(452): n is a, c, g, or t
ttttttttccacatttaagtttatttgccatgaaagggaaagaacatacatgagggtttttaaaagttactactgtggtaacaaaacaacattatcctcttaaccatttttcctcttaaccatttaaatttatcctcttaaccattttttcagtgtacagtacggtagtgttaagtatattcacatggttgcaacagatctctagnaacatttttacccggnaaacactaaaactctataccactaaatactaactccctctcctaccaggcccttggataaccacctttctactgtctgtgtctatggattttggactggctatggaatacatcatagggagtggggaatcctattggtatttatccttttggtcactggggcttntttccactttcggcattaatatcctcagggnttcatcctgtgtgtatgnggacaggntttccctncc

SEQ ID NO: 61898 - DNA, 494 bp, Homo Sapiens
aattcgcggccgcgtcgactacggctgcgagaagacgacagaagggagatgtgagactgcaagtatgactgtccatggtggtcagtttgcaaagcactgcttctcgtattttctctgaaagccacagtgcctcttagtgttctctagacaccaaatttcaggtaggccggatgcagtgattcctgcctgtgctcccagcactttgggaggcagaggcgggcaaatcgcctgagctcaggagttcaagaccaactggggcaacgtggtgagaccctgtctctacaaaaaatacaaaaattagccgggtgtggtggtgcacgcctgtactcctggctactcaagaggctgaggtgggaggatcacttgaccccaagagtttgaagctgcagtgaggcaagattgtgccactgcactccagcctcagtgacaaatgagattctgtcgaaaaaaaaaaaaaaaaaaaaaaagcggccgctcgttgtcgcgcggccgcg

SEQ ID NO: 61899 - DNA, 630 bp, Homo Sapiens
tttaggtgacactatagaagagctatgacgtcgcatgcacgcgtacgtaagcttggatcctctagagcggccgcctactattactaaattcgcggccgcgtcgacttttttttctctcttaaaccagtcaatgttgtctttgtgtaataagaaatatcaggtaagtcttaggatgtggacatcatgtttggggcaatgtctccctcaccgcctctctcatcctttataccataaaagagtgatggcaatatgctagctgaaattcacccttcgatggtttcattttcttgtctacaaaggcagggtgagcgactgctgccctgtgatttctggcactcccagtggaaaggaagcagaggggccaagttatggcagagtgcacccagttaggccttcgactacaaaagtatcatggtttcccttcctccccagttaccattctttccctggttcccatccccttccacatccagcagtgtgggctaaccttcctttcctcatcctgggaaaacacatcttgctccgtcgacgcggccgcgaatttagtagtagtagtcgacccgggaattccggaccggtacctgcaggcgtaccagctttccctatagtgagtcgtattagagcttggcg

SEQ ID NO: 61900 - DNA, 562 bp, Homo Sapiens
gttgccaaatagcatttatttgagtacaaaatcctggcaggcaaaagcacttgcagacccgactctctgagaacttacaaacaaaaagtgaaaagctcttagttcattttgagtcagaacaataaggaaattatgaaatctaagatgtgcaggtttacttaaaagtgataatggtttatattaactgtggcccacacagggtctctctaatctaatgaaaacaggacagtcactgaaaataaggactaatcaatggccaaatgtttcttcactatgggcaaaaatgtgatttcttcatctgggctttaagagctataaataaaacacatggccgggtgcatgcctatagtcctagctatttgggaagctaaggcagtaggattccttgaccccaggagttggaggtcagccaactctaaacaaacacaaacatcattctgacaaatgaccttaatgtaggatctctttggacacatcttcagcaagcagtcatttaataaatgccttctgataggcagaatgtagctgctcatggctctttaagtatcatatccagaatatg

SEQ ID NO: 61901 - DNA, 504 bp, Homo Sapiens
tttttttttagcatactgaatacaaattcaggattcatcattccttgggttcaacccacctgtcaatgtgcaaacatactagtttctataaatagacaaagtaatttgatttatagatttataactgagttaaaaaccttcatatatgactcagttatcaaaataagagagataatatctcatttgggatattctattgtatttggatagaggtagagcatgcatgagtgagattatgggtataagtataaccaaacgcatcatacccataatttctccaacatgtttatagtattacccccaattaatgtgttctggatctagagtatgcatgagagccatgtgcctagatatgcaagagtaataggactgtgatcatgcctgtgactaatcaagagacaagtgatcaaaaattggtccaaaggcagtttattcagggaaattataaactactgttatgtgccatgtgacgtttcagacaatgacagacatcatatacaacag

SEQ ID NO: 61902 - DNA, 608 bp, Homo Sapiens
tttttggagagttgtgggtcttgttatattgcacaggctggtctcgaacttccccgcctcaagtgattctcccatttcagcctcccaaagctgggattacaggtgtgatccaccatgcccagcctgccctttaattttttggtgacttctaaagcacagtttttagtttttttaatatttaaaaaataaatattttacttaatgtttcacataatataatcccccctcccaagactatacaagtttttctttatattttcttctcgtaaggctatggtttcatttttatataaaatctttaaaatcatccaaatgcatgaaagtcacaataaatcactagaaatttattttagaacatggtgtattttttccctccaaacaattggccaatgaccctttcatttattgtatagtttatattttcctcactgattataaatgtaacattttaaaaaaagagatggggtcttgctatgttactcaggctgaagtgcagtggctattcacaggtgcaatcacagtgcactaaaacctcaaactcctgtgctcaagtgatcttcccatttcagcctcctgagtagctgagactacaggcttgtgccaccatt

SEQ ID NO: 61903 - DNA, 477 bp, Homo Sapiens
  misc_feature (229)..(229): n is a, c, g, or t
tgtgtttgtagtataaaattcatttattatctgctacttataaataatcagaccaaagaaattacaccaaaaggtttagactaagagtcacataatgtagcggtggaacctcaaagcctggccttggattatcccagtgcactttcctctacatgctacagtttttttttcttaaaagatacaaagctttattaaacaaacctggaatcaacattattacataaattanacagcagtaaaaatttcctagggcatatatacaaatcacagtgatttccatggtgcaacaaacagacaagattaaaaataggcactcccctccccgaccccccatgagaaggcgagatcaccccacagggctcccagttccagctcgccaaggggtgcacaaacctgcaaaggcactctgcttgtgtgcatggcatctggcagcagtcacaggggccccagaagcacattgacaacatggtgaggctg

SEQ ID NO: 61904 - DNA, 449 bp, Homo Sapiens
aagtcagaggccactgaagctttattcaggcgagtgacagatttacatcttcaattcttaagagtgtggaataaatttgaggaaagaagactggaagcaggaaaacattagggtgttcttggaataatcctcttgagaaaattgcctactctaagatggtagcagtaggtatggggaaagtgggcacacacaacataattagaaagtggtataaaaattttattttagatggggaaaggtagaaaatactaggttaagtataaagggatttctttacctatagtacttgtcagaaattttatggtgctgtttttgagtaaaagaaagtcacacagtaacacaaaatggcttccaaacatttgatttttttttttcttttttttagaagactttatgagacactagcattccacaggaaacactatgggagaaactgttctcccacaaaa

SEQ ID NO: 61905 - DNA, 490 bp, Homo Sapiens
ttttgacagagttctgaatgtttcagagtagtccaagtgcacccaaaagcacaataattaaatgaggggcaggagagtggtttagaagaagattgtttttctggattcagctccaacaaagtttgtcctgcaggtcttggtgctgtgccatggtccttctcgccaataatattcagcctggataccccgctgtggctctaccagggaggaaaatattttcctgccactgccctgagcctcctgactgaccccagctgccttagacatcccagcttttgggactaccccagacctccctataaccagcaatcagaggctggcacagcaagggtgctttggaaccctgcctggtgctccagggtgacaggcagcacctgctgtcattggtcagtgtctgtgcagtatttgctagagttttgtggatctcagccttgaaatctgtgtctttctatagtcaaaggatctgagttgggagaaggcaccagatatg

SEQ ID NO: 61906 - DNA, 546 bp, Homo Sapiens
cttttaaaaagttttattgtgaaatatttatccatgagtacatataacatagatgtccagtttttcaagttacaaaaagcagacagccctcccttttttttttttgagacggagtctcgctctgtcacccaggctgtagtccagtggtgcaatctcagctcactgcaacctcacctcctgggttcaagcgattcttctgcctcagcctccccagtagctgaggtaggagaatcccatgagcccatgaccgcacccctgcacaccagcctgggtgacagatggagatcctgtctcaaaaaaaacacatcaatgtttgtatagctaaaaagaaagaaatttaaatgtccaataatggataaataaacttgatagtcattagaatgactacagcaatcagtgaaaattttcaatcatgtgaaaaatgcttatgttaagtcaggaaacttcagaaaacactgtaatctgagctactctggaggctgaggtgggaggatcctttgagctcaggagctcgaggctgcagtgagccatgattgtgccactgta

SEQ ID NO: 61907 - DNA, 540 bp, Homo Sapiens
  misc_feature (475)..(475): n is a, c, g, or t
gcccaaaacaagaacctaagagctattttaatttcagcatacatgcaagttttatgttttacagtttaggtattatttgtattctgagtcacttatttgggggagagcatcttcatatcagtttttcatgcttggcacctccaaaggtcatcatctgggcctgcatctctcccagaacagccaggtcttctgtgggtccatcagattatgaaacttcccttcttgcccgaatcccaaatctgactcccatggttcctaggtcccctccctttcactgccctggaagagtcctgcagagacctcaaggcagtgggccagcattgcttgtaagttcatgcatggtacaaaccaccttaaatgcattccgggcatggcaggagacccatcagacttcctagagctgcctgtggtcaagattagaagaggaggcatcggcctggctgtgtcctacccttgagccaacagggggtgctgnctccaactaaccctacctggctctgagtctccaaacctggggctcaggaagccgcccctcgtgcc

SEQ ID NO: 61908 - DNA, 580 bp, Homo Sapiens
  misc_feature (529)..(529): n is a, c, g, or t
tttttttttttccatttgttccatctcctatgtaatctgtagattgacagtctgtgcctaaaggattcctccttatttcttcagaaaacttacataactcatgtaaaattacagaatatagttttaatttagggcaataagctcaatatatttcagaaataattttaaaacatcaacctgaatttaaagtcatatcaaggttcaatccaagtcacaaatagtgactggcacaatcacagacaaaaaatgtttcaagtcgctacaacactattatctgatgctgacaaagtttcatatgttcccagtgttatctctatttcttgtatcttaaagcatatgaaacaaggtcttaaatgatttttcccaccactgttatcttaagttatggaacactttcttgagtggcaaacaaggatattatgatccagttataccactctttgagaatcaatttactgaaatacagcttagaaatctaagaggaatgaataggtatgatgccctttatccttattcaaatgtaatccanattttagcaagcataaactacagaaaactcaaacagtacatagctataaca

SEQ ID NO: 61909 - DNA, 463 bp, Homo Sapiens
ttttttaattacaatgatttattctttgtcttatgtctgttttgtcatttccaatgacatctgagaagtagggaaaagtaaatgggtatgttaagtctgccattttataataaaaaccattgttttcattacgccattactgttttcactacaccacaattttaattggtagaaatatgttttagagaagatgtaggacctagtgaagaggaatctagtgacagaaaatgggccctatgaaactgtctacaatctgaaccaagagaggtgatataaagaattccaaaatatcaggcttcaaagtggctatttcaaaagtatagataagttaaaaacaaacaaacaagcaaaaccacacaacctattgaagcattaaacaatagcattttcatgttctcaacaattcattagttcactgtcaccaataccagagagaagttgagaacataataaaatgttactc

SEQ ID NO: 61910 - DNA, 566 bp, Homo Sapiens
atcgagaatacaagtctgagatttctccaggcatcaggacagtgtgcgcgcacaggacttggctctcttaggagatacttcagttttgtatcagatgtggctgtggagggtgctcttgaagcattgctaactatgagtgggtccctctcagaaggaaggactgtaagaggtatgaaacttctgagaaaacgagctgtcttctcttaccaagcgcctgcagccgtcaaaatgctgtaggctttagtcgtctgccagttcccaagctgagctgtctccttcatggataggatttgtgtgtttagaaacaacaacaaagtttattctgtttataactcagagcatttgttttttctgctgaggctaaaatacttgtgtattctttcctagaggagaaaagaaaaagagaacaattaaaaacaagaaaaacaaaactagatattctaaattattggcaaaaagttttttttaatctgtctttcaagtttacagaaaagaaagcagtaaatgcattgatgtcattttattatgtacatatatcatgtgcgttcagctgtgtggcagatata

SEQ ID NO: 61911 - DNA, 476 bp, Homo Sapiens
cagctaagatgatacaaatatttcagaaaatttttgccaaaaatagtaacattggcagtcaagccatattatttcacacttgcaaaaaatgttttttatggctctgcatgctttttagttatcaattctaatgcctgggtgaataaacacacacacacaaacacatacacgtatataaaatatttatttaaaaattacaagtatctagtgttagaaaatttatggcagcttataaggtgaatgattttaagagaaaattatacttcacatacatacaaatataaatatgcatgcacacatatatacttcagggttatgttttcatttggtagatatgagtttgattcactctaagaatcacagtttactggcttttgcaagtactgaaaataactgcatctaacacgaagtatattgttgctcttaaatgtatatttcctgataactcacttgtttccgtaaaggacttgggttag

SEQ ID NO: 61912 - DNA, 480 bp, Homo Sapiens
tttttccagaaaagcctccatttgaggctgtgtgataaatgatctctgggttcagctctggcctcggaatcccagctacaaatgccagcggggaaccacctggagcaggagggtttccaagtggcctttatcgactctgccaatcatcgggccagcccccatgtgagcctcttgctttcagccctagagagaggagggggttggggagtgggcagtgtgggcaggagtgcagtgaggagggggaggcgggtgcatgaaggagtgaacaggctgtggaagcacaggcctcctggatgccctgtgtcctgggggctcttggttctactgagctcacctctacctgcccctcccgacaagtcccccaccacagagcagaaatgactgggatcaaacccctggccagtcacagctggcgagtctctgagcaagcacctcactttcctctgtgttgccacagactctggaagcccagagagggtg

SEQ ID NO: 61913 - DNA, 540 bp, Homo Sapiens
tttcaaatgttgccaaagtcatgggaactctagttaggaagatttcccctacttagagcatgtcactctggcgtggaccttcattcatctctttccccggcctggggttgatccattctcccttcttcccccttctcctgccctgcccccaccttctcagtcacaatctttgtcttcccagtttggcaggacatcccaggggcccctgggctttccttcctgaggttagaagatggtgctttgaaagaacaattgctcctaccacccatcaaatcaaacttttagaagctgataaaaaccttaaaaatcattcaatctcctcttctttctccttctgtagatgaggaatctgagggtctaagaggagacatgagctgctgagattgactgagctaggcagggccagacatagactccacgggcaggcccgcagtctttccaccaggtcaggccactccctcgcccagggctcaagattccttttagagttcaacagagcagctcccgagaacagaccagccctcaagactcaaatttcag

SEQ ID NO: 61914 - DNA, 528 bp, Homo Sapiens
gtttttgggaggggatgaatttaattagcgacgcgttctggcctattctagggctaactgcgttcaaatcaattccatttatgagaagtcccgggggatccccaagaaatttggttggtactggggaggtgcctcatgaagatagaaaaaggatgtccagattgattgctgatttcaatcccaggggcacagctacacttctggctgaccacagcttaacgatgagcccgattatatctcaataagggaagttacagccaatttctctttgaacacaagtccattgcagcatcttcagaggcagggccagcctctatttttcagtcatggtgacatctgtggtccttgcatttttaagagtggcctgctacttgtaaggtccagggggcaggtcctccactttctgcaagctggtccttgaggcattacttctgaaacagtcaagaaatgtcatgggactgtgggtctgagaaccgactgatgagttatttttgtctgtcagtgaggacagacaagagcacagggctg

SEQ ID NO: 61915 - DNA, 526 bp, Homo Sapiens
tttttttttgacagactagaccacttttttattacagcttaattggcacatggttcactgaagatacacttcacttttacataggcttgtaaatagaaaaatacattgatgcacaaaaaatatagtacttcaataccaaacttaaatgatttccaaaaagaatacaggttatttcaataattaaaggtggcttttgtgtgtgcactatatcatgtatacacttaattgtatgtttaaggccagtggaatctatagctaattactcatttggttcttgaaaactgaaacatgcaaacattcttatttttatgtttaaagacatttaatgtgttattctaacacaaatacaccatatagaatatgccctgatatgtagctgtaaaattatgttgtactgcactgaagtcttatggcaactatataaggcactgctgtgtgattatgaacctgctcttttttttgtttgtgttgtttgagacaggcccctctgtcgcacaggtggagtgcagtgggcaatctggctcac

SEQ ID NO: 61916 - DNA, 433 bp, Homo Sapiens; identical to SEQ ID NO: 33636

SEQ ID NO: 61917 - DNA, 813 bp, Homo Sapiens
  misc_feature (625)..(625): n is a, c, g, or t
  misc_feature (657)..(657): n is a, c, g, or t
  misc_feature (677)..(677): n is a, c, g, or t
  misc_feature (709)..(709): n is a, c, g, or t
ctgtatcattttaattttaattattcccataagttaatgatcaaatactaataatatttatggaaaactagattatgccaagccctgcactagatactttactggcaaagactcattgaattcttccatcacaggatgaagagattcagagttcaagtaatgcccccacccacacaaaagaaaacagccaggtatttcactaggctggaaggattacaatatcaaaaggctggtacttacaaacaaattaaagaaacaaagcacatatttactcccaactagcataaagataagaacctggctgagcccaaggtaagtattcaaatactttatagcagtgactgggggccgagaagaggggggccaatcaatactcctcagggatgaggagtaagagacacgggacagtatgaaaaagtgtatttaccattacagggataactttcatatttacaaaatgaagggggaaaccccatggttttcttaatacaaatcacatactgtaaaggtccacaaactcttctcagctggggatctacgcagaacacatgatggcatctgcccgaacaaagtagcagtgcatggagtgcacgtggacgtcttcactcacagacttggctgcagncaccagggcctggcccacgatctgaccaccanacagcctcttggccggtacncagtaatgcctttctctgaagagatcctcgtncagccgctcgaggttgagcaccgtcgtgaccaagacgctaccgaggtccccaaggggatcgccgcgtcggcacagccctgcccatcttcctgggcctgccggga

SEQ ID NO: 61918 - DNA, 507 bp, Homo Sapiens
tttttttttcagggcaggcgacctaatgtaggaaacttaataaacccttgcattgatataatgatctgtcaggttttcatttgaacagttctccaacattctctgaactgccaaataaactgaatctaagccctattttttcttatgctaaagtgtgaatgattctggactatcttactgggaaaacatttcctaacaatgtttttaaaagtcataaggtcaaaactgcagttataagaaagaagggtgaatgcagtggctcatgcctgtagttccagtgctttggaaggctgaggcgggaggactacttgaggccagaagttcaagaccatcctaggcaacacagcaagacctgtctctacaaaaaaaaattttaaaattagccaggtgtgacagtgcagaaaggtgaggtgagaggagcacttcagttcaggagtttcaaggctgcagtgagctatgactgtgccactgcattcctgcctgggtgacaaaatgagactctatctc

SEQ ID NO: 61919 - DNA, 529 bp, Homo Sapiens
ctatttatactcttttggcccggtaggaaaacttcaaaaaagacaatatgattttctgggctacaaaatagcatttactgaataccatttgtgaaaatattgatatgcctacaacagaaaacatctttggaaggacataccagacatttgctgtgaggagaacagtatggatagtgagtgaccagtaaggagagatttctactttaaaaaatatatttgtgtatattttcagtttcaaattaaatacacaaataagtataaaatatctactttctgaacagtgagcaggttctctgcagtatttccatcctttgacttatctctgcttttggtctccatgtgtatgttcccgactttccaactccaccagacagaggatgaataaagaggaagctccaggctgtgaagcgtctagtccttgctcccctcagaagctgggacatgttggaccaaggtggtaaggatagtgaggtatggctttaccttgtacaattcaaaacaatcatattccttgactcagcaattctat

SEQ ID NO: 61920 - DNA, 474 bp, Homo Sapiens
tttgttttacttcttttattgttgttttgacctcagagagtcaaagatgtaaatggagatgtatattaagtatgaagaaatagggatacctctgagaaatatcaaccaacatatgatatgcaaaaaaaaaaaagggggaaattgtgtggtgagaaggtccatcaacccaaaaataatggccataaagtgccagataatctagttccagatgcaaacctaaatataaattctgcctgcatttggtgaaaatgacatgcattaggttgtaagaatatgaaccaaatatcaattatctgcttgaagaagttgaacgtgtttattatattaataaattcaacctttactattatagaatgttataataatttctaaagtgaatattgcttgaattttaaaatattgataattatatatattaaaccttgaagtgatttcagagataatctggtacaatattttatagacgaaagacac

SEQ ID NO: 61921 - DNA, 427 bp, Homo Sapiens
ttctgtctcaggactttcagggaaaacaatgttgacttaccaatgggcattttcaaagactctaagttggtatgtcagtcagtgtacagacaacgtgatccgcaaggcacgggcaccaccctgccgtgaaccacatctcagccaatcttccgcaaagaaatgtacccaaaaacttttctgtaaattcaggaaggtgatccacaccttccacattttgttttgaaacaatgatggtattttaaaagttcttcaaattaacaaaagtgatatcagaaatataaacatttctaaaacagagcgggctgtgaggagtgattttgccaaacttaagtcagtagcacttgacttatatctgcttttagtctgcggtggcaccacgcttaccaaggcacagtatccccttgctatccctttccttctgtgcatt

SEQ ID NO: 61922 - DNA, 549 bp, Homo Sapiens
gcttgataaaggtcaatttttatttaaaaagtaagctttcagaatcaattcagtggtgctacaacaatcatggaattattaaattgtttttcaaaaagcttgtaaggaaaaataatatagaacatcattttgaatatgaagtccatatttgccactgaaatgacaataaaacaaatgcttggcttcagaagaaaagcttttacattccacaatataatttgatacttctaattatcatgtacatatagaaatatatggtaaagaacatcttattaaaatagtgatcattccttaatattcaataaaatatttattaatacatagcgaattttaagagtaagagataagtatcaatgcagaataatctgtctacatcaaaggtgagtgaattaacggactattttgaggtaattttactcattgaattgactttccatggcacctgctctgttgagcaattatgtgtgaaaagccatgaactcagtgttgtagcagatataaacatgaagaagacacagcctctctccttgaaagtttatagtgtgttgg

SEQ ID NO: 61923 - DNA, 553 bp, Homo Sapiens
agcagcagcagccttcttgtccttggaggaattcagatttaatgaggacagagagatacaacgaaaattacacaacccaatcccacagaatgtgagcagatgaaggccatggctaactgggcctcagaacagagggccaggcctctggtagtcagcgtcccacctggaccactctggaagggacatagcctgggaaggaatcaggaggcccacagctccactcccttctcagtcagtctgtcttggggggcccaacgtggaggaacttgggccaatctgaaaaacacttcttttggggtcagagctctcaaaagggtgaccaaccacagatgaaagaaaaggaatcgaaggctaacctggtttccactggaaagaacctcgggtacacagtgtcgacagctactcctaacagctcagtgaggtccgtgctatcaacacagttttcagcaccacttcagagaagtttggggaccatcccagggccaaaaaaagaacaagtggcagggacgagaaggggtgccacctgggttcctgcaaagcctgctccctttcc

SEQ ID NO: 61924 - DNA, 520 bp, Homo Sapiens
  misc_feature (484)..(484): n is a, c, g, or t
ccatttttaaaaatgttttaatattttaaactaaaatttttaacttttttgtttgaagctttaacacatgtacagtcacgcgaccaccaccacagtccacacacagaatggctccacccccaaatctccttagtgccacacctgaccacggcgccttcccccaaccttccttcacctcttcccacccccatggtgcccaatgtgtcagtctctccccattgtcactgcagaggagtatttcactgcatagatataccacagtttaccagttcacccaatgaaaggcatttgaatttcagcttttgatgattatgaataaggcatcagtaaacatttacgtacagtttttatgtggacttaagtttttcattctctaaatacccaacagtgggattgctgggtcatgtggctgtgtacattgaactttataggaaaccaccatgccgtcttccatttccagcaggtccacaccctggcagcttgnggcaccaccagcattctcttgcactgcggctgtggt

SEQ ID NO: 61925 - DNA, 516 bp, Homo Sapiens
  misc_feature (208)..(209): n is a, c, g, or t
  misc_feature (491)..(491): n is a, c, g, or t
tgtaacgagatctgttaacgagacaagtggatttcttattttttgggagaataacatttcaagtcattgggattcaaagagtgttccataccatcaaattgactgcaacgtttatatgtacaaataattcttagctcatgactgtacaaaaattgggagctcagttatagtttggtgattgctgtggtactcctgtgattggggtggnncccaggaatctgcattttacatgcctctcacatgattctggtaatgggccatggaccaatggactatccaatcctcggaatctctgtccaccaaaggggcctgtggttttgcagtgcgagaacccggctgtgcacctaccagttgctcaacctctccaaaaatcagatgattcatcctcacaacaggggtggcattgcactgcttggcctacccttaaagagttgctgggatgattaagtgagatgatccatgaggtgctatgagcatactatgtcccaganaccaaagacatgccagttatgttga

SEQ ID NO: 61926 - DNA, 493 bp, Homo Sapiens
tctttttgatagaatattgtatttattaatgtggagctctttgtaccaaatataagtttaaaaatcaggttatcaaagagtatgtatgatacaacgcttttttaataaaataaaatacatttacatacatagtcactatgccacaagatgttaagaatagttttctctagatagtggccttacaggcaatttttatttggggtgtgtgtgttttactcaataaatatttattacttttgtattcagaaaaaacattaagagaatcataggaaagtttaactaaaaaagaaaatctttaaaatatcattaaattatttaacatatccttcaagtgagattgtttccttttgctaagctatattttgtaatctccacaacaaacatgaaatagtaaagttgacataaaaaaacttgcacagtaataggaagcagtgtttacattttgccaccccttacattttgaagagggaactcatattcttaaccaagactg

SEQ ID NO: 61927 - DNA, 449 bp, Homo Sapiens
tttttttttttttttttttttttttttttttttgtagtaacatccagtattttaatatttatgcttgataagtcatttaagttgaagactctttatgtattaatttcagcaagtaacataaccacacagaatagacaatgaaagcataattagtcattatacacaattataatttgataaaaaatttcaacatatacagaagtataaagaatgtgtatctatcatgcagcttctacaattatcattccaactcctcgtttctttgatattgccaacaatttacaccctgccccaattccaaatttggaaacaagtcccagatattaatataatttcctcttcaacatttcagtatgcctgagagattcttgtttaaaaaaaacatttttttgaggggcacagggtctctctctgtcacccaggctggagtgtaatggtgcgatcttggc

SEQ ID NO: 61928 - DNA, 533 bp, Homo Sapiens
tttaagtttccaggatggttttattaaagtcccatgctgtgttagaaacatacaagtgatgagaaaaacattaacttgaaacatgcacttactggcattctctaaaataccattatacaagttttcatttaattagaaaaatacccactaaaacaatcacagttcttcttaaagatttaaaaaaaatgtattggccagaacaaagtccaagagaataaacaaagttctgaattgtatgtcaaaaaaactgtacaaggttgtacataaaactatagcttacaaaagactcaggtatagtaagaattctgaattaagatttccaaagttctatttaccaatatctattaataaaatccttatgaaataattgacttagaaaaagtgaaatgctcatgatttcagagtgtatagaaaatactaaatatcactttccgaaataaagtgtactcaaaacagcacaacatacagtctaaaatcaagatttctgtcattcatttaaactttgcatatattgccatgatggcttaaacata

SEQ ID NO: 61929 - DNA, 396 bp, Homo Sapiens
tttttaggttgatagttcaaataatttattgctgctttatagtatacataattaaatgaaacatgttaaactcaagggaatttttaataggttacttgcaattgttattgcaggcaacaacttgtacatgattttatttccaaatccacaaaaaacaaattttatacaaatcagcactgtaaaaatgtcaattacagccccagaggctttgctggcagaataattgtctaaattctagaatatgggaaacaggtttttttctggattcatctttttttttcattttttttttttttttacaaaaaaaatttacaagtgaaatgttactacaaaactttttataaggaatttttgcaaaacatttacattttaccatcaactatttctggtttaaaa

SEQ ID NO: 61930 - DNA, 513 bp, Homo Sapiens
ttttttttttttttgccatggactcctttggcagtgataaagcctataggctccttctcagaatgatgttttaagatgcataaaataaaaggcataggataacacagaaaattatcttgaaatacagttactaaaatgtttaaaaagtaattttcgatatagtaaaaagttttttaataatgtattaagtaactagatgcatatatatttcaagctatctaagtataatgtgacataaaaatattgattctttgtattagtaactgtcacagttcagtttccccagaaagcagaatctaagctggagattggcatttggggagtttgctagggaacgctcttgacatcaacatgagggaaggcaaggtggaactggtcagagaaggatgacattgagctgtgatgaagtctgagaggaagcttcagccaaccttacagaaggtctgaagattatatgacccttcagaagtgccctgaatcaaagagggccaggtgtttattacccagctgagg

SEQ ID NO: 61931 - DNA, 537 bp, Homo Sapiens
tttatttcattattcattccatttattttttattcttctaatttttctttctcccaagtccatattttacatccatccatctaatcatatttattgagtcattattaagcacaaagttctatggatggcacgggaaaacccagtgatcaatgcgatggagtccttcccacaggagcctacaatctcaagcaaagttcagaattaattagtggttaatctttactgacttcataaaacgtatcaagcacagtgcagagcacttgacactcattatcacatttaattttaagctacctatgaggtggacgttcttttacagaagaggaatctgtagctcaataaagctgagtactttatctaggctggatccaaacccaggcagcctgactcccaaaccctgcatgcatgtctacatcacaccccaggcccctcagctctgtgagccctcctgacttcgattcctcctctgcttgcactcttttaacattagtcatcttaacaagaactctaatctatacaattcaagacgttacactg

SEQ ID NO: 61932 - DNA, 537 bp, Homo Sapiens
acaatttaatctttactcctgtacgataagagtgatagttctgtaaaaaaattaacagcatcaatgtctggtttatggtattgataatactgaagattcatgattataaagagccaaggtttttaacacaactgtaatttcattcttcaattttagtcctttttttttcaattccattttatttcttccacgagcaggtaaacatgcctcaaaatttgcattccgtagagcagtttttctttttgaagggtatagtcagtcagtctacaaaaaagcactgccacaaagctaaatcgttttactgtttgaaagggcaaatgctccattgccacacagaatgtaaaaagaaaataatcaacattagattttaaatgcaggtagttatttcagatgtttgaaccataaacaaacaaccattgctgaaaagcttcttaaaagcttgaaattcagaacttcagggtttcaaaaagtcagaagaatagcaaaatcaagtgttgacttttaacctgccaggaagctatattatattattttctc

SEQ ID NO: 61933 - DNA, 501 bp, Homo Sapiens
tttttttgcttctttatgttgatttttaaataatggatgttttagttgtataatttttaaattgttaagtggaaagttttcttaacctctaatggcaaatttgggttatatgcagcaggaatttccttaaccagtgtagccacacagtataacaagcatattactcttatgtgcactgactgctctcatttctcctatttttacctctctctatccagcctttttcttttactgatacatgatattttacatatttatgggtacatgtatttgttacacgtataaaatgtataataatgtcagagtatttggggtatccatcctcttgagtattcatcatttctatgggttggtaacatttcctgtcctctctcctagctacattgaaatatacaatatattgttgctaattatagtcactgtaatgtgctatcaagcaatacagcttgtcttttatctaactctttttgtacccattcaccagttgctctacatttcctc

SEQ ID NO: 61934 - DNA, 309 bp, Homo Sapiens
ttccataaacacgagtttaattagcccctggcgtctacagggaagaaataatcagacttcaagggtgccccattccccagagtccattcctggtatttgaaagagcaacatgccccggagtgttgtgagtcctctggaggctcaaggagacgcccgggcagccgcggctcttcccactggatctccgccgggaccaactcccaccctcgccggacaagctcagacctgctgctccgcaaaaccagaattggaaatgctccagatgggacgaggaacaaggacagaaagtcaaaagcatcaacaggtggc

SEQ ID NO: 61935 - DNA, 470 bp, Homo Sapiens
  misc_feature (231)..(231): n is a, c, g, or t
ttttttttcattaattcagcaaacatttaatgataaactctttgccagctgtcctgctaggaagcaggaataccatacaaagaagacatggtttatgccctcatgtagctcacagttcattaagcttgtggaagtgggtttcgtgaaattgaattttaagtcacataacagaatggtgaagacgtgcctttggctccactaattttagtgttcaaagttatccatcccatnttttgtgttttaagccttccaaattgaccacaataagtgaggacaccatgaataggttggatttgtttatcctctcaaggatctcattttttctagaaagctggctagtcaaacaatgcatgctttcttttggtggaaatatgcttcttacctaccacagaaaaagtaagaagactactcacaaagaactgggaatagatatggcctgggacaatctaatagccttctgtccttggaag

SEQ ID NO: 61936 - DNA, 606 bp, Homo Sapiens
  misc_feature (574)..(574): n is a, c, g, or t
tttctcctcagctgcacacaataaacaaagagtttttaaaaacactttttgataagtacagcagcactggcaacatcctactgcttggtatcatcttcacttgaatgggtatttttctttcttctcttttaaactcaagattaagacactgtctatactgatcacattgcaaccttctcctccagaattccatgctagagcaaaaatactcattagccaagtagttttgaacaatataaaataattattaaagagaaaatttatgctgccattcacctagctacctaaaaatatacttaataaaatatacaaaaacatattgacacacacaaattttggtaatttctatcactggaaaattacaagctaaagctaaaataataaatacataaataaatgcaagctctaaagtgaacccaagtagcatcatatttcatacacaggggaaaaaatcattaagtttaaatagcctggcagcagcaaaataaataatgctagtttcagaaacaatttaaaattcttagccatcaaaccatgcttcaactttcctgggtaactatttcttacctatctncccaaaacaaagaaacaaaaatatcaacagat

SEQ ID NO: 61937 - DNA, 502 bp, Homo Sapiens
ttaaaaccacacacaccttgcaaagaaaaagggaaactggcagtctctgtagaggaagccggtggcatcgctcagagccacaaactgtatttctaaacagccctttccctggttccctctctcctgccccactttttttaaaatccagactgtaaaaaacacatctactgacactcactttactttaaaaaaagaagagaaaaagtaaagcgttacaagactttcctcctggaaactataaactgaaaaaaaaatccataaaagattaaatcctggcgggttgtggggtggcgggggccggcggggagggggcgcggagtggagattggctctctgaggtggtcaggggccctgtgacagcttgggactttcagcacctggtttggggtcatttatctgctcaactgtcagaccccccacccccaaaccccagccaccaacacaaccatcgtagaagggaacacaacacagagggtcttttttcattttttttaaaaatcgg

SEQ ID NO: 61938 - DNA, 537 bp, Homo Sapiens
gttcgaattatcaacttagtcctttattaacaacttcaaggtgcaaatttgtgagattccagacaggcagttcaatgagcagctggattttgctggttcccaagagcaaggaaaattcccttgttttaaaaagccagatccatttggaatagtctttcttccccacatattacagcatgaacgtgactctaaagtacctgccgagggtctttctttttgtgacggtgggcgctgttccccactgtcatggacttctcacagcgctcagtgtgcattcggttgcttctctccataacgcctctcagctaactgtgctgtttctgtgctcctgggttgttaatgttcaagtcttggctctataccattttccttatcatttaggattccactgggaagacatcactaagttgtgaaatcaaacttcatgagttggctgagatcatagggttgggtgtcctctgagcacttgcaggctgggggaagacagaaaacctggacaccttgcaattgtttgcaacaaagtggaaaaactaaagt

SEQ ID NO: 61939 - DNA, 530 bp, Homo Sapiens
agggtaagactgacttttttttgctaatattgcgcccatgatatcttattggattctaatatatataaggatatcatatttacatcaacaagataatatttttctttttatacttccagatcattgtctctatataacaaaaagtatttaatattttaattttcaaaaatgtctctgtaaataagatacatcttacacagactgtatgtcttacagaatagcaattatattcaatatgtttatttctttgtgttacaatttccttgtttgccttatagagatgattcaggaccctaccaaatccactaggctgttgcaaatatcaagatcatctatgcaatagtcatttgagaaaaataaagcattatgcaaaatattgctatgctgataccaactatatgagcaactagggattaagccagatccccgtggggaacagaatattcaacttcctccttgcagtgaggtgataaaacctgtatggaccagctaggtaaccctagggggaaagaaattgtttaaagagacct

SEQ ID NO: 61940 - DNA, 451 bp, Homo Sapiens
tttccaaaagtaatcccattaacataaactcaggtgtggttaaaggggcttgtcatcctaattactcttaccactcaggaaatttcaagggtcttagaagctctgtaccaggggatgaagaccaaatatgtatttattataaatcacaatttcacagctaccactttttgttcaatctatagatgacaagataaatgctgctagaaacatctctacactttgacatatggaaaatttttttaaagatcctgtttcacatgtttagaagctgtgattaaatggtagtgaagaactttcaaaccaataaagtttatgggctgcattattcaaagcaaaataaatctatatttgctgtgaacattgcaagaacttgcacaaactaatgtgcactaggaaaaccaaaactataccccccaaaattaaaaacaaaaaaaaattctgagaaaagggg

SEQ ID NO: 61941 - DNA, 472 bp, Homo Sapiens
  misc_feature (345)..(345): n is a, c, g, or t
  misc_feature (467)..(467): n is a, c, g, or t
ttttgttgaatcttttactgatctggattttccattcttgctatggctgcctcttgtaacacaattaggagaaggaaggtaggagaaaataaagtagggaaaagaacatacagtggtttgggtggaacacatttttacaagaattgagtcagttatactccagaaatgaccaagagaaagttggtctgaatcatggaaaaagggcagaacctcaaagaaccagtccctcaaccctacccactcattttttatcctgagcatggacaactaacaactacaaaatcagaaatagaattgagtagagtatgtatatgtgtgtttggagaaggtggggaagaaaaggtngggaaaaccaaagtagaagatactatgcttgtgtaagactttctatctaagcccaagtacaaatatagtttgaaaattgaagatattaaagtgattggaagacagagaagaaaaagacagtnagtag

SEQ ID NO: 61942 - DNA, 455 bp, Homo Sapiens
tcttaatttttaataactagagattgcagagttagaaactaagttcaaagtgagagaacagctgcatttgtctttctgacctcatgcaattcctaggaaactctgtgttctgtgatttagtcaggcaataaaatgctctcactccttctctgtctctttatttcttccctaaatggaaaagaattgaccaggctgctttgagggataaagatcctgataacgcggctgggtgcggtggctcatgcctgtaatcccagcactttgggaggcgggcagatcacctgaggtcaggagttcaagaccagcctggccaatatggtgaaaccccatctctactaaaaaaaaaaaatgcaaaaattacctgggcgtggtggtgggtgcctgtaatcccagctactcaggaggctgaggcgggagaatcgcttgaacctgggaggtggaggttgcagtgaacc

SEQ ID NO: 61943 - DNA, 290 bp, Homo Sapiens
tttttttttttcaactttatagcaccattccaaaatactaaactttctttgcacctttattttttatctttttttttttttttggtacacatgtaaagtctgggcatcctgtaaatttctgaaaagcctcatagaaaaaaaaaaaaccgactaatttttaggacaaagcaataactcagtttataggcaagatgatctcaagcaggctgtaaattcttcgggggcttctgtaaatcttgattcgggggtgagaatatggaaaggaggctaaagtcttcctggattagtct

SEQ ID NO: 61944 - DNA, 453 bp, Homo Sapiens
tatttaactaatgagtaaagctgtccttcataggtttaaaaactgtgtatttcttttcctataaactgttgtttatattttttgcctgtttttctcaatttgtaggagtttgcacattagccattggtagtaaagttatcaaaaattttttcagcttgccacaagtcttttttattattttaaaattatcatgcaataagattgattgttttgggtgtcctgtatgaattttaacataccttcagcacaacccacacagctccccttgcactgggtctgtggtccgctggcgtcacgtgtgtctagttttagatgaaagtccagcttggtgagtccctgtgggcgctgagagcagaggcgtggcgggatggagtcatcctgggagaggcaggagtctcttcccaggcatggctttggagctggatcccagtcagcagaaggagtcagaggtgg

SEQ ID NO: 61945 - DNA, 365 bp, Homo Sapiens
taaaattctttggattttttattggattcacataaagcaaagaacttactcacttggaccgagaatatattgtaatgttccataagtcataacttaaggaccgagaatatattgcaatgttccataagtcataatttaatgtgcagtaagaacccatgaagttgtctgaccaaaagtaacactcttctgttgggaaagattttacatccttttattctggatgaatcctgaattctagatgttgggtttaatgcttcacacaatggcacatttacaagaggtacaaaacacttattgagctttcagggccactgtaaggggcttgcagaatagcctctttgcaacccagagaattaatctgattc

SEQ ID NO: 61946 - DNA, 501 bp, Homo Sapiens
tttttttttacacgttgtcacattctttcaggtgattctgatttaaagaaaaagtttggaaatcactatacacactatactgcctctctctagcaaactaggtgaacagaagtatactataatgcaggagagcagcggggaccagccaactactactatttcttacaaccttttaaaaatataaaaaactttacaagttctgtggctggtcaacccctggttataaagagaagataaatacaatgccataaaaaatttttttaaaaatgagctaggcatgatggtgtacatctgtagtcccagctactgggaaggctgaggcaggaggaagggttgaacctgggagttcgaggctgcagtgagctgtgatggtgccactgcacttcagccttggcaacaacaaaaaaaaaagggccagcatgtcatccctaaagagcagttttcaacagttgctagaggtcatgaactatatttgctttcttacctcatttgcatttctgc

SEQ ID NO: 61947 - DNA, 466 bp, Homo Sapiens
  misc_feature (283)..(283): n is a, c, g, or t
aatcacattttgaatgcaactgagaaactggttttgtaggcctaccttttatttaagagtacatctggctccaatgttaccccaaacatgcaaaacataaggcaacaattctgatcattttataggctcccaagcccattagcaatatcttagtcaaattttaaaaagagaacaggaaataaggaaggcctaacagaggagttaaataattgtgcaaaacttatcagttcttcctatttgaggtggatacaaccttgtaattatcctactactaaaccccagntaagaacatgatgtaattatatttcaagtaataacttttaggtcacccctgatgaaaagaagtccttgttggagaatcacttcaatatagaaacatgttatgcttctaacctactggcataaaaactctgctctgtaagagcagaagctgtcctattaaaaaactccatggtgactgattacc

SEQ ID NO: 61948 - DNA, 570 bp, Homo Sapiens
ttttttggttcaaaaaatattgattaatacacataccttgaccgaaagaaaaagtgattactaattggacacataagtggacacataataagccgggcacataaatggacacatactaggctgtttcagggaatgctgtataaaccagctgctcagcacttgcagctcttagcagttacaaaacaactagatggttcacaagactcatgtgaagctgagattagccatgatctgcccagcaaagagggcaaccctcaatcagattagccagttacctggctagttgctaggtaatccaaagttccgggggtcacttgtcagatttcctgcttggcactccacatccctaccataccctacctgaatacgaagaaccctccttctctttcaaggtgattacaagtcatcctgcactgggaaagaaggttacattaataacagtttgaatggggctcattaaatctcagggcttagagaagcagcactacttttgatcaattaggaaatacataagatgtcacaggaaggcacttctcaaaacgattaggaaatattctcaggcaccttctc

SEQ ID NO: 61949 - DNA, 546 bp, Homo Sapiens
ttcccttaaattgcctgtgaagtaggcattctttattcctttacttctcttaataaactcgctttcacttaaaaagtttacattgcattattgatgacttggtcttattgttatcattcatgcggacattaataatcagtggtgataggtcaatcattaaataagccttctgggaatatacacattctaagttggtcacacaatagcaaaagtcattttcattgactttataacttaaaaatcatctggccaatttcaaaaacaagtgagttagaatacgttagcagtgaaatattctgtcccatttaataaactaagatgaattatttcctaggaagttgaatttaattcctttgaagcctacacagtggatcaaccatgtgcagtttgattgtggattttattttttattgattacggagttttcttaaatggcagattaagtcaattaatagaaaaatggagatgctataaactaagaaatatttaaattaagaaatgttggaactcatgaggagtaaatgtgaaaatgaacaaaactcagaa

SEQ ID NO: 61950 - DNA, 559 bp, Homo Sapiens
ttttttttgataaattggaatattttcagagtaaaaagttagagataaaaagacatgttcaacatagagctcttttggataatttgccattgttgtacccatactgaaagccaaaatccagattttgtcaactttactccaacaataatacagcaaaatccacatacagattctatctgaaactgcctccttccagatcaatattaaaccaagtagagggtgagccttcaggcctgcaggctagagaattaggggttaccacttgtgccattaggaaagagaacttcatttttatttaatactttttggatcataattatgcactgagtactcttctaactttctaaatgccaattcatttacttcttataaaaacccatcttgtaggtactattattatccccactttgcatttaaagaacccaaggcacttgcccaacattacacagctagcaagtggcaaagccgggattcaaacctaggcaaggtggctccagagcacagctcctcacaatgccgccacattgcccatcttcagagaacaagtatcaatccttca

SEQ ID NO: 61951 - DNA, 447 bp, Homo Sapiens
  misc_feature (153)..(153): n is a, c, g, or t
  misc_feature (355)..(355): n is a, c, g, or t
tttttttttgaataacattttgacctaaagccgcacgttaaggtacatggttaacttcttggtctctatttagccctatttgtttaaaaaccagtgaaacatagcgaaaggggaaatttcaaaggctccttccctttctccctcccggggagnaaggaactagagtcaagcgcggtcccaagaaggcatctgctgaagctctgttgctgctgtgtactaagaatcagcgtcctatgcacaatgaaggtggagctcatggaggggagcatctcgggcacacagagatatagtccttcaggggtctgcttggggctttcagtgaggctgggagcttcttgaggggaaggcccctggnccaactgttcccttctaccccaaagctaagcttctgcacccacgacaggcacgcatggctttgggtttttgacccaggcaccagtttgccac

SEQ ID NO: 61952 - DNA, 511 bp, Homo Sapiens
gtgaaattgaacctgaaaaaaactttgaacctacaattttatgttctgaaaatagttattctaatgtgagggcattaataagaatatgtaccatcaaagcatcagaagattttccatacaaactaaaatcacttttggagaaagtacctaaataaaaagagaaacaaatccaggagatactgtacggtttgaaagaaaggtaatcaaatactcagaaaaagtttgttgatgacttaaaaaggataaataaaaagtaagactaaagaaaatcagtatacccattaataataaatctttagtaatctataaggggaagaatgcttttcaaccttatacactagaagcatgctctttaaaattaatgcaacaggatgacgacttgatgtagaaactatatgtggaattatagattaaaatgtgattgaaacatatttagaaaatgtgattatcttcctgatcctactccctttaggaagaacttcttaaactggaagcagaaaaaaaaaaaacc

SEQ ID NO: 61953 - DNA, 570 bp, Homo Sapiens
  misc_feature (61)..(61): n is a, c, g, or t
  misc_feature (86)..(86): n is a, c, g, or t
  misc_feature (182)..(182): n is a, c, g, or t
  misc_feature (254)..(254): n is a, c, g, or t
  misc_feature (273)..(273): n is a, c, g, or t
  misc_feature (412)..(412): n is a, c, g, or t
  misc_feature (435)..(435): n is a, c, g, or t
  misc_feature (440)..(440): n is a, c, g, or t
  misc_feature (449)..(449): n is a, c, g, or t
  misc_feature (460)..(460): n is a, c, g, or t
  misc_feature (468)..(468): n is a, c, g, or t
  misc_feature (475)..(475): n is a, c, g, or t
  misc_feature (493)..(493): n is a, c, g, or t
  misc_feature (501)..(501): n is a, c, g, or t
  misc_feature (525)..(525): n is a, c, g, or t
  misc_feature (536)..(536): n is a, c, g, or t
  misc_feature (554)..(554): n is a, c, g, or t
ttactgtcttcttccagtattgcacaatcccataattattgctattcagctaaaaacatgncctcgaggcattgcagaagatgagnaataataattttaaaaactggagttcagcaacacggaactcttgaaagcactagtataaaagcattcaagaaataacttcctctggcttccttggnacttgtttaagagattactaatgggcaaaatcaagtggaaattttaatggatcagtaggtctttatgaactntaagttccccagatgaaantcaaaatgctgctcgtgatgtatgcctcagaacaggattgctgacctaaggtctgggaacctgctaaggctgtgggcttatgcactgagtatttgagagcatttttctgaaaaggggagcacatagctctcaactactntccaagggggtccccaaatgttnaattngagtttctngttgcagcagngtttccgnttggggnccttttgttgtcttgtgncagggaanccccagttaaggagctgggatgtntctcctccttntgcccaagcccatgttancttttctccgtcctcc

SEQ ID NO: 61954 - DNA, 511 bp, Homo Sapiens
tacaagtagaagttgtacactctaaaataatgattaaaaagtataatatagtaattacataaaccagtaacatggtcatttattataattttcaagtatgtactgtgcgtagctggatgtgctagacttatacaactggcagtacagtaggtttgtgtacaccagggtcaccacaaatgagagtcgtgttgatgttatgatggctacgatgtcactagatgacaggaatttttctgcacctctatcatctcatgggactgtggtacatgcggcccatcgttactgaaatgtgatgaagtgcatgactctagtcttcacagatacggaggctctaaggacagatatcaaatacattagactgggcacctatgggggaacaggaatagggaatgaaggagagaaaagagtaaaataaaaaacaaacatgcaaaactgtacataactggcatggattaatggtgataatgtaccaggcactgagaaatatgacagaaaaatatgagaattaagg

SEQ ID NO: 61955 - DNA, 502 bp, Homo Sapiens
  misc_feature (292)..(292): n is a, c, g, or t
tttttttttttttttgactaattcacaatgatttatttaaaatatcttatgaatatttgagaatatttgtgtgataacacacaaagcatataagaaaagcagaagttgtgatttttattttataatgccaaaataaaatgattattgcacagttaaaaagcaaatcttaactaaaatgctgaaaagcagtgtctcagctgtcagggtggcaaataacatgaaagtgacaattagtccttcacacattcacagtgttggccgactatagactcttcagaaccagaggtacagnggatatttctcattccagggtcatggaactcagccttgggaatactgaactatttaaatcaaagttccaaaatgtgacatctcaaatgctccctgaattcagcagacaaatgaacatttcaggtatagaaattaactcagctttataatttcaggtttctctttaaatactagaactataaatatttcaaaaagctattcaggtctattt

SEQ ID NO: 61956 - DNA, 407 bp, Homo Sapiens
ttttataacagagttttgctcttgttgcccaggctggagtgctaaggtgtgatcttccctcaccgcaacctccacctcccgggttcaagcgattctcatgccttagccttccgagtaactgggattacaggcacttgccaccacgcctgcctaatttttgtacttttagtagagacaaggtttctccatgttggccaggctggtcttgaactcctgacctcaagtgatccgccctcctcggcctcccaaagttctgggattacaggcgtgggtcactgcgctgggcctacagctcatttcttaccacataaagttttgcgcctctccacaaaactgccatcagggatgtccccagaaaccattcatcccaggcgccacgagagaagagctgcttgttctccttttcc

SEQ ID NO: 61957 - DNA, 500 bp, Homo Sapiens
ttttttttcaagcaccaaactagaaccaaatttatttatcagaattattgagttggatgaaacagaaaataagccaacagaacacttaaaaatacaagtttattttctccatattgttaagtctaattatgatttatttcaaaatcatgaaaagcagagcctagcataccaaatgctaggtcagatttgctctggaaacttactttctagattattttttggacttacttaaaaaataattaatttccattaatatagcactaatagcctccaaattatactgcagaattcctatatgtaaccttttttaaaaaaataattcatcacctgaaaaagatatatttactacagttaagtttttaagtcaagagttttctctgggaattgatatattttatctataatgtctccacttctccatactttcatcaaagtgtcactgaagcagctaaatgcagtcctgtggggctaggtctacaacatctgcttaggtttatttt

SEQ ID NO: 61958 - DNA, 447 bp, Homo Sapiens
ttttttttaagaaaattcagtaattctccattgaacatctactacatatccaactctgtgctaaggtatgctgtggaaaagtcaaggaagaatgtatgagacacatccctgcactcccaggagtttataatttcggaggagatgcaaacgtggacccattttaatgtaacaaaagatacactgtgttaacagccaaaatggaggcctgtacagagtactggggcaacctggaaatctggttttaggatacactgcattcaaagcaatttgcttttttcttcaacatttcttgagcacctgttatgtgcaaagcaaggagtcaggtgcctttctggaaaacgaaataaacacggcactgtctctgtttacaactgcccatttaacaaacatttcttgaacatctactacatgtgatgcattgagctcaaccttaggaattgcagatgg

SEQ ID NO: 61959 - DNA, 595 bp, Homo Sapiens
  misc_feature (514)..(514): n is a, c, g, or t
ctttgaactctcatgctttactttaaaatacattagaattaattttgcactctattctataattcattcattcaacaaatattagggacctactgcatgccaggcattattacagggatacagtaatgaataaacatatctgtgtttgtttttaacctagtgacattttaatacaactggcacgagtagaaaaacaaaaactttaccaaatcaaagagcaaaaccgataatccaagatggaacaattattgcttcaaataccactcgtcatgctattgcaacctgagagtatatttgcacccatttgagcagcatagtcttgggctaattcccagaatacaaagccaacagtaaatatttactctagatgaaaatatttgagaatgttattagaactaactaggttattagaagacaactaggttgtcttcattttaccattagattctgcctttaggttctgaaatggcaaaggtggacatccactttaatacctggagaaatatataaaatntattcttaaaaatcacatgaagtggatgggaggttatcattcttgacacttcaaagttaagtcttgatttcagcaccacat

SEQ ID NO: 61960 - DNA, 553 bp, Homo Sapiens
tttttttttttttttttaataggaagacaggaaacagtgataaacctttaatatctgaaacttgtgtcattgaccttcaactacatagtgaggttttcagttcagaacatttagggcccatgttacatgtggggataattaaaatgttttaagtgatgctttctattcttcaagtgttggccataatattcaagctgggtacaagcagcagagatttttgtctgagctcagtccaagctctgcagtttctgctgtttgtctttctaggtggcaccagtcagtcatcctctgcagctcatgaaacccagcataaccttttgggctgctctggaaaaacacattgagcaataagggttagaatactttgtgttcaatgtttccagtgctactctctggccaggagaaataccaaatcataggcatctggaaaagagagacagcccagaaagaatgatgatgttacaaagcctgtgagcacagacccctcgtacatgttcatctacctgctgtctgcttaatactgagctataggcatcggagcaaatggtaatcc

SEQ ID NO: 61961 - DNA, 395 bp, Homo Sapiens
tttttttttttttttttttttttttttttttttttaaggtcatctagttgtattgtatcagaacaagcaaggaaatcccataatgttctttcaactgtttttacctataagattttgcaaccaaagactttcggctaagatggccacaggacatttaacttgtaagggctagtatgaaggtactacaggtataatgcacatcatctagcccaccaggaaggaaatatgcttaataacttgccccaggctgtcccaggacaaggatctctagagaaaagacaacctacagactagttgcttgctgttttccaaaacatttgttggaagaaatcacatgacacatgtatcaggaacattttctaattatgtatataaatggatatgtgatatgtgtg

SEQ ID NO: 61962 - DNA, 446 bp, Homo Sapiens
  misc_feature (57)..(57): n is a, c, g, or t
  misc_feature (127)..(127): n is a, c, g, or t
  misc_feature (424)..(424): n is a, c, g, or t
ttttttttttgtatctttagtagagacagggcttcaccatcctggtccaggccggtnctcgaactccttgactttgtgatccatccccctcggcttcccaaagtgctgggattacaggcgtgacacncatgcccggcatcctttatttttaacaggaagaattgagcttcttatttttgccttacatgtgtgaatcattactgaggttattataatatccaactgcacacaccctcacctcccaacctttaatgctcagcgcccacacacaagtccagtttcatctccaaaggcatgcagtttcatcccccttagggcttgcaggctcctttgtgagtctaagtgtcagaagacggggaaagagaggcttcaagcttgtttgggcatttgagggccaaaagatgaccccattcaccaccagaanggttgttccccgggaagggttc

SEQ ID NO: 61963 - DNA, 451 bp, Homo Sapiens
  misc_feature (79)..(79): n is a, c, g, or t
  misc_feature (440)..(440): n is a, c, g, or t
ttttttttgccacaacacaaagtttattcaaatcagaaaacagataagcttcatgacaggtggtgatgttataaaaggnaatctatatcaagggttcagtacaaattagtctcggagcctgatacaatatgcaatttattctaaagtactgtatcgtcagtgtgatattttccaaggtaagtctgaatcgtgagtggtcagcacacatggtgggctgctatccgataggacaattcaacagacactgctaattagcatactatatatttaaaaatggacttttatggggaaactagtgtcttgttaattgtcatgaaaggttctcgtgggcaaaattaaatggattcaaggctggccagaatagctttcatgactagggggtaagaatccatgaactttccttcagtccctagcgacagtggctgaggcccgtgtctgtntggtccagttt

SEQ ID NO: 61964 - DNA, 494 bp, Homo Sapiens
tttttttttttttttttaaattttcattctttaatctcaatacattatatagtcacacgtttcagatcatagattgtatcacataacaggaattaaaaactaggataaaaaacagtattaggaagaaaagaaaagactgaccaaattaggaactttagtgttagttacatgtgaagttctttattatgttgtacagttttacaaatctctacaaagaaaccataagaaaaatattctattctagcccaattacagaaagaaatttaaggtagaaactactgaccagctgattaaaaaatacttctgttgctttaggacagttggtattcaactgggggaatttttcccccaggggacatatggccatatctgcatatatttttgatgaccaaactgcagaggaggtggtgatatgtgagctactggcatccagtggatagaggccagggatgctgttacaaatcctacaatgcacaggacagccgtgcataaca

SEQ ID NO: 61965 - DNA, 671 bp, Homo Sapiens
gaaattcagaacctgctggctggggattgggtagcagggtgatctaacattatacatcctggaagttgtttgatgcaagaaaggcctctcttgctgtccagatgttcaaagtgataaaatgcacttcaaatgtgaaaatgactttcattctggcaaacacagatctgttcgagacaccagcctaataaataaggtcgtcaaacttcatttagcttagagaactatatggccaccccaactccagccaagaatcacttccaagtgactgacattctcatcagcacatgccttagaaatctacttgacaaacagatactgaacactcatccatggcttaatccacaaatgttagagtgtatttctgaaactagcagactagggtagatggaaggaatttgtgaagttttcttctacatgatcaatgaagagggaaaaaaaaatctgtattttttttttttttttttacctcttggcccatttccatgctgcaaagttttgttgattgagctttggcatcaaccataacattaaacatggtgcatatttgactgtgggactcgaaaatctgttgatcgactggttttttgcagcttaacttcaaatgcaatcctgggttttttgacacaagattcgatcatgtcactttgcatcgaacttagccgttggtccag

SEQ ID NO: 61966 - DNA, 474 bp, Homo Sapiens
gctatacagggactctccagaaaaagtttaagaaacactgaaatagaaaaaaactaagaaaactagaaagtggtcatcctccttttcaagagcatagttggtgagaggaggtacacagagggcaaaggacagagtactagtaacgaaagcagtgggctgattcagtaatcttggtagaaaaaggtattcgagcagaagcttggggttggaagttcatagtttttgtttttgtttttgtttttgttttaggagaggagagatctgagtacattcctaagttggagtgaaggaagagttaaatatgaagaaaacaactgacaaggcaaagtctcagaggccaggcatggagggctcacacctgcaaccctagcactttgggaggccaaggcaggaagatcacttgaggtcaggagttcgagaccagcctgggcaacaaagcgaggccttgcctctacaaaaataatttgaaaatac

SEQ ID NO: 61967 - DNA, 406 bp, Homo Sapiens
tttttttttttttttgtacacaagacagtttattttggaatatggcaggaaagtattagcattttttatttatattgctgcttatgccattgtttaatttgtttttgtgtataaggtacaaaggtacattttcatgcatataccgtatacaaaacacatgtggccccacacatatacacatgtgcactcacgtgtacacacagatacacacaaaaaaatgaggttccatgctgcctcctttcccctgcccatttttctgggcacataggatcaggaaagtttgatatcactgatttaaaccatcaatgcaaaaacactttcaaaggaatcttaaaatatttaacaattctaagttttataaagaatacaccttaggcaataccagtttaaaagaaacctcgtgccg

SEQ ID NO: 61968 - DNA, 442 bp, Homo Sapiens
ctaaaaaagaagcagagctttaaaatacaagaaaagtcacatatcatctcctggtgaatctatcacctgcatatcactgcctttggataataccttaccttcacagtcagttaatgtccacaggacaaccataaactgcatattcttatttctctggatagagaatgtgctctctctccccaagtctggggcaatggattgagagctagtaggctccagtacacatcagtgttcctttacaatactagctcttcccagcctatctgccacctaacactatgttaaacatactaatacttttaccaggaaagggagaaaaaaataaagtaaaaaggaaactgagaggaagagtggtgggaggagggaagtaaatatgatcatctctggcaatgtccagtggcaaatagacttaagagtttatgactctgcaatcatctcagct

SEQ ID NO: 61969 - DNA, 593 bp, Homo Sapiens
tttttttttttggctgtttaaagaagagatttattttattatttaacttttaaagtctctaatatgccttctaagaagggttctggctcagaaaattgcagaagaaaatcgagtagagaactagaattacagaaacctaagaaatacttttactgagctttcttcacacaagaaaatgcacggaaatgaattatacatggataccaatttgtgatttttaaaaatttgtaattttttaaattaagataaaaattagtttatttttttgaatacttttttgttttgttttacctcaccctttactaagctgttagcttggtctgttgcgcttactgctatatcctcagcatctagtacagttcctgacacatatatgcacttaataagtatttgtcaaatgaatattattgagtaaataagatgaaggtcaattcagaaattcagcactatcaggctatatacataatacagactattataaaaaactagaatggagcagttccttttaacgacggagaaatgtcagtaacatactttgagcacaatatagctaatttcacaactggtctttaaatataacatacctataatca

SEQ ID NO: 61970 - DNA, 404 bp, Homo Sapiens
atcaggttatcagaggcattagtcccttaactttaaaatagaataatatttaatagtctaaaagtaatttagattagaacaaattaacaatgagtataaaaaatgtttctgttcagcctgctatgagagttgggcattttacattcaaatcaccccacacgtggcagaaaactgtttccttacagtggccattaacccaaaggaagaacaggaaagttggaggacgctggtgttccttcctcatctctgccatagagacagtaccattgggctttcacgcaaagccatgtgagcagtgacggcctatcctctttttgtagacgcagaagttacactgtctactagcagaatcaccatcacaattccacccagacctcttagaagggtcagagtttctggaaatc

SEQ ID NO: 61971 - DNA, 402 bp, Homo Sapiens
gacccacgcgtccgcggacgcgtgggctggtcctcgcagtccgcctgagagagtagagaagaccccctcccagaaccttcctgtaaggtctccccgctgacttcctgtagtggatgtgactgtgtgccaggtgcctgccgaagacccctgtcactgactgtgcccttgggaaagagtcaacaatggcctcctcctatggctgacttcgttcatgttcaggctctccagcttgctagtgagaattgccaaggattggttcatggcaggatagaactaaactgatagatgaaagctccacagtgcttcaagacggggtcccgttcatgttaagcagttttccttccttcaaaataaaaaactagcagtccttagggaaaaaaaaaaaaaaaaaaaaaaaggggg

SEQ ID NO: 61972 - DNA, 310 bp, Homo Sapiens
ttaaagatagggtcctgccatgttgcccaggcttgacttgaactcctaggtcaagtgatcctcccatctcagcctcctgagtagctgcgactacaggaaccagccaccacacacccatgtccacccaccttagggttaatctttgttactagccctcactactcagaattggtgagacctctccatttctgcttcactcagcttacgtggtttgctcacactgacaccaacaaacacctgtcaatccctatgtccctcctgtcttccaaaaatacctagaaattgctgctctattgacggtagtatttct

SEQ ID NO: 61973 - DNA, 533 bp, Homo Sapiens
tttttttagcttctgcaactcctaggtaagaagtttctactattttcctaataactaacttctctggtctttataggggtcttatcatatatgatgtaaggccagggtcaaagggatacttttgcagaaatgtgaggccctaacagcagggaaggattttgtgtggttggggaggttggcaagggaattctgccagcaactgacaaggaataggatccttctagtagcaaccagcatttcagtttaaattagtgagcaaaatccctttctagtgggcatgcaaagagacacagttataaggtctgctggaagcaggaggcacatatcaccttccagcctgcctccttccacttagtgcacgaaaatgacaagtatctgaatgtagtcaagttttcattttagggacctgcccaggacagcttatcaaatgcccatggaaaaaaaatggaaacaatatggcccaaggctgtggctacctgatgagttagacttcaggattcactggtcatcagcttctaatggctctgcagtag

SEQ ID NO: 61974 - DNA, 590 bp, Homo Sapiens
  misc_feature (450)..(450): n is a, c, g, or t
  misc_feature (515)..(515): n is a, c, g, or t
  misc_feature (547)..(547): n is a, c, g, or t
  misc_feature (558)..(558): n is a, c, g, or t
  misc_feature (570)..(570): n is a, c, g, or t
  misc_feature (581)..(581): n is a, c, g, or t
ttaatattttaaaagcttattgaatcacaagcatttttttattttactgtaaaaacatcatctttatcagggaggggggaaagtacaaaattatgtccctgatatgattcaaccatgtaaaatgatgtacatttatgaacgacgactagaagtgaacatgaataactgaaaacaaacagtgtgatgcaagtgaatttttggagggtgagatggtcattatattgttcttcgagcaattaaatattttattttcttcccaaaacaatgtccacaagggggcagacagaagatgacaaataaaaccatttaataaaaacctcagctgaaaagctaataactccagaatgcaggttgaaagcaagcttaaaggtcatctaggctggggtcagtagctcacgcctgcaatcccaacaccctgggaggcccaggtgagaggaccgctcgagcccnggaggtaaaggccgcagcgagctatgaccgcgccactgcacaccagcctgtgccacaaagtaganttcgtcccaaaaaaaaaaaatcctcctagtcntctagtccatntccccccctggncaagaaggacngaggcccca

SEQ ID NO: 61975 - DNA, 488 bp, Homo Sapiens
  misc_feature (110)..(110): n is a, c, g, or t
  misc_feature (117)..(117): n is a, c, g, or t
  misc_feature (328)..(328): n is a, c, g, or t
  misc_feature (399)..(399): n is a, c, g, or t
  misc_feature (409)..(409): n is a, c, g, or t
  misc_feature (422)..(422): n is a, c, g, or t
  misc_feature (433)..(433): n is a, c, g, or t
  misc_feature (445)..(445): n is a, c, g, or t
  misc_feature (455)..(455): n is a, c, g, or t
  misc_feature (464)..(464): n is a, c, g, or t
  misc_feature (476)..(476): n is a, c, g, or t
  misc_feature (483)..(483): n is a, c, g, or t
ttggaaaagaaatattcctaataattcatttaatcatctggagagtgggttgaagttttgtaaaatttaatttcttcattatagactgtattattttaataaaagctttnctttggngtcacccattgtgtgcagcactgagctggggccctgggagctctcactattgtccatctggccgcaccactgtcagcactgctttcaatgaactgtaacagaatactgatgactcaggcatttctgctggctgacagggaaggtccttgaggcgaggtctctttgtaggttcctccaagaaagggatgctcagggcactccttgggggtgnaaccagctggcaggccatgggaggagggacaacccgggttgccagtaggtaaggtttgcactggggctatncccagaggcnaggaacaaggggnacagggtcagncccccaggagtncccagagggncacagactnggggcaggtccnggggggnttttt

SEQ ID NO: 61976 - DNA, 505 bp, Homo Sapiens
  misc_feature (424)..(424): n is a, c, g, or t
ttaccaaaaatacaattatgctgcatgcatgtttggtctatttgatttccatttaacaatatattatgaaactttgtctgtgccccaaatatattatattagcctatcatcattaatgacccatatatacacatatattgcccacaatttatcaagtcaaccaaaataagcatggactggatgtgtatgtatgtttgtttaaaaataaagaatgttctccttcaactatgaataacttcagaagttagagtaatgctgctttgaaaataacactattttctactatgatagaacttatctttgaagaaaaactgaatccccattttcatgaatatcatacctttctgagaaactatgacacatacataattagttacgaatacagactctcagaatttgaatttcaattctcattacagtaagncctctgttattgtaactggaacatggttgaatattgaactggataagaagaaatagaagaacaaaaagaaacaggacactg

SEQ ID NO: 61977 - DNA, 406 bp, Homo Sapiens
tttttttttttttttttcacatgagactcttccacatccttttatttactattttctgatttttaaaatgacagtggcaattaccatttatactgtgttatttgtataagctgttaaacacaacattgttaaacacaacgaaaattcatttttctacctgaaagctgtatcatagaaaattattttcaagtttatattcaacagcttaataatgttcaaaccaggctgggcgcggtggctcccagcactttgggattacaggcacgagccacggcacccagcctaaagcaatgttaggtttcaagaaaaacctaagcatagcccactagtttttactgtttcctttattatattgcaatctgcaaaactatttgtattcagccaagtatctatgtccctcgtgccg

SEQ ID NO: 61978 - DNA, 520 bp, Homo Sapiens
gctatccaacagtaaaagttacctattttcaagatataagtatagaaaaaaatcaacagctttccttaattgaatctcaaaattggtcttctcctagccttactccattagatagaataatagaatgatgctgaataatctgtcaatagtgaccatctttatactgtttttgaacttaatggaaatcattccagttttactattaagtatatttgcttttgatttcaaatactctttttttatatatttttttaagagacagggtcttattctgtcactcagactggagtacagtggcatgatcatagctcactgtggccttgaactctggggctcaagcaatcctcttggtggttttaaaaatttttgtagagacaggagtcttgctatattccccaggctggtcttgaattcctgcctcaagcaatcttcctgccttggcctccaaaagcatcaggattacagaagtgagctatcatacctgactcaaatattattttattatataaaaatgtatttt

SEQ ID NO: 61979 - DNA, 643 bp, Homo Sapiens
tttttttgtttgtttttgttttaatggagcatttacatattactatacatgaattctatcataaaaatgccaaagctaaatgtattgataatctttattatcaatgagcaaacattaatggaatgaaaaagtgtcttaacaaaagacaaccatgtaaattctttatctgaatgacattatcattcataacccagttttactcatgttccctatgtaattttccaagtaagccattctgctgagagtttagtccttggaaaacttggtgttcttttgagaaactgatatattttcttcattctcacaatggcagccatgaaactcaggtaaccttccctgagtgctggcaggctcagaaccaggcctgcagcttaaccagcataactgtgttgatttggggttgtaatctctattttctcccttgttaattctcctcccatgtcctttgtcattgctcttcactaatattattgtcgtggtttctcctcttctcactgtgtctctagatgatttttcaaagaggcaaaggataacacatttaatatgtaccaattgctctccctcctacatctccagcctcattttcttccctgagatctagcatggtattcctacatcttgcttgtattgtgtcccagcctct

SEQ ID NO: 61980 - DNA, 565 bp, Homo Sapiens
  misc_feature (15)..(15): n is a, c, g, or t
  misc_feature (17)..(17): n is a, c, g, or t
ttttttattacattngntaaattatatttttcttgaaatctgtccaatgaatcaaagttttgaggcataggattctgagattatgtatgctcaaaaaagtatgtcaaaattgccactgaacggaaaactaaatggtactgttgtgatcctctagttcatcttctacccttatagaggagaatattaaagttaaaagagatccagagatccaagtactcttccctcacctcacctcaacacatagctgttaagtgacagaactgggactagaatctaagtctagtgctctttccaatatgctatgctcatttcttaaattgactgcatccatcagtcagcaaatcaaagggagaacagataagagagctgtaatcaggaacaacttcaaccactgagaagagagaatgtttactgtgtatgtggtggttgtaggcactgtcttcatattcctctccagttcctccatgatcttatcacccctatcttcctcagtgagaagtgtgtggtgttcaggctatggcttctctaaattctaagatcttacccagttccaagctactcctag

SEQ ID NO: 61981 - DNA, 533 bp, Homo Sapiens
aaaagctacaatggttttatatggctcataaaagcctttaaaaagtaggcaaatctgataggtcatgtacactgatcctaccccaccaaaacccttcaaaaatgctttctcactgagtttaggataaaatccaaaatcctttatgcagcttacaaaggccctacctgatctagtttccattttcctctacagaactaggcccttctctctttcctgttcttcactggccttttttctgttcttcaaaagtgcccagttccttcagaccttgtgggatttgaaattctgccctttttcctaataaaatttactgatgacatctccctactaactcttaccccgcttccaggtttcaaagaggctttaacaatccactaagttttattgggttctcctggtatatactcaccttaggttgatgccttacaatttcccctttgagtaatgctatacaatttattataggtagggttttaaaaaatctataaatgtctgcattctcctggcctgtaaactctatgacagcaggtctc

SEQ ID NO: 61982 - DNA, 435 bp, Homo Sapiens
tttttaaattcccattctaattccagtctaacatctggcagggatactggtgggtaaccagggatggaactgctcctgtgggtggtaaacacccctctcctccctctcaaggaacgtttttccctatgtaaattaacacaaattgatttcgttaaaaagaaaggtgagttcttattagcaggatcaagcaaatgtattatcagaggaagcactaatctctgtgatgagacatcaaaaggtacataggtggatcaccaaattatcactctcattaagaaatttctggcaatcctctgcagaagaaatacctaaatataaatgtgtcatgctgattagtttttaactacataatggggagatttattcatatcttgctgctagtttttcttgcatataagcatttgttttatcagcaggtttgaatcaaactaaatc

SEQ ID NO: 61983 - DNA, 434 bp, Homo Sapiens
  misc_feature (404)..(404): n is a, c, g, or t
tttttagcagtttttttgttttgttttgtttcattttgttttaaagaagttctcaagtcaagctgggattccttccagttctcaggaactggtcatcttcctcatctatcccatttacagtgtcacatcccaaaattctacagtatactacaaaagaaaggttcccaaccacaacgtaatggctcagaaatccagctatggaaacatctctactgcctgtaaaagtcctccaaaaacctcaataaatagggcaaagttatatctccttccccaaaataatactaaggatacttttaaatagcttcttcaccagaacctttctacctttaaggtccagaaaaaatatttttgccagcccagtagagaaacacagcttatcttcgataaattatacaatctgcccncacccaggtatcttcattaatggaaatgat

SEQ ID NO: 61984 - DNA, 563 bp, Homo Sapiens
tgaattgtactgtataaactcgaattattcttcagctattttcttctcatttgtattatgttgtactatatttgggctttggtacttaaggtctgatctcagcaatctgaaacagcctttgcaccgcaagagtcttccccaaacattccttttttttttttttttttttttttaaatattgctcccattatgcccaagaatcaaagattcttttgtttgggtggaggactctctgtccacttagctccctcccaactcagctacagattaggtttgtttcaataacataaggactgttctccaaaagctctggcaactgtggacaaaaagggcttcttcgagctattacacaacatgtgactttgctaaatcaaacctttatttataagatatggaagaatcagttatttgtgtgataagacatgcgaattctaggatagtaggacctaggcagatgtccacatgaacttgagggactttaaaaatcttaggattttaactataacccactttactccaacaaaatagaccaaatagctaatacttacagaatacttaccctg

SEQ ID NO: 61985 - DNA, 450 bp, Homo Sapiens
tttttttttttttttctctctctttttttggtggggagatggagtgggagttagagactgaagatgatgtttttgagaacttcgcaaaaccagtaataattccccaaggcagggctggtttttaatcactatcaattaactgatcaactaggacatgtttgagcaaagctgccttcacactgtgtgcccagacatctctgccgcttccttgcctgccctgaaagccaggaggcggcagcaattgagtccctcactaaacatttggaaatgaaatgaacgtttgaaaaatgcccagtaacatgggaggaacatcggaagtggtataaagggccagctcttgccacttctctcttttttcttcaccctcggaaatgcctgccagctcagtggcaggacagacatgctgggacagaggtgaacccagagccctgtccacaaatgtcaaggagc

SEQ ID NO: 61986 - DNA, 359 bp, Homo Sapiens
ttttctccatatctgtgcatcttcacacttgttcaaggctgggattctcacaagggcatgacctggtcacacatggctcagcccgcagagtggcaagaccatcagaggctgtgaaaactttgatgccgaagttctgcctcccaggaccacacagcagcctcaaaactcagagcccagagatgagctctggaaatctgatgtcgtctggcaaatgacaaaaccccacagcagccatgtcaaggccacctaaacaagggcttcctctgcccttcccaacctccttagcaaaagggcagagcttttcctgctggacacaggctgccgctaggaagtctacctggatttaacacaaggaggag

SEQ ID NO: 61987 - DNA, 547 bp, Homo Sapiens
  misc_feature (505)..(505): n is a, c, g, or t
tttcataatttgtcatttattgagtccaaatgtttatgcttgcaatactaaatattttgttttttctctcaagacaaaaaaaaaatccaaggcagtctgttttctcctcttaaatgtaaagtgatttcatcagtaatatttcagaaagtagaaaaaaactatgctttgattgcatcatcacaatatgggggggatacatggatcttgatccgggcattttaccataaggtatgtaaacaactggtgacctctctattttgattgtgttgaaaaagggctaccaccttggcttgctgaaggtttgctagagctcaaaacaggaaaagtactagcttaaaaggcatgctggagatttttaaaggtcctaaagctcagggtttaagtaacttttaaacaatcaaaaataggcattttgaattccaagtgtaagctctgaattttcaaggagtttcatattaaattactttttggtacttggaattactaactcagggacatagatggnatgcacagtgtatctctcctacactattaaaaaattagatct

SEQ ID NO: 61988 - DNA, 481 bp, Homo Sapiens
  misc_feature (4)..(4): n is a, c, g, or t
  misc_feature (52)..(52): n is a, c, g, or t
  misc_feature (54)..(54): n is a, c, g, or t
  misc_feature (71)..(71): n is a, c, g, or t
atcngttttttttttttttttttttcttttaagttgtcatttgaattcaaantntttggaaaacatgcatnataatcttaatgatcccattgactagtttaaattcaaattgcgaagcatttgaaataccatgctgacagcactttccataaattactctcaaattcaatacatttctacacacacaaacacacacacttttataagtatcacactcaaaaatcttcaaattacagtttctctttgcttgtcccatttatattgttatttggtggataaactagagctgttgtgtctgcttacaaatttctgtattatttttcaaaaaaataatttagtggcagtcacaaagttttatatctcctcagggtaaatagaactttgttgcagggttcctggctttggtgtgagtgtgtgtttgtttgtatgtgcacatggggtggttggtaaatcaagcctgattttctcatttacctaacaa

SEQ ID NO: 61989 - DNA, 614 bp, Homo Sapiens
tttttttttttttttatgcctacctgtgaaatagagcatgcctaatgctacttagccaaaatttttaggaatcctaagaaagtcctaacacagaaggtaatataaaaacctgggtgttatcctatcttgaaaatgggacaagcaaagaaggggttgggaaaagagaattataacaagctgatacacacatgctcacacaacccagaccagtataatttgtttttctttttagaaagagagtatcaaagaaaagagtgcgtgtttgctctgaagtttagtcaagattttgccactttctttgaaatgcccccttgatgtgccagccaaggacccttagagacctccatttgaagctgaaagtacttgaagccaattaatgaaaaagatttgctttccagtctcatgtgactctggggtggatgaccttttggaaatcatggacagagtctccatttatagctcctacagagtgatgaccccactatacaaatcactgtgaattacggagcttccaaattaaacaagattcagcatatagaacagcgacaatggtaacaatgctactcataaaactacatttagatgctctcaaaaacagtttacacctcgtgccg

SEQ ID NO: 61990 - DNA, 592 bp, Homo Sapiens
tttttttttttttttttgggtaagcaaaatgtgtttatttcattaactatttagtattgtaaagtgaatgcttaatatcgtagtaaacccaaatgtttttgatcaatccaaaatgatagaatcataatacattcttcaattgaccggtagaatatttttatattaaataaaagattttctaagactcatatgctttttaaactcatttatttcacactgtgtcttatgtcatatgctgtgtgtcttactttcattgctggaactaatgcaggttccaaatattctaactacataatttcctagtgcaatttaggaaaggccacaaatctatcagatttcttccaaatcaatcagcagggtgccaaaggggttttttcatgagaaacaaaatacacaaagtttatataattacatataactgtccatctcctttctttatcctgcactcttatgtgagctcctcttgagtagagtgatttgcacagagtaggagcttaataaacattagttgaattaattaggctttcccttttgactctcagccccacataactactgctcatgttttcaccagcaaacaccagacagcaac

SEQ ID NO: 61991 - DNA, 472 bp, Homo Sapiens
  misc_feature (406)..(406): n is a, c, g, or t
  misc_feature (422)..(422): n is a, c, g, or t
  misc_feature (435)..(435): n is a, c, g, or t
caaatttaacttgctattgagaaagtttaacaaattgtttaacctgaaagacaaatttcctggtaaacaaccatttaacatcccctgtgtctttgcctcaaatccattaccaacaaggcagtcatcctttcaaaatgcaaatctgattatatcacacttgactagtttaaaatttgtcaacccttcctattaattttatgttgaggagcaaacttcttaacatgacccatttatcatgtatcatccaaactgggacactctgagagtgaaaagagagtgattaatttttataccagtaaaccaggggcagcccctaggaaaagaggttaggtgtgggctatcccacccacaaggccctacctcttcaaattccttcacattctccctcactgtttcccctccaggntccctccagcagggcnttttgttaggggnaaaattaatttaggtggggacagtgggttatggcctt

SEQ ID NO: 61992 - DNA, 604 bp, Homo Sapiens
ggccgcttttttttttttttttttttttcatcttttatttttccatttaataaatgacagattatttgctccctatttgctataaagtttcagaagataatgagtatgaaacctagcaggcatcaataaacactgtcttatattgtgaccaattttgtctatttcagagaaagtgatgagaggagggaggaagcatcactaagacaaagctgtaatgaagtttgaactcttctgcgcctatgtaccttccatctttaactttctctgtgtctctgggctaagagaacacaaaccttagtctataaaaaataccctccaaattatttcacataggtatccttccttgaaaacacaggaaggaagaggaagaaacaggctcagttaggcttttttggggccttctgcctgattttcattaaactcacaacccaatttcatttggctccagagttcctttttaaaagcttctgggaaatgaatctactttctaggctggtttcagggttaatcttcaccaggtaaagttactggaacaaaggaacataatagctaatacccgggaaaaaattcttttgctccctttaatttttaatggaagcccctt

SEQ ID NO: 61993 - DNA, 486 bp, Homo Sapiens
aatctaggaattgtataaagccaaccctgtaatttaaagaattaataattttatagccaaaataaaataaagctgaatatattaaatattagatttatttaatttagatgtcatatctatttaatttcttttttaaaattaacacattctgggcacaattctcatcacttcataaggaaaaagactaaaaaaatgtaaagtaccggaactcgggaggctaaagtcaccacacagagataccaattctttcctcactagggaatcccataacactttgcgtgtcagtgattgacagctgtcactgaactgattgacaggccgcacagcacaaaactgtaaagtctatccacttgttataaaacagaatacataaaatagttataaaaaaagtgtttagaaaaagaaaatcagttacaaatgcaaagataaatacatttaatttctataaaagcaatcatacaaaatcaaacaatcacttatttactt

SEQ ID NO: 61994 - DNA, 616 bp, Homo Sapiens
  misc_feature (232)..(232): n is a, c, g, or t
gacctttcctttttttgaccctctaggcagcctagtttatggcaggaacatcatcagtgaggtcccagagaaaggaaaatgattgattacagagatagctattatttccagccactatatccaagagcgtatcagatcactcaaagcacattttatcaacactccccctgtgacaatctagtctttactggagttaattaaagcaattaattcccttccctttcaaagcagnggtgattacataaatagataatttcccaatccaaacccataaagcaagtgatttctctgcatgttcctcagtgtgcaaagcacctaactgaaccaaattgtcctttttctaaatttgaccttcatgaaattctccagcaactttttctgctctgtcttcctatctggttggatggcagaaccacatctccacatggacacaggactgcaagattaataaagcatttcccgcagcaaagatagataatgcctaaactgtaatcacaacgacaggagtagagtgaggaggaaaggagaatggcgggtgcctgctctgacaggcactacagttcccttcaacaatataccagcgtgggtgatgctgacataattaagcaacagatgc

SEQ ID NO: 61995 - DNA, 522 bp, Homo Sapiens
ttttttttttttttttttttcattcaacttatcaaatattttattgacacctatgatgagccattaattgaatgtagaatgtgaagaaaaggaaagaattcaggcagatactagcatctttcacctaagcaattggacaggaagaaaagttctaatgctctattgttgcataacaaaccatctcaaaactgagtggcttaaaagaatatttttttgttatttctcaggattctttgggttgactgagctaagctctgctcttcttgcttgaggcaagaccagaactagagaaaggtgagtgtagtgtctaaagtacaaaatttaaggaggcactcactcttggagtcttggagcccaattatgaaggtcaatgcctccttacattttgcaccaaaatgcctcacttgcttcacgctgatcttgaccctggcttggggtctctctcatgtgtcttcagtaggatggcagctagagctggagtcacctgaaggttcagctgggctggacatccaagttagtgtc

SEQ ID NO: 61996 - DNA, 443 bp, Homo Sapiens
tttttttttaactgagaagccttggtaaagttttattcacttaagatttggtgtaacagttagatgcccagttccttccaggaatcttataacagattctttggttctgaaggaagtggagagggactgaaaaaccagtttaagatgaccacaggtaaaacaaagaataataccactatgaggtttggatattttgtttaatttgtttcaccagaagttttattttgagatgtggcagatgaaaaacattggtcatgttgatggatttgagttgtccaaatgattatcttcacattaagctattcccatgcatagtttgcctcacacatttcaattccgaggttttctttttgcttaagcaaaagtttcatgagctatctttaaaattttaacttcacaaatatattaaggcaaggtcacctctaagcagtgaatatgtattc

SEQ ID NO: 61997 - DNA, 486 bp, Homo Sapiens
ggggccgctgcccaagaaccctttcctggagagctgctccgagaccgcgcagcgccgccgcgtcttctccttttccactcctctctcctaatttttttgatttaccagcgttcgacatcgttatctcttcctctagattaattgcttcgctcttttgagcaagaatactctgtgtggcatctttggtactatggggaacgagaatccagcattatctttaataaaatccagaaacatttttggttgtttcctttgaggggtacgacgcagcacgctcacttttttccccttctcgttggccttggtccttcagtttcacaaaatgtggatagtgacttaaaaataccttaaaaaaaaaaaaaagaaaaaaccattagagtagggggaaagcacttcctaaagagtggaagaactaatgggtcggtaaaaatgggatatggaattcataagatgttaaatgggactgcatttcgggaagtaagggtg

SEQ ID NO: 61998 - DNA, 571 bp, Homo Sapiens
tttttttttttttttttaaccaaatctttgcataggtaccaaataacacatttgtttaggatgagagctgcccactgcccccgccaaaaaaaagtacttttatatacaaaagtccaaatttccaaaggtatatgtactttaattgtgacttgaactcaaggtaaataaattaaataattaataaattaaccttagcttactggacggccaccatcttatatgctgttcccttgactgaaatgttgtggggtaaatgactatatatgaaatgggacttattggaggaattaatgcatctgataatggaggttgagaagttccacaacaggccatctgcacagcagagaccctgaaatgctggaagcaggacttaatccagcccaaaaacctaagacccagggaagccgatggtgtaattcttagttcaaggccaaaatccttagatccttcgggaggccactggtgtatgccctggagtccaagggctagaaatcctagactctgatgtccacaggcagaagaatgtcccagctccaggagatcagatggatttgcttttcctttttttttg

SEQ ID NO: 61999 - DNA, 498 bp, Homo Sapiens
tttttttttttcatgttattgagtctcactgtgccaagggcttaagttgacatagcaaatatgaggaatacagcaataatattattaaaatatgtaatagaaaatggataaaaatatttaagcatagcacacatagtattacttttttgaaatttttactttagtatatatattacatatacacacagatacacatatatacttgtgtatgtgcacatatgtgtacaggatcctgatataaggggcatttttttactggggctttttggggaaaaaattctggaagccactgtcctagaataccagagcaccaagaatacattgtgtatcagaaggagcatcaaatttggtattgaatgggatcagttcctaattcgctcctgtgtacaagagcagagtgatggcaggcacgttcctcactcaccagcacagtgacacccagtggcaggcactcaaagctttgttaaattgacatgagttgatttgatctggacaggg

SEQ ID NO: 62000 - DNA, 743 bp, Homo Sapiens
  misc_feature (427)..(427): n is a, c, g, or t
  misc_feature (582)..(582): n is a, c, g, or t
ragttttggtaaatattgataaactttctgagcagttatcatttcttgatgtggttggattgtaggaaaaatgtggagggatgattctgggctgcaaaggccaaggatgcttgtatctttgaaatgtttcacaaccatttrtrtgagggttacccgtgattttctcattggattcttaacaactctgaggtgtatattcattcatccctgtttatagatgacagctctgagaatctggagttaagtgacttgcttacggtcacacagctacacagcctttcagtgatacagtcagaatttaaactagttcttttttttccgagatgggggsctcrctctgtsacccaggctacagtgcaggattatagctcactgcagccttgaactcctgggctcaagtgatcctcctgcctcagcctcctgagtngcagggactacaggcacatgccaccatgccttgctaatttttttcttttttgtagagatggggtcttgctatgttgaccaggctgatcttgaactcctggcctcaagccttcctcccacctcagcctcctgtgcagctgggactacaggcgtgtnccaccaagcccagctaattttttctttttttgtagaaacgggtctccmtaatgttgcccaggctggtcttaaacgcctgggctcaagtaatamammtgaaaaaaaamccaaaatgctgggattacaggtgtgagcccctgtgcctggccagtgtttatttt

SEQ ID NO: 62001 - DNA, 509 bp, Homo Sapiens
tgtataaatatgaccccaaatcaacaagcttagattacaggaaataggacttttaacttgctcacctaacaaaaaaggaagttcatctttttcatttttcttacacttttataatatgcatttctaaattttgatgactgtagttaatattaggtattatgtaccctactttgttccaggcacttttaaaatgtactaacctttacatgtataataatttgttttaaaactttaagagacagggtcttgctatgttgcctaagctggaaagcagtggctattcccaggtgtgattccactactgatcagaccagtatcattttaagtgacagaaaaataaaattactgaaagaggggcttgctttaaattatttaagcttgtttgtattacctactatcttagagaaagaggaataaagcttatcgttgctataggaaacactatgcataaagtctctccatcttatctatggagcctcctatctttataaactacattctgaatacat

SEQ ID NO: 62002 - DNA, 563 bp, Homo Sapiens
tttttttttttttttttttttttgaagagacatacttttatttcatacttgcaggagtgtggtagcatcagtatttagtgcatgaggtcacagaaaacttataaaaagcaattccgaacaaaccaaaattcataacttctcaaggctccccgttaacgcatccaatactggagagaaaaaacccagcagtacaaacaaaacaccaaatacgtatcaggaacctaatactggccaatgtaattttttaaaaagttatttattcagtttagattatttcagtaataaataagcatcttttttaaaaaaaattaaacataacacaatattgacatcatcaggtaatgtgaacatcccccaagttccctaatcctcaggactaaaagtaattatatttgcattacttgtgcacattccttgactacagaaataaaagaagctcagtgacatcacagattatgggtcatgctgattatgtgaagatgatctgtcttcaggtccttcagtataactctggtaagcacctactcagcagatcttaatccccagcaccctacacaccccta

SEQ ID NO: 62003 - DNA, 643 bp, Homo Sapiens
ggtcgacttttttttttttttttctatgtgggcccccataggatggacaatatctgcccaaatggataagggtggtccttccctactcagtctactagctcaaatgctaatctcttcggaaacaccctcacagacacagtcagaaataatatcttaccaggatctgggtatcctgtggcccagtcatgcttacaacataaaatgaaccatcacagtcctcaaccaacactatctcgtatatccttaaaacagagaaaccaaggttcagaaaagttacctactgtcacaaaagtaagtaaacagctaaaccaaaaatcaaactcgtgtctatctaaatcaagagatcaaacacaaatgccaactaagattctgtggaggagataatagttacaagttaggcccttgctccaagaaagttcctgcagacggagatcagatttatacacatcgaacaatgcgaaccctgtattattctatattgactacagcttatatacaaagaagccttgaggaaagaaagtttcgggattaaaccgattccttcattcatggatgcttctaagggttggtattgacaggacgggtaccacaggtcagcagtgtgttagaaatccacctgtggccgctaacgggtggtgggaaa

SEQ ID NO: 62004 - DNA, 390 bp, Homo Sapiens
tttttttgttataaagcaacagataaccgagggagtggattatcacaagtgtgaaacaacttggtacctcctttctccctcactccacctgatggcttcccactccgctgccactaatacctttctagattcctctactgcgtgctgggatggaaagagtgcggcctttggagtcagatagcaagtgggtttcattctagaccttccactttctagctgggtaacactgagtacaacacttcccttctctaaaaggtactgagaaggctagataaggttctgtatactcataacctacagatgtgtcatttctccaggcacagatcctgggaacacatggcaggggatgggggcggtaacatacacagctttctggcccacataggatgt

SEQ ID NO: 62005 - DNA, 485 bp, Homo Sapiens
  misc_feature (473)..(473): n is a, c, g, or t
attttacattatttggagcctcatctgtgtcaggctataacattctatcctcatctgtaaaacttccccgtccattattccttgcactataacaactgtcaacacaccaactattaggaagttagtattttgctattgatcactgaataaacatcagagtattttaaaaaacagttctctagaaagaactgttataattaaaatgagtctgaaagatgaactctagtattaatgccctatatttgatggcactttatagttcataaaattaatttcaccccattctcattggacccatttcccaagtatttattgaggccctggtaacaaacatgtcaggaactcttctgggtgcttggagacacatccatggaataaaatagggggagaagctggttgacctcggtagagctttatggtctccgtgggatggtacccggattcttcagaaccccgtgggataattcctggcnaatccccctggg

SEQ ID NO: 62006 - DNA, 534 bp, Homo Sapiens
ttttgagaagaggtaaaatgatctttatttgcaatttatataattgtgcacttgaaaactccaaagaacaaccagaaaactattaaaattcataaaataattagataaggcactggttacaatatttgtaattcaaatcaggatgtttcctatgtacaatcagaaaacataatggaggtaaacatttcattcacaaaagcattaacagatgacatgctttggaataaacactaagagacctacctgaagaaaatttgaaaatgccactgaaatacaaaacactcgcatatacatggataggaagattcaaaattataaagatgtcacttctccctaaattaatctagagactcagtatgatttcaatccaaatgccaactctctggggggctgatatgaaattgtcatacaacttgaataataaacatgagaatacagttggccctttggtaaaagattgtcataaaatcattcaaaatacaacttgaatataactgtgagaatatagtcagcccttcatatccatgggttctg

SEQ ID NO: 62007 - DNA, 458 bp, Homo Sapiens
  misc_feature (429)..(429): n is a, c, g, or t
  misc_feature (457)..(457): n is a, c, g, or t
agatggggtcttgctagcttgctcgggctgaactaaagatatcctcctgcctcagcctcccaggtagttggaactatagtaggagtatctaccctgccctgctagaacttcaagttttgatgggcaaatccaccccagaggacaggacaaatgccagtattctggttaatagccccagatgagccagcttcccacccatctcccgtaaggtgggcagacacataagggaagccaccttggacctttcaggtcaacccatctaccagggtgatactacagagtgagctttggatacatgacatgggaaacaaatgggccagctgagtcccacctaaattcctgatctacaaaattattaaaactataatatttatagttttaaggccagtaaattacatatactaaaaggttttgggttttaggaatttntttaaaagttttagggttttcttttttnt

SEQ ID NO: 62008 - DNA, 443 bp, Homo Sapiens
  misc_feature (86)..(86): n is a, c, g, or t
  misc_feature (196)..(196): n is a, c, g, or t
  misc_feature (370)..(370): n is a, c, g, or t
  misc_feature (383)..(383): n is a, c, g, or t
tttttttgagacagggtctggctctagcgcccatgctgaagtgcactggcgcaatcttggctctcctcaacctctgcctcccaggntcaagtgatcctcttgccttagcctcccatattatgaacttttcattactagatttattcaccaaattaatatacaacagaactgcaaataatacagttctagaacaganttagcatcaaattcactaaaacatttttcttttaatcagtgaggaaaccatcctgggaatgtcattttttgaggatatatagctgtcttttatttgtaggttctggttttctttattcataggaaaagaaagtcctctcctggatctgaatttatgcattcaaacttggttccntaggatttaaccntgggctggtttcattttgtaggggtaggggacttatcccgagacaatggggcttgttaag

SEQ ID NO: 62009 - DNA, 389 bp, Homo Sapiens
aatttagagatagttaccaaattacaaatagcttcactttggagttaagtaacaacctggtttgaaatttcagctccattacttattatctgtgagactttgaacaaattagtaaaactctctgagactgttttccccccatgtcaaaacacctattttgcatggctatatggaaattaaatgaaatagcaaatatgaaaaacttttggcccagtgtataattcatatcaggcactgatctgttttctttttgccctaacctacttttcctgcatcatataccactacacctctttacaaaccttattaatagagccactctagactactttatttccccaagccatacaatgtacttttgtgttttttcttcagctacatgctctttc

SEQ ID NO: 62010 - DNA, 489 bp, Homo Sapiens
  misc_feature (323)..(323): n is a, c, g, or t
  misc_feature (356)..(356): n is a, c, g, or t
  misc_feature (364)..(364): n is a, c, g, or t
  misc_feature (367)..(367): n is a, c, g, or t
  misc_feature (373)..(373): n is a, c, g, or t
  misc_feature (386)..(386): n is a, c, g, or t
  misc_feature (405)..(405): n is a, c, g, or t
acttcacttaaatctgctctgagtctctggatgcctggcaggtggagaattcaatcttgtcgttaccagtattcctttcccttctccatgggcttatgtaagaattctgggcttacacactgttggaaagccaggtaggaactacctcccccgaactctccattcttccagctgctcatgatccatcaaccttctttgggccacctgctatagcaagaccctcctcacagcatcattccactgacccacaggctcagccccagggaccctcactaggaacaggtctccactatgcatagggaactcacaaaaaccttctcttncatcttgggttctggctggatattccaggccantcccccanttnttcatntttaaaacacagntgggcaggttcctttcccntcgtttccaaaacagggggggtttgttccagccaatttttctggcaggacaccaaagttttcacccgttccttttcaggggagg

SEQ ID NO: 62011 - DNA, 503 bp, Homo Sapiens
ttttttttttgcttcataagcattttattttcagcacgccacagcttagaaatttggttctactaatagcacacatgtaaatggcagagaatgagactttcaagtaattggcacaggctctaaggaactctgccagaggaaggaagtacagatgctccgccatttacgatggggttacatctggataaacccattcgaaactgaaaatatcgtaagttgaaatgcattgggttacatcctgataaacccattgtaagtcaacaaattgttaaattgaagcattgtaaattgaatcattgtaagctagggaccatctataaaagcatcatttgttcaccacagcccctgggatctcaccacagcttgggtaatgagaaatgtgcaattggttcaaaagtcgaaataacctctctcctgacaaccataattcattttactagacatttttcgctgagcattaagcagcacaaatccaaatgataaagtgcaggccagtttgcagg

SEQ ID NO: 62012 - DNA, 564 bp, Homo Sapiens
taacaaaaaaggggcccatgtctgataagtcaagaccacttgtcctctctgagcttcttgagtaatgggagataattccaacgtcacaaggttgatgaaaaaaagcaccattcatgtgcctggcatctatttattccacttcagttttcttcctatctggttgtctacttttgctctcctacaccttgctcaggggatatccccagtactggcaatatgagtgtgtttaataaaggagcaaaggaaagcattttctggtgacaagtctcatctggctgttcggtgacaccaaggcacatgcccaggaaactggtagtttccagtctggcaccacagcctctagagaaacagaaccagggcacctttcccagcaagtttatggagaaaaaacagggatgggcaggtatcatcaggaagcagggtcccaggctgagggcagagatgtggcttgtttccctatctagggatgcctggggggaattagggtaaaaaggcaaacagcaggtcaaggtagcttatttgggccaaggttgaagactgcagcctgagacacttccaggttgc

SEQ ID NO: 62013 - DNA, 500 bp, Homo Sapiens
tttttttttatatgtttgcttttcgtctctccctccagaatgtcagctccacaagagtggggatttctatctgctttgttcatcgccgattccccagtgtctagcacagggctagccatgtaggaggaactcagcaaatatttgctgaaataatgaatgagggtcccatacattgttatctgtttcatacaagctagttcccttccccatgccaatggcagatgagaatcaattcaaaactttcccaagcacctggttctgtgctgggttctggagatacagccatggagaccctgcctatggagctcacagcccagggcaggagacacgtggctcaactgatatccacagtgcaggatgagcaatgctgagagggctgtgcggtggcagggtcagggtactgccagctgccactgcacctaccacgttgaagaatcttctttcattgagttttcacgacagcccttactcctcccattatacagatggggaaactgaag

SEQ ID NO: 62014 - DNA, 574 bp, Homo Sapiens
ttttttaaagatgactgatccctgaagacctggttttataaaatacatgaatcacctcttgttctatcttcaaaatcccactgaataactttaattaaatatcatgtatgtgaccattaaaaaccactaatttatttacagttctatttcagaacaattttcaaaagacacaagaaaatcagatatactctttatcaaggaaggtgtttagaagctacagaatagttcaagataggctaaaggatatacatacaacttctcccataaaaagctcttgtaagaaggaaaaaaaaaaacaaacaaaaaacccagttcctaaaccacaggcgaagattgcattttagttcctcaaaaggaaatataacttttatagtattatgaaaaaaaaacactctgcaccagaattcagaagtccattgaccatttcaaataatacactatttctaaaataggctgtttccaggtttaatctctaacagaaataattactttctagaattaaaagaccaagttactgatgttgtcatacaggggctgaaaaactcctctgtaacaagccaagagggtaaagaat

SEQ ID NO: 62015 - DNA, 538 bp, Homo Sapiens
aagagacagggtcttgctctgttgcccaggctagtgtgcaatggcgtgatcttagttcactgcagcctcaaactcgtgggctcaagcaatcccccctcttcagcctcctgagtagctgaggctacaggcacacactaccacacctggctagttttaaatatctttttgtaaagacagtgtcttgccacattacccaggctggttgaactcctggcctcaagtgatcctcctgccccagcctcccaaagtcctgggattacaggtatgagcaactgcgcctagtcaaatgtattatttaaacatacacacatacacacactctaacatggagtctttcgttatgtttataactcttaacttagttgggaatctacaccaagaaagtaatacgaaacacaaaaatattttaagcccaaagatatctttataactgcagaaaatgcacaagtgtattttgacacaccaatgaatattgtttaaatttttagtaatttgaatcaatggaaacagaatcattgctagggaaatcagagatcat

SEQ ID NO: 62016 - DNA, 332 bp, Homo Sapiens
  misc_feature (115)..(115): n is a, c, g, or t
  misc_feature (181)..(181): n is a, c, g, or t
  misc_feature (194)..(194): n is a, c, g, or t
  misc_feature (203)..(203): n is a, c, g, or t
  misc_feature (249)..(249): n is a, c, g, or t
  misc_feature (321)..(321): n is a, c, g, or t
aaacttaatgcaactgtttctatgatcctagagaaaggactgaaatgttattgaaaactttccgactgtagtaagctttaggattttgactgcactactgtttttggtgactgtnccagtcccttgctttctgtgtttgctctgcctttggtatcttagcaaagaaaaataaaaaaagaanaaaaaacataaanaaaaaaganaaaagaaaaaaaagagggaaaaaaaagtgggggaaaaaatgagagncacattccattttctagcactttgggagctctttccagtatttttttttgtgtctttttcagcatcctcagntgcgacagggc

SEQ ID NO: 62017 - DNA, 512 bp, Homo Sapiens
tttacagtttttaataagaagactaaaaaatttaaatttacatatgtggtttatattatactgctactgggcggtgctgttgtagacctcccaagagtgactttattcgacatggttagtgtcctagggaattaagttttttggggcagaactaggtaccaagcactaaggagatagaaaacggacttaagatttccaacccttgtgaaagttataatgtaggtaggagatggggtaaacaactatctgatgtacatattcaactgtcactgaggaccagtagagagatcagaatccatgaggaggcaaattctgcctgtttttttctgatataattccagggcccacaagagtacaacagtgcttggcatacagtagaacactaaaaaattacttagtctttaagaatgaatagggtttcaatggtttctagaaatataagatgaagaaaatatcttctggaaatacaaatgaaagaatgaagcatatattattctagacagtaaatagca

SEQ ID NO: 62018 - DNA, 553 bp, Homo Sapiens
ttttttttttttttttaaagcgctgatggaattaccctgctagggaaccagcatgcatatgtcattcctttgtacagtatttttacaagtatttgatttgtttaccctaatttatccaactcgggaataaaaaggaatctcagatctatgagaaggacctccaatttctcattctcagcttcaaaacaaattagtcagtttaacattagtcaagacacaggttgctgtgaaataagaatgattctaggtcatgattaagatggttctccaaactatcaacaagactgtctaatcacctgttatgaacccaacactgttaaacagcaatggcatgtacaaaagaagtaggaaataaagttcctgtcgtccacacctaacaatctagaggcagccttcaattaatttgctgatagggtgtattgcataataagttttatatatttgttgtttgaagttcaaacacatttcgccataaaaggcatgctatcgtgtttcagttctcatgctggtagaaaactgtcttagcctctaatgtaattgagatatcaagtac

SEQ ID NO: 62019 - DNA, 462 bp, Homo Sapiens
tataacaatattgtaaaatatgtatttgtatgtaacagatgaaaagacacagaaaaatgaaaataatttttattttttggagaatgggattatgataattttctttcttttgattacattaatgcttctataatattctttgtacaatcatatttttaagtcatgctgaaacattcatcaatatgagatttcataaggtttagttttcgctgcttcaattatttaaaatgaggcttccactactttccttttagatttgaggactaatgtgttaatgttgaatgtttattaaatgataaaaaatattactatgcagaatgaaatctcaaagccaaaatttgaaagtaacctggattcagcctaaggatgttttatttttaaataataccatgcagaattaattcatatcagcaaaactgtagttcatatggacacttattccagcaatatcatgtaggagat

SEQ ID NO: 62020 - DNA, 456 bp, Homo Sapiens
tgagacaaagtctcactgtgtcacccaggctggagtgcagtggtgccatcactgctcactcgcagcctccacctcctgggctcaagcatcctcccacctcagccttcccaatagctgggagtacaggtgtacaccacaatgcccagctaatttaaaaaatttttaaaaatttttgttgttttgtttttgtctatgttgcccaggctagtcttgaactcctgggctccagtgatcctcctgccttggcctcgggattataggcatgaaccaccactgtgcctggtcctgccaaattttataaccttatcttccttcattctcttactctcctggaattacttaacagctctcaaaaacaaacaaagaaacaccacaaaaaaattgccttatgctgctccttctgccttgtatgcccttcataccatgactttatagcaatgactatcaagaccaatc

SEQ ID NO: 62021 - DNA, 511 bp, Homo Sapiens
tcaagtcccaggagtagctaagtttctcggggacagctgagaccagaacaaggaatccaatccagcagttaacaaaataaaatgctactacgtaaaacagacaagcatcaacatgggaacatattagacacaatggatctgattacctttcatttcctttaactttgaaaagagtctttcaaaattctccacatctcctcctccagtggtaagactggctaattcttgaatatccagatctaacatgggatctgaaatagggatttgtcacattatctgtcacgttatttgcatatgtgctacactcagagaatcctaaggcaaatgctaaccttgatgaagtcaccaatgatcgaaggcccagtgtataccagctttacagctcatggctcaccctgcttggctgctagtgggccctcacaaatgaagagtaactattttatcctcacaacatcgtcatgaggtaaggagtactatttccattttaaagatgagaaaaccacatctcaga

SEQ ID NO: 62022 - DNA, 461 bp, Homo Sapiens
taaacagagtctcactctgtcgcccgggctggagtgcaatggcatgatctaggctcactgcaaactccacctcccgggttcaagcaattctcctgcctcagcctcctgagtagctgggataacaggtgcatgccaccatgccaggctaatttttttttgcacttttagtagagacggggtttcaccatattggtcaggctggtctcgaactcctgacctcgtgatccacctgcctcggcctcccaaattagaggcgcgagccaccatgcccggctaaattatctacatattttctatgactatatcttgcttttaaagcacatgtactgtctgtccagattacctctgctgccttgaatacaaagcatttcatattgctgtcactcctgcgtagtgcaaacactttccaatgaagtagacagaacttcagaaaataccctaaggagccatgttaaaaacga

SEQ ID NO: 62023 - DNA, 452 bp, Homo Sapiens
  misc_feature (373)..(373): n is a, c, g, or t
  misc_feature (381)..(381): n is a, c, g, or t
  misc_feature (446)..(446): n is a, c, g, or t
  misc_feature (451)..(451): n is a, c, g, or t
atgaacatggaatttaaaagtgtttggggggaatcttggaagagttacttcattcttatttggcacaactagcttttctcacaactgaacatttcattcatcccaatgttcaaaaattaaagagcaggtagctcatgtggggcagcaaagaaccacagtggagggaggggagtgctacatctcgttctctttataataaacattatagttcagtataaacaaatgatgacagcatactgttgatttttgtttactcacactgggtttcaatttgtgaggggagattttgatttttttttttttgcatctctgggggaaaatttgttatatgggggcatataatgtgttaggaggaaataaggccccccaaaanggggttcnccccccttaaatttaaacctaaggtgccatttccggccggaggtaagcctacctgttaccacctngaggnc

SEQ ID NO: 62024 - DNA, 640 bp, Homo Sapiens
agctcagctaatcttccatcttaattcatcaaagagtttcatcgttctttaagaagaaatgctaaagcacagacttttacattgtcattggtttcattaaacaaaaaaaaggcgtggccagttgcagtctcatgcctgtaatcccagcactctggaaggctgaggctggtggactgcttgagtccaggaattagagaccagcctgggcaacatggtgaaaccccatttctacaaaaaataagaaaattagccaggcatgatggcacgagcctatagtcccagctacttgggaggctgaaatgggattacagacgtgcaccacgctcaactaatttttgcattttttgcagagatgcggttttgttatgttgctcaggctggtcctggactcctaggtgcaagcaatccatctgcctcggcctcccaaagtgctggcattaattacaggaataagccaccatgcctggacaaaatcatcacatttcatcttcacaaatctcctttaggggttgagtccttatgatatattctgattagatttttactttgtttagttttatgaatgttttctaatttatttttattacttttattaactacaattatcttttttgtgcgtctgtctctgtgttaactgatt

SEQ ID NO: 62025 - DNA, 558 bp, Homo Sapiens
taagttgttaggatgtttttaattgtgatgatgaaattccagctcaagttaacttaagcaaaagtaaacaagcaaaattccaaaaagggagtttactttcttacataatttcagagaacaaagatgggtgtcttgctagcttcagtcatagctggacccaggtgctcaaatctctctctttctctctcttctttcttcattgtctgatagcttcaggcatacacagtaaaccctcagctcatgatttcagagtaagagagagcctcctcttggaccaacaactctagactgggaaatggggcaccacagttggccagacatgggttgcattcccccaaagccaggggataggttgaccagcagcttcacaggacccacatggggcagatgggatgcaaggctgacaaactatcagtgagactctgtggatagaaagcatgagtaggcgccaaacatttcacgtaagcagcgaatatgcaggcttcctctttgcatctcacccaactatgcttaaaatggcttgtctggcacactttgaggggtcagcctacttccttg

SEQ ID NO: 62026 - DNA, 467 bp, Homo Sapiens
  misc_feature (300)..(300): n is a, c, g, or t
tttttttttcatagtattaatgtattgtacgtgttttcaaatattttctcatatatgaaaagggccattccacagtgttctttgtaagctttccctcacatcattgttttggatgaggctttatgcttctcaaagcagtgagataacagataacacagaagccatgtgctggcacttctattcaggttggcatggctcaaccattttgagtcaaatttctgtctagtctagtaggaccatttcctaaagttgtatccatactaggaaggcagatatgaagaaatgctgctatgctaccantcagaataatgtaggctttggggtcctggggctggtaaagcctggggtatgatggctaaattgagctgttcttacccagatgaggcttatggtcatctgctctgtctccaaaggtaatcagccactgcacatgaggtttactacactgcacacgcatgtgtgtttct

SEQ ID NO: 62027 - DNA, 589 bp, Homo Sapiens
  misc_feature (504)..(504): n is a, c, g, or t
  misc_feature (513)..(513): n is a, c, g, or t
  misc_feature (533)..(533): n is a, c, g, or t
  misc_feature (543)..(543): n is a, c, g, or t
aagtttaagcaccacaattagcttaattcatcagaccaaaacaggagctgtgtcttctctggcaggggaatgatctcaggagtgcaaggatagatgttccctaccagctgccggcctaagtccaaactctcataccacccacgtcctgccccaggctcacaggccctagggaagccaagcacacaattcctctgagagcccaggcataagccataagccatacttcaccaccctagtttaaggatgctaccagagacacccaggaaatgacagaaatgattaaaaactctggtttcacagccgatgggtttctgtttctatcacactcccatcatacagtaacctttttttttttttaacagcattttaaccaaatataatgaagggtctgaaatgtttgtatccccctgaaatttgtaggttgaaatcctcacccccaagatgatggtatcaaaaagtggtgcctttgtgagattattaggtcctgggggcagaatctcctgnatgagattngttaagagacccagggggcntgtttgcccntccaacatgggaggacccagttagaaggcccatctatggatcaaaa

SEQ ID NO: 62028 - DNA, 576 bp, Homo Sapiens
ttttttaaactcattctttcattaggtcgctcttattcatcttcacctaacaccaagcagcaataataactacaaactcaatttttcttctctgggcaccagatctgacaacttttcaattgttaagtattaatttaataaaattctatctatctatctatctatctatctatctatctatctatctatcaatcgactgactgagggtctcgctctgtcacacaggctggagtgcagtggtgtgatgatagctcactgcagcctcaaactctggggctcaagctaatctcccgcctcagcctctccagtagctaggactacaggggcacagcactacactcagctatgattttattttattaagtgttctttatattcattatatatctttaacatactatatatcatagattctaagatgctttggtgctggtactgtttgtcacaactatgacttgaagtcaccatcagctgtaagatgcatcctgacttcagagagagaaacatgttcaataatgtgccacttaacaataaaagaaaggaaatacacttaactgtttatttacaattacaatt

SEQ ID NO: 62029 - DNA, 566 bp, Homo Sapiens
tttttttttttttttaacacaattactttattgatttcttacaatcaaatactgccaactagaattccttccactcacggatcactaaaaacaaagaagacttccttggtactttcaaatgatgccttatacaataaagttagaacttaaaatgcaccctcattaattatgtaaactggtaatttgtgttaaaaagcataactaataatttggtttctttcttcataacacggaaatttaaatatttctcctgatggtcttgaggttatcaccgttatgagtagtgcacagtgcggcacatatggtttcatctggaaaggtgtgtctcacaccttatacaaaacgccagtaacaaaatgcatacatacgtcaacgcctgagacaaagcatgtttcaaatacgaagcagcccctcaggctgccataatatttaggtttgcatgatcacttatgacataacagattaattatacataacatacttttatacattttaaccctgaagataagaaaaataattgttgcttgaaaaaattctttcaggcagccatttggttggtgtcaaga

SEQ ID NO: 62030 - DNA, 674 bp, Homo Sapiens
  misc_feature (558)..(558): n is a, c, g, or t
  misc_feature (600)..(600): n is a, c, g, or t
tttttttgatatttaattatttatttgggaaaataagaatattttaagttcatgagacacaaacaagaccctatttaataattaaatttatttcaaaaagcccacaataaaaatatttccagttagcttttccagtaaatttacttttccctcacattgactgggatcaaaaccaaggaagagaaaggagaaggaataaaggaatgagtgaaatgtgctaataaaaatattaaatttatctccaaaatattgtcagtctcttaaatatagtcatggtaggcccggcgtggtggctcacgcctgtaatcccagcactttgggaggctgaggcagacggatcacaaggtcaggagatcgagaccatcctggccaacatggtgaaaccccatctctactaaaaatacaaaaattatctgggtgtggcggtgcgcgcctgtagtctcaactactcggggggctgaggcaggagaatcgcttgaacccgggaggcagaggtggtagtaagcttagattgtgctgctgcactccagcctgacgacagagcgaaactccatctcngccccattaacatattccatcacaaaacacaaacgggctttngtctggaaggaatatttcaaggatgttaaaaaggcatggctagtggtctttaatactctgctttcagttagagt

SEQ ID NO: 62031 - DNA, 506 bp, Homo Sapiens
  misc_feature (53)..(53): n is a, c, g, or t
  misc_feature (140)..(140): n is a, c, g, or t
  misc_feature (223)..(223): n is a, c, g, or t
  misc_feature (259)..(259): n is a, c, g, or t
  misc_feature (292)..(292): n is a, c, g, or t
  misc_feature (451)..(451): n is a, c, g, or t
  misc_feature (473)..(473): n is a, c, g, or t
  misc_feature (497)..(497): n is a, c, g, or t
ttttttttttttgctttccctcttcttagccccttccctaaatcctagggtgntgaaatctcaatataccttcttcttttcccagacttggactaaaattcccttcttggtcttccatctctgaagattaagagcctggnactagactgcccctcagcctgagtcaaggattctccatatctgtgtagagtcttccaggcagcctgaggaggcatgccatggntggttccatgagcaaagatagtgagacccataggantttggagagacaaggccaccctgaggaccagantgagagctggcttcctggagcaggtaggacttggattgagttaagaaaggaaagtctagagagtagggaaggaagacattccagggcagaagaagtcctttgagcaaggcactgaactgataatatgatatgaaacaaaaagtggtctcagaaagtttnaagctaagaagttctaaatggnttttttcagaagcaagtttagganttaagtagg

SEQ ID NO: 62032 - DNA, 424 bp, Homo Sapiens
acagctttttttttttttttttttagctttttaaatagacttttactgtgaaatataataaaagatttggaaatgatttttaaaatttcaattacagtgttaacaattcaattatctttatgagagaaagcaccacattacaaaaatacaaagaaggactctaaaatgcacatgctaaaatgacttaatagtaattacattagcaaatcatgaaattcagaacctttttctaattacagatctaaatcagggttctcaaacttagaggtcttcagggctgagcaggaactacaaagtagagaagttgtctgatataagagggaagtccagtaggctgtggcaaactggggaacacacacccaatcaaaagacttttcaaattcaaacatttttgaaacattatgtacatctaataaaataactg

SEQ ID NO: 62033 - DNA, 464 bp, Homo Sapiens
tgaacagacaggatgaaagtaacagtaaagtgagctaagtgcagaagaaaattcaaacatagtcacacatttactaaactgatcagtgagaacagcagaaatgttctggtagtcatcaaaaggttttaacaataaactctgtcaaaaatatgaaacttccaggagcaatcagaccctgaagaattaaaaaaaaaaacaactgcacccacccctctttttaatagatatttggccttctctctgagttaagcaaagagaggaagaatggcaaatagtttgagtcttcccaaatctttttagcatttgagaaaaggcttactgtgggaaaagtcatggccctttttccccctttttaatctatttaatttacaaaattgatccagttccataacagatggattattaccctaatagggattgcaaatctgtctagctatgcagtttttacaaaatgggcatttacg

SEQ ID NO: 62034 - DNA, 528 bp, Homo Sapiens
agtaatcatggggtttaaccgtgttaaccaggctggtctcctgacctcaggtgatccactcgcctaagcctcccaaagtgctgatattacaggcgtgagccactgtgcccagccatacccacaaagattttcattctaaaataccttactctttctacagcctcagaccccatgctctaccattccgttgagccccacataacctcatgctagagagaatctgtactatgttctacctcactcacctgttctagtatttcaaataccacagtctttcccaaacaacaattggtgggaaacagtttcaggtgatctacacaagtattctttgcatgtaacaaaactgtttacaggatttaaaattttaattgtctccagaaagcaagggggcatttaagaccctaaaagtagttatgcacatttagatgaacctagcatcctaaaccagtaggagcacattaaatattcatcaaaccagcaagacagttgttcacagggtttttctctgccgcaatgccctctatcact

SEQ ID NO: 62035 - DNA, 433 bp, Homo Sapiens
tttttttgtaaatgacttattttcttttattgaactgcttttattgaaaacccatttattgaccgtatagctgtggatcaatttcaggtcttctaactcaggctgtttatccgtttgtcactcctgatgccttgtgtctaatagcttatagtaaaccttaaagtcagatagtacaagtccttgttcttttccacacattgcaataaattttgaaatagataataactcatgaaaccatcacacacatcaggatatgctgtcacttcatccctttctgatatagtttggccgtgccctcacccaaatctcaacttgaattgtatctcccagaattcccatgcgttgtgggagggacttaggaggaggtaattgaatcatgggggcgggtgtttcctgtgctattctcctgatatcgagtaagtctcactaactg

SEQ ID NO: 62036 - DNA, 500 bp, Homo Sapiens
ttttttagagatggggcctcactatgttgcccaggctggcctcaaactcctgggctcaagcaatcttccaacctcagccttccaagcagctgggactacaggtgcctaagtaaatctcttttcaaagagaatacagaaaggttttctgaaggaaatgggctataaaccaagggaaggattttagtaaataggacagagaatgtttcagactgggcacatcagaaataaaggtgaggtgagggggatgagagaaacctgagctgtgtttagtaaactctagggtaggatttggacacctgtaggagagaaagagggagaccagagaggaatctgctgcaatagctcaggaaaggtacaagaagaatggttgactgtggggactcagaaagaagggatgaagataagaaatcctgtgaaggtaaactgacccaatgaggcagtcaactgagtggaagtgctgggaaaatggccaacgctatgacccaggctccaggacccag

SEQ ID NO: 62037 - DNA, 541 bp, Homo Sapiens
agtagagatggggtttcaccatgttggccagggtggtctcaaactcctacctcatgatccgcctgcctcggcctcccaaagtgctaggattacaggcatgagccaccgtgcccggccttaaagtgtattatttatcatacctttatcgtaggtatggrtaggraaaaaaacagtatccatagggttcagtactatccatggtttcaagcgtccactggggttcttggaatgtattccctgcagataaaaggggactactataactgtgaacacagtcagaatatctattaacgactaagtaagttgtagaaacttgcaatggtgtgttagaaaatcatcattcacaaaatatggttatcgraaaggagaagatctatgagacaraaggctgaatgggacatgagtcacatgtttttaactcttaaactactgggcactccstcagcactaggkatgtcaggtctbtgggacgtgaattaacaactggcatcaaactgccaacagagtatagstcaacatagattcttccccatacaagaac

SEQ ID NO: 62038 - DNA, 551 bp, Homo Sapiens
tttaaaaagaaattattcctgcttttttaaaaagctataaaaggccatattatagaaatttggaaaagtggtcaaattatatacttatgcataatttttttattttactttcaataagaattacaattcaaagataaacgagaacccctgcagaattaacagtaaaatgaagatacaacaaagacagaaattgaaaaggtactctggtaaagtcaaaacactcccgtagacaaatgctcacatactttcaactaatagtagtatgttatttaaagaaaaacaaaaaagatacaatgtaggtggtcaataaatgtttgttgggcaaacggatgaatggatgattgtaataagaacaatctatatgaatgtcaaaaaagtatgtattttcctgcatgtattggagaggaaaagaacagaaaaacaagtaacttcaagtacagataaaccacttgggggcttttccagatttaaatttcacattaacatcactctaatgtgacttctatgacaagatattttacactgtacattcctaaaacatgagatccaga

SEQ ID NO: 62039 - DNA, 424 bp, Homo Sapiens
tttttttgtgcaggaaatgaaccgaaacgtcgatgagattaagctacatagatgaagaatcataatgtactcaacttctggaggatttgtaatttttgagggaagtcagaaaaaatcaagctactctcaaagtaaaagatttcaacctttcccccactttaagcttccaggcattaaaacttggtttaaggtgactttatttattgtgcaataaactgtatatgaaagaaaaagcatgaatgcttgaattaatccagaacctcaatagtgtgtaagtccaagtgcccccactaacacactagggatgactaacagaggatcgattattttttcatttgcacccccaacaataaaagtatacaaattcctttgtaactgctgggtttatgtttttagatgaagcaaccagagtatatcaagtctt

SEQ ID NO: 62040 - DNA, 498 bp, Homo Sapiens
  misc_feature (20)..(20): n is a, c, g, or t
  misc_feature (196)..(196): n is a, c, g, or t
  misc_feature (409)..(409): n is a, c, g, or t
  misc_feature (424)..(424): n is a, c, g, or t
  misc_feature (432)..(432): n is a, c, g, or t
  misc_feature (443)..(443): n is a, c, g, or t
  misc_feature (451)..(451): n is a, c, g, or t
  misc_feature (471)..(471): n is a, c, g, or t
  misc_feature (485)..(485): n is a, c, g, or t
  misc_feature (496)..(496): n is a, c, g, or t
accaaactgttacatgtggntggccccagtaagctgacctggttgccatcttgagaccagacttaaatccccaaaaccaaatccacatttcaagtatcagtgaacaggtaatttttctgagaattttgaaaggagttagaagagagcttttccttggagtcacacaaaattacttaataaaacatcctaattagangtttctgtcctgccccctagttcctaaagtcccctacagaatccagaagccccctcccacatctctagggtcctgcctctctccttcccttatgctgagcaaatcaacttctggcaggcagagaacaaggttgacagatggtacttgctggataaatacttttctcctgtcacagtattagggctcagaaaatgataccccaaaatatggtgncctggcatcctgagncactttgnaccaaggacantggaaggnctcgaagtcaagtctgtctngatcttctcctgancttctttctcntg

SEQ ID NO: 62041 - DNA, 497 bp, Homo Sapiens
tttattttttatttttttttattttttggcaaacagactactcaactgaaaaaaattcatagtttctggattgcagatctatacatctgaaatagaaaatatttttgtcatcattttaaaaataatttttcttagcatttagttgttttaggctttcaagtcccatgcaagccagaaataaaggatgtgctgcaaagatagggaattcataaacccctgctatgcatcctggttaacggtggtccccaacctttttggcaccagggaccggttttgtggaagacatggaccagtgaagcaggggatggttttgggatgattcaagcgcattacatttattgtgcactttatttctattattattacattgtaatatataacaaaaggattatacaattcattataaggtagaatcagtgggagccctgagcttgttttcccgcaactagacagtcccatgtgggggtgatgggagacagtgaccgatcatcatgcat

SEQ ID NO: 62042 - DNA, 430 bp, Homo Sapiens
tttttttttcctgaaatagtgacagatattttcacccaaaccaaccaccaaaattaattaccatcttttaggtacacagggctatttaggccttttgacacataggaacgcatttgatattttttaacaattacacaagataaagcatgtaaataaattaatggaaaatgactattactattcacttcctacaatgctaccaactaccatatattgagtgtctctacccaattccaagcaccatatttgataatttcaatcttcacaaccctataaaacagacactctttttatccttgtttcacatatgaggaaattatagcttagagaggttaaataattctttgagttaaccagaccactggtggatctaggattcagacccaggcagtctgagaacagagctcctaattttagctactattttttt

SEQ ID NO: 62043 - DNA, 498 bp, Homo Sapiens
tttttttttttttttttttgagatgaagtgtctcactctgttgcccaggctggagggcagtggagcaattctcaaggagttctcctgtctcagcctcctaagtagctgggattacagacacctgccaccacatccagctaatttttgtatttttagtagagacagggtttcgccatgtttgccaggctggtctccaactcctgacctcaagtgatccgcccgcctcagccttccgaagtgctagcgtcacaggttttagccatggcgtctggccattatctgtatattaatcaagaaatctaggtatttcactttacactatgcctggatagagaatttgagataaaacagactttaggaagtggtatttctactcccaaatgtgaaaaccataccaaaaaaccagtctcacagttacaaataactagtatgtactaagaatttactaaatattcactcaacccgattcattcatttattaatttatagataagaaaa

SEQ ID NO: 62044 - DNA, 483 bp, Homo Sapiens
tctttccttattttttttttttttttagacgggctggagtgcagtcacagctcactgcacctttgagctcctgggctaaagtaatcttcctttctcagcctcctgagtagttagaactaagacatgcaccaccatgtctggctaatttttaacacttttttgtggagatggagtctcgctatgttgcccaggctggtcttgaacttctggccacatgctatcctctcacctcgaccccccaaagtacttggattatcggctcaagtacttagatgtattaaccaggatcacagagagcttgattttgtaagtttgagttagcatgtaataactgcagttgattttgatgcatgtatttaatgagaatcattgctttagactatatgatatttgaaacaaaagagcaataggactgcatggcacaatataaagtctgttatgacatagtgactttaatatattttaattaaaattataatagta

SEQ ID NO: 62045 - DNA, 403 bp, Homo Sapiens
ttttttttgttgccaagatggcatttattgctggctgggacacgggtacatagagggctgggggaccagagggtctatcttctccctgcagccgcgctggtgaggcgtgcccaggggcacgaagccctcctgaggatttttcagtctcagggctgctgggccctggtacttgaaaggaaactcgtccttgtattgtgttgagaagaagcgcagtccacccagagggggctccatgtggctgttcttgcaccgctgtagcatctcttcagtcaccggggccggaggtgttctgtgtggcttcagcatcttctggttcatggttaaaaaatcgaattctccactctgaggggcagtagtccgagcccatggtggtcttgaagaaagcgttgagtagctttggctc

SEQ ID NO: 62046 - DNA, 470 bp, Homo Sapiens; identical to SEQ ID NO: 33373

SEQ ID NO: 62047 - DNA, 450 bp, Homo Sapiens
aagtagagacaggtttctattaaaaaaatagagtccaggtgcctctgtcacctggactggggtgcagtggtactatcgtagctcactaggaatgatatggacaggcggcagggaaatactgggtagaagagggtggttccctgcaaaggccccaccttcaacactggaaaccgtgggcattaccttaggaatagtcaaactccaggggaagattatcttcctattccttcccctttccagctccccatcccgctgagaagcaccctccatcacccaataaaacctacacattcaccatccttcaagtccatgtgacctgattcttcctggacaccagacaggaacccaggtaccaagacgggagggtgaaaaaggctgtcaccccgactctccactgagctggttaacacttagccatccgtggatgacaactgctaaaagagcattatt

SEQ ID NO: 62048 - DNA, 491 bp, Homo Sapiens
cacgaggggcaaattaagatataggaccaaaacagaatattgtagatggcagttatgaatgtatatttatattttgattaagatttctattaactttttggctgggcagagtggcttacacctgtaatcccagcaatttgggaggccggggtgggcagatcacttgaggtcaggagttcgcgaccagcctacccaacatggtgaaaccccatctcttctaaaaatacaaacattagccgggcgtggtggcacattcctgtagtcccagctactcgggaggctgaggcaggagattcgcctgaacccgggaggcagaggttgcagtgagccgagattgtgccactgcactccagcctaggcgacagagtgagactccatctcaaattggaaaaaaaaaaaaattatatgaacttttgctattaatgtttatttgtaggctatttatatcacttcataaagaacagttctttgagaaaagaataaagggatgt

SEQ ID NO: 62049 - DNA, 378 bp, Homo Sapiens
tttcttttttctatgtattttttaatgttacaatagttattgccatgagtattaagggaaaagtgtttttatacatttactgatggaaataaaaactgttccggccacttttggaaacaatctgtcaatatttatttaaaaatttaaatatacatactcctcaatgcagcaatcctactccagggaatctattccgcagacgtaaaaccatcatggtgacaaacatatacacaggaatgtttattgtaataataaaaaggaaataagagctatgatagacttagagaaattctcatcctacattgttaaatgagaaatgtgagatgcagagaacgtacaggatcccatttatttaaagcaaactgcccaccaaaatat

SEQ ID NO: 62050 - DNA, 459 bp, Homo Sapiens
ccatttatagaatatgtttaatcacacaagtcatatatgggggggaaaaggaatgagctatagccatatgcaataacatgacaatattagaaaaattatgcatgaaaaaaatcctgtgattctggggttttttgttttgttttgctgtttgagacagggtcttgctgtgttgccaagggtagactacaatgtcatgatcatggctcgctgtaatctcgaactcctggatttcaaagtggtcctctcgcctttgtctcccaaacagctagaactacaggtgcataccaccatgcctggcttttttttttttcttttttgccttgctgttttcttgccttggctcatcagtgtttatatcattaaaaaataaaacaacccagtgcagtggctgttttgttttttaatgatataaacactcacaaacacaccacacaatccaagtagcagcagcttggcaaa

SEQ ID NO: 62051 - DNA, 495 bp, Homo Sapiens
aaacatactagaatctcaagagataaaatcaaacctagctttctttctttctttttctctcccccagctacccagtccacctctgcaggacagactgaaaatcactagctgaaatcaccaaagtgaaactcctatgtaaaattcagatatggtgttcagaaatataattatgcacactcaattagatcctcttcagtaactactgtgacattaccttcctttagtcccaaggacagaggttttagaatttgctcccacttttcagactcacgtccactgcaaatcactttacgaaaatactgtgaaatgtaataaacatttattctatcaccctacactatcattttctcttgtttttgccaaataacccagggttcacttcttatttaagtgcctgggatttatttttttccttctccgtttcccattactgcaccagatcccatgttatttccattgttagctggctggactccattctgctttctccaactg

SEQ ID NO: 62052 - DNA, 484 bp, Homo Sapiens
  misc_feature (3)..(3): n is a, c, g, or t
  misc_feature (7)..(8): n is a, c, g, or t
  misc_feature (428)..(428): n is a, c, g, or t
  misc_feature (444)..(444): n is a, c, g, or t
  misc_feature (478)..(478): n is a, c, g, or t
tanggtnntcaacatacaattcactctctgctgctgggaatctgagactgattgtgaagatttcttcccatccacactccccttcctcaaaaagaagcccagaagggaaaaacagtgtaacctactagagctcaagactgagtggccaggcagaagatgtttttcaattgtttccagggaagctcatgtctttcacccaggcagaggctctacataaaaccttctaagtgagcaaatgagcccttgtgcaagaccatggacatgtgaatttctcttcgcaactcagcacagcagctttcctaacacattgggagaagtcccaaccaatgggcaaacagatgggaaaatcagtgcccagttttcacttgaatcacaaccacatccaaacaagctaggaaagctttcagttcttaaacaaacaggcgggnttcaaaatggattctnggggttcaaagtacaggtgggttgggtaggtccngtgggt

SEQ ID NO: 62053 - DNA, 558 bp, Homo Sapiens
ttttcagacatgacagcatttgacacactcccttttaatttattgcagaaataatatgaacatctgggaaaatgatagtgctaaatatctcgtgaagtaagtcattcttagaaagggatttgtgactttgaagtaatatataattagcaagattttaaaaattattcttatgtactgaaactcaaaacagactagcaaagtacctccaaaaaaaaaactatcaaattaaactagaaaagtatttccaaaataaagacgaccaaaaactagcctgagaatactagttttctgttgctacaacacattaccacaaacttagtggcttaaacacaaatctattatcttacagttctgcagattagaggtccaacacaggcttcactgggctaaaatcaaggtgttggcagggctgcgttccttctgggaggctatggggaagtttctgtttcctttccagtctcaattctaccggctgcctgcaactccctggcttatggccccttcctccatcttcaaagccaggaatggtgcatccctctctaagcgttctccctattt

SEQ ID NO: 62054 - DNA, 364 bp, Homo Sapiens
aatatgaacactttatgaatttatgtgtcatctttgcacagaggccgtgctaattttctctgtctcattccaatttttatttatatgtgatgctgaagcaagcacagcacaacaaagcaattcttaagcctttattaattttgaaggccagttgtggtggctcacagctgtaatcccagcactttaggaggccagggtaagaggatctcttgagcccagaagttcaaagctgcagtgagccatgactcaccactgcactccagcctgggtgacagcaagactctatctcttaaaataaaatttaaaataaaataaaatgttattgagctcattattgagctgttccaggcagaatcctaagtgt

SEQ ID NO: 62055 - DNA, 460 bp, Homo Sapiens
  misc_feature (351)..(351): n is a, c, g, or t
  misc_feature (414)..(414): n is a, c, g, or t
  misc_feature (459)..(459): n is a, c, g, or t
tttttttttttttttaaaaatgtttaagcaattgttatttacatcatttatgattggtcaattgtagtaaggtatgaaattcctaaaacggaaagaaaaaatagcaaaaaaagcagaaaacaatgaatccaatgacccagttcactgaataaatatatatgatcaccatatccatgtcaaaccaccatccacgggctatcatcctcaaagtgcaggtaatccatcctgtgtgcaccgtgtgggaactgccttcttgtaactggagctgcatgtctgcggaaacctccaaaaagatgaaatgcttttctggcagcttgggtagggggccattttgcaggagttgggtttctngaaaggcttttgtttttatttttcaaatatttctttaggtaaaggaaagttttttgtggggcntggtttcaatttccgttttggggaaaaaggactctagggaattant

SEQ ID NO: 62056 - DNA, 961 bp, Homo Sapiens
gccaaccaagctttgaatcgtattaacaatgcccacctctatgctagctgaggataaatttaccagtgctcatatttaaactgacctaaatatgttttgctgagcataagataaactcacttttacctccatctaaaattatcctgttctgatgccaattcaatttcagctctgcaagttcttgtcaggctaatctttaaacattgagtgatcttgagagatgttaatgaaagcagtgagtcatttttgatgattgattgttggaaaaatgttgatgtgttttaaaaaatgtaatcttcaaaaacagaatataacctgagatgcattgtagagacaagacggtacgagaatgtgtgtgtcagtgtgtgagtgagagcaggagtatttatgaaaataaaacgtcgtttttcctgggaacacaaacagccacaacaacaaaccaaaccaacacaagcacaaacaccaaaacaacaaaaaaaacaacagcgggagcggaccgcataagaaagaacctccccaagcaggggagaaaccaaatcgaagagccgcacaccacccatgttagcgaaaaaaagggacggaaccaatagacggcaagcaataaaaacacagcgcagccccagcaacaacacgcagggacgggaaaacacaggaaggaggaacatctcaccaggcgaaaccaacgtttggggcgaaactagtggccacacacgactacgagatatacggcctcgcgcaacaaaaccctgagcggtaccaggtcccaccacccacagtcgcagcacgaaaaggaacgagcctctcgcgaagttcggggagcgtaaaaccgataacacagacacagcagccacaaagagaagaacacatcaaccaagcaagagaacaagcgacacgtcagcgcacggcacgtagggccaataaacacacgagatacacgtaaatcacgacgcacacatgcgtg

SEQ ID NO: 62057 - DNA, 414 bp, Homo Sapiens
aaaaggagaaattaaaggcatctgttgggtgaagcacttctatgccttgaattaaaaaaaaaaaaacttcttcttttttttttttgttttttagagacagagtcttgctctgtcacccaagctagagtgcagtagagccatcataattcactgcagcctccaattcctgggctcaagcaatccttcccactcagcattccaagtagctaggactacaggcgtgtgtccccatgcttggttaattaaaaaaaaaaagaaaaaagattttttttttttttttttttaatggaaatggggtcttgccatgttgcctgggctaatctcaaactcttggcctgagagcattaaaacactttacaagtaattatctgggcttctgatattaatgggattgaaatttctgggtttcttttt

SEQ ID NO: 62058 - DNA, 789 bp, Homo Sapiens
  misc_feature (596)..(596): n is a, c, g, or t
  misc_feature (613)..(613): n is a, c, g, or t
ggcacgagaacatggcggctccactagggggtatgttttctgggcagccacccggtccccctcaggccccgccgggccttccgggccaagcttcgcttcttcaggcagctccaggcgctcctagaccttccagcagtactttggtggacgagttggagtcatctttcgaggcttgctttgcatctctggtgagtcaggactatgtcaatggcaccgatcaggaagaaattcgaaccggtgttgatcagtgtatccagaagtttctggatattgcaagacagacagaatgttttttcttacaaaaaagattgcagttatctgtccagaaaccagagcaagttatcaaagaggatgtgtcagaactaaggaatgaattacagcggaaagatgcactagtccagaagcacttgacaaagctgaggcattggcagcaggtgctggaggacatcaacgtgcagcacaaaaagcccgccgacatccctcagggctccttggcctacctgggagcaggcatctgccaacatccctgcacctctgaagccaacgtgagcaaagggcagaggcagttggcctatgagtgggctgatgcgtgaggntggccacacattccttnctgtggacttgacatttttggaagaactctttgccagataatgagttcattttagttttatgctcccattgaaaaattttccactatttttataagctgttaatttcttgagtactttataacatgtctgtagcttggataaaccaagtaagtatttaaaaaaaaaaaaaaaaaaa

SEQ ID NO: 62059 - DNA, 462 bp, Homo Sapiens
  misc_feature (424)..(424): n is a, c, g, or t
  misc_feature (435)..(435): n is a, c, g, or t
  misc_feature (439)..(439): n is a, c, g, or t
  misc_feature (448)..(448): n is a, c, g, or t
  misc_feature (450)..(450): n is a, c, g, or t
  misc_feature (456)..(456): n is a, c, g, or t
  misc_feature (458)..(458): n is a, c, g, or t
ctggaaactaaagatttttatttaatccaaatgttgcactggaagaagaaatcaacagtggtatatttacttaacaaggatgtgtgtaatacaagacaaccctggggattacacacttgaaggaatggaagtggcaaaggttaacaggcagaaagcagctggatgaaacagtttattttcatcttagaagattctagctatctgtggagaccaccactgttccccgaaaagctaaagttgttaagtttgtaggagtaccacaggtccttccccctgctgcaagacagagacttgctctgttgcccaggctgcagtgcagtggtgcaatctcagctcactgcaacctctgcctcccgggttcaagcaattctcctgcctcagcctcccatgtagctgggatacaaggtgtgtgccaccatgcctnggttaattttngganttttagtananattggngnttta

SEQ ID NO: 62060 - DNA, 5255 bp, Homo Sapiens
ctatcgaatccacttttgttcgcatcaaagaaactccttctgaacaggagagcaaagtcttcgttctgactgaaaatggggagcgtacctacactgttaaccatgaaaccagccacccaccaccctccaaagtctttgtctgtgacaagcccgagagcatgaaggaattccgcctggatggtgtttccagccatgcgctgtcagacagctccaccgagttcatgcaccagattattgaccaggtcctgcaagggggcccaggtaagaccagcgacatcagtgagccatctccagaatcctccattttatcatccagaaaggagaacgggaggtccaactctttgccgatcaagaaaacagttcactttgaggctgacacctacaaggatcctttctgcagtaagaacctgtccctttgctttgaagggagcccaagagtggcaaaggaatcattgaggcaggatggacatgtcttggcagttgaggttgctgaggaaaaggaacagaaacaggaatcctcgaagattccagaatcctcctctgacaaggtcgctggtgacatttttttggtggagggcacaaacaataattctcagtcttcttcctgtaatggtgctttagagagtacagcccgccacgatgaagaaagtcactctctttcacccccaggagaaaatactgtgatggccgattccttccagatcaaggttaacctgatgactgtagaagctttagaggagggagactattttgaagccatcccattaaaagcctcaaaatttaacagcgacctaatagattttgcttctaccagccaggctttcaacaaagttccttcacctcatgagacaaaacctgacgaggatgctgaggcttttgagaatcatgctgaaaaactaggtaaggagtattaaatctgctcacaaaaagaaggattcgccagagcctcaagttaagatggacaaacatgaacctcatcaggactccggagaagaagctgaaggctgtccttcatccccagaagagacaccagtggataaaaagccagaggtgcatgaaaaggccaagagaaagtccacccgtcctcattatgaggaagagggagaagacgatgacctccagggtgtgggcgaggaattatcttccagccccccaagcagctgtgtcagcttggagacccttgggagtcacagcgaagaaggcctggatttcaagccctccccacccctctcaaaggtttccgtcattccccacgacctcttctatttcccacactatgaggttcccctggctgcagttttggaggcttatgtagaagacccggaggatctaaaaaatgaagaaatggatctcgaagagccagagggctatatgccagacctggactccagggaggaggaggccgatggctctcagagcagctccagttcctcggtgccaggagagagcctccccagtgccagcgaccaggtgctgtatctcagcaggggtggtgtgggtaccacaccagcctcagaacccgctccactggccccccatgaggaccaccagcaaagggagaccaaagagaatgaccccatggacagccatcagtcccaggaatccccaaacctggaaaacatagcaaaccccctagaagaaaatgtaacgaaagaatcaatcagtagtaaaaaaaaggaaaaaaggaaacatgtggaccacgtagaaagttcactatttgtagcaccaggaagtgttcaatcctcagatgacctagaagaagacagtagcgactacagcattccttccaggactagtcacagtgactccagcatttaccttcgacgacatactcataggtcttcggaatcggatcattttagctatgttcagttgaggaacgcagcagatctggatgacagaagaaaccgaatattaaccaggaaggccaacagctcaggagaagccatgtcactggggagccacagcccgcagagtgactccctgacacagcttgtccagcagccggatatgatgtattttattctcttcctgtggctcctggtgtactgcttgctgctcttcccacaactggatgttagcaggctctgatacgtgtgtctggataataaaaaagacaggaccctgaccaggggcggggttacttcattttattttgggttctgggtggggcacttctacagacagttgaggacctccgaggaaacttagaccccctttctcgctattgtggttttttttttttttcaggtttcctttttttttctggacaacctgagcatgcttttttctttggctgtgtactcaaaactcaggcatgcagctggatccgtaggtggggttttgtccttgtgtgccttgctgggttggatagggagcattgttagtgatcattagcccgcctggatcttagcacaccccacattgcaggttcacacgctggatgaacttgagtttcttacctctcagatgaagggctgcttaatgagaaagagggtgggcaccccaggccaagccccagctggggagagagctgccacgttttcctccaagcgtgggtgtttgagagaaggtgctggggtccatgcacctgtcgcagtccggtaactggttgcattcactaggggaaatccgagcagccagctctgtgtaagcacatccaggaatggcagaatccagggaggaaggtgaaagctgtgttgagagccactgtgtgctctttttcaccctgttttttttgttgtttttttgttttgttttttgtttgaggggagataacacttgaaattcagttttccattgattggattgagatagaaccatgattttcaaaccagatcgccagggcccagcagggccatataaaagccatgaggagtggctgggctggaatcagctcccagcagtgctggagctgggtggtggggtagcttcctgcccactaaagctttggtgcacacctccctcagaatgcatgtcttggaacgggcattctttgtggtcacttgtaatgggtttcttgaagaggctttctggacagcactccgggagcaggccagcacaggaggtttgtgaaagaagagaggcatctctagcacccctgcccccagtcttcctcagccccaggctccctctgctctctcctccctgccaagactcaggtccgtggtgagtctctgcattggttcctcctccccttgctctccccttcagaaagcatgtaccaggcaacccttataaaatcacaaatgagtcaggaggggactcagtgagcatcttgtctagctggacccagagagacagagcagcttgaccaagatcatatagccgaccaggggcagacttgcagtgagcacacaggcacctgatgccctgtccagagctgtcaccccttgtaggaaacttccactgggcacaccaatgtcctgagaaaaagataaaatgactagattaaaatgtccacattcaagcaaaaccaaaaagtttagaccaactatcgacatttgttttgttcttgtatttttcccatgaggaattcttactcaccttcaagctcatccccaattccttctgaaatacccttgacagctgcaacagcttgtcatttgacataccagcgtcgctcttactccaggaatcacgtttctttatttgctagccaaggacttgctcatttcaagcagtgggtttcaagtttacagaattccagcatggccagaagaatttacatagcacatctgagtcgatgacagccaaaatctggcctctaaaccagtctgattatagtctgtctcccctcctgaaagaatttcagccttccaaccagaaagctgctgggagcttggagtgattcaatctggaaggccaagagccccatggaaaatgagctaattaatgagctccctggcatcaatgaaagctcaaaggtacagataataaagattatgtgatagtttataactctgggcaccatgcagtccttgcctaaattagatgctcgaagagcctgggaagagccaacccaaatgtgaatcatttcattttatgggtctagaccttgttcagaaaaacctctgcaagatacttctctcacctattacaacttgtaatattgtttaaaacatctactggcaagatgcctgaaagtcatttggttcaggttggcagtcaactgatattttgcaaaggaaaaaaaaatctcatttgagtataggcttctatggaagaagctggatatagaaaatggatgtggaagtctgcaggacaaaccaccccattgcttgtaaattttttttaaattaaaagaaatacaataaggcttttaacaagaactagcagtcccctaagtctcgctgcttagaagtaaccactttcaactctcttatgtttgcatttctacataacgtgcttacactttattttttaatttagaaacatctactggcttgctgtcacagtagaggaggatttcactcttaccataccgtgctttggttttccagtatagctagatcacatcatttagtacatttctattaggtgttgacattacctggagcacttaaggattgttgactcccaagcccagcagtgtgttatggttacatgtcctttctcctccaaatgtccccattaatttgctattctctctctttactttttttttttttggtgtggcacattctttaataacttcctgaggaagagaacatgggaagtaaatatggttgtaaatattttgagatttttgcatgacttaagatgtctgtattctgcccttaacagaaatgtggctgagcatagaatgacaggtggaaaataataccctcccctagcccctcccaagcgtgctggttgagatttctgatgccattctgattcccgtacctttatatgtgacttaggtttttttatccacccttcctggaaacatttaagatctctttattcttggtgttctgaactgtcatgatggtgttgtatcccgggtgttaaaccttgtgctgggccttcatgggaaatttcttaaattttcttgtgattatttacattctttctttctggaccacctattatttcaatgttggaccctcccctacacccaggctgatgctctaatattttttatcttttctatttttcgtctatgtttctgatctgctttcaggaagaattattcatttttatcttcccaatctgaatgttttattgaatttttattttccaagttaataaaacctttggttattatcctg

SEQ ID NO: 62061 - DNA, 2309 bp, Homo Sapiens
acagtatatattaccaactgtttgtagtatcctataactttgttcatacttaagttgtatctctttcctttttgtacttcatggcaaaattaattttctaaaggattcagagaggcgtttatattttataacatttattagaaataatttgttccaccactagattactgtattttatggaatctaagctgtatatgtgtacatttgtatacatgtatgtgtaaatgtaagcctgacgtgggttcagattccagttttgtcatcagcaagaggcctcggacccatgacttactgcctctgagccttggctttctgtgtatctctgccactgggataatggtacacataacagtggagtggggaccaatttctaaaactcatggcacctagtctttggtccataaatggtgtttgttattttagacactgagaaaaatcttattcacagaagttgcagattatttctgctagtcacttttttatttcttgagagctgccactcatttaatatttctcatttatgagaagagacttgactgatttagataaaagacgaattaaggaaaacctttgaacgtgagtagacaagcttcatatatctgtaaagtgaatattgaatggtagcttgagtcattcgtacttatcacagaaaagaattgaactcccagtcatacacctgtaactgaaataccaaactgtcttaatggagatgtaatgaagtaagatggtcacatctttaactaaacttataaaaattggtcagtttgatcattttcatttaaatgagaaacatctggggacacattcattcattcaacaaatatgtattcagtatctactgtagaagaagctctgagattctgcggtaaatagacatgcaaagcccctggcctcatggaattcctattctggaaaggagagacaaacaaataagcaagggaatcttagtgtgtgtggagttctctgaagtaaacagtgtgatggtgtagagagcacctgtgtgagtctgagatgaggggatgtgatgttgtggacttcagccaggtttttggcagctagtgtctgtccctttttcagtagctccagtcttcttatgaagaatgagttctttctgtggtgtgtgactttagtgggagggcagctcttgctctatgcctctcagttgccttccactgtagccagtcctgtaactggtctgggcacactcggtgggggatccatggtagctccttgccatgaagatgtgggtagaggagggttctgtggggcctcggaggtgttcaacgttttctagaagtgttccttacggtagagtgccaactgtacatctagaagaaaggacagaattagcagattgattcaggccagaatcatccgtgagtgctatttcaagtgtagggactctctgatgagtaacaggatttacatcatcccaaagcatctccccacaaactactcattataaaagcaaaaatagcaactgcacaatggagacaccggatcccaccttcactgtgtggttactgccatcatcaagagcagaagggcctcctgggtgtctgtggagccctggtaagttcacagcttcacaggtggggtgttgccaaagaccacacaccgcactgctcatgagcacacatcagaggacccaccgccagggccactcggtccgataactgaagaatgttattgtcacgaaaaccaaagaaagactgagcaactgttttccgtctaaggagaccaaaggaatgttatggctaaatgcaaaaatggtcctggactggatcatacccttgggaaatgttatacagaacattattggggcaatgacagaatcacagtgttatttggaattattatattggaatacaatgttaaatttcctgaatataactgtgctgggattatgtatgaaaatatttttcttagaaaatacacactgaagtattaaggaagtaaagtagcatattgtatgcaaccttttctgcaatggtttaggaaaaaaatgttcaaagagaggaagagaacaaatgtgacaaaatgttgaaaatcggtaaacctgtaggccagctgcagtggctcacgcctgtagtcccaacactttgagaggctgaggtgggcagatggcttgagctcatgagttcaggaccagcccgggcaacatggtaaaaccccatctctacaaaattaggaggttgaggtgggaggatgatttgagtctaggaggcggaggttgcattgagccaagatcacaccaatgcagttcagcctgggcgataagtcttgtctcaaaaaaaaaaaaaaaaaaa

SEQ ID NO: 62062 - DNA, 5413 bp, Homo Sapiens
cgccgcggggaccgggcagggctccccgtcggagtgcactgcgccggacacttcaagccctggagggacaggaaagccagaaatggacttcgtgagactcgctcgactgttcgccagggcccgccccatgggactgttcatcctgcaacacctggacccctgtagagccaggtgggcaggaggcagggaggggctgatgcggccaatgtgggcgcccttcagcagctcctcctctcagctgcccctcggccaggagcgtcaggaaaacacgggcagcctgggctctgacccgagccactccaactccacggccacgcaggaagaagacgaggaggaggaggagagttttgggaccctctctgacaaatactcctcccggagactattccgcaaatccgcagcccagttccataacctgcggtttggggaacggagagatgagcaaatggaaccggagcccaaattatggcgaggccggagaaacaccccgtactggtacttcttgcagtgcaaacacctgatcaaggaagggaagctggttgaagccctggacctgtttgagaggcagatgctgaaggaggagcgattgcagcccatggagagcaactacacggtgctgattgggggctgcgggcgggttggctacctgaagaaggccttcaacctctacaaccagatgaaaaagcgggacctggagccctcggacgccacctacacggccctgttcaacgtctgtgccgagtccccctggaaggactcagctctacagagcgccctgaagctccggcagcagctgcaggccaaaaacttcgagctcaacttgaaaacataccacgcgctgctgaagatggctgccaagtgcgcagaccttaggatgtgcctcgatgtgttcaaggaaatcatccacaaagggcacgtggtcacagaggagaccttcagtttcctgctcatgggctgcatccaagacaagaagacaggcttccggtacgccctccaggtgtggcggctgatgctgagtctagggctacagccgagccgggacagctacaacctgctgttggtggcagctcgggactgtggcctaggggacccccaggtggcctcagagctgcttctgaagcccagggaggaggcgactgtgcttcagcccccagtgagcaggcagcggccaaggaggacagcccaggccaaggcaggcaacctcatgtcagccatgctgcatgtggaggccctggagaggcagctgtttctggaaccttctcaggcacttgggcctccagagcctccggaagccagagtgcccggcaaggcccaaccagaggtggatactaaggcagagcccagccacacagcagccctcaccgcagtggccctgaagccacctcccgtggagctggaagtcaacctcctgacccccggggccgttccccctacagtggtctcctttggaacggtgaccaccccagctgaccggctggccttgatagggggcctggagggcttcctgagcaagatggcagagcacaggcagcagcccgacatcaggaccctcacgctactggccgaggtggtggagtccgggagtcctgcagagtccttgctgctggccctcctggatgagcaccaggtagaggccgacctgacattctttaacacgctggtgagaaagaagagcaagctgggagacctggagggggccaaggcgctgttgccggtcctggcaaagaggggcctcgtccccaacctgcagacattctgcaacctggccatcgggtgccacaggccgaaggacggtctacagcttctcacagacatgaagaagtcccaggtgacccccaacactcacatctacagtgccctcatcaacgcggccatcaggaagctgaactacacctatctcatcagcatcttgaaggacatgaagcagaacagggtcccggtgaacgaagtggtcatccgccagctggagtttgcagcccagtaccctcccacctttgaccggtaccaagggaagaacacctacctggagaagattgacggcttccgagcctattacaagcagtggctgacagtgatgcccgcagaggaaaccccgcacccctggcagaagttccggaccaagccccagggggaccaggacaccggcaaggaggctgatgacggatgtgcccttgggggcaggtgatgggagcacagctggaacaatgtgctcggcccccagtgctctgtgggagccccaggacaagtgagctggtgtcacctcctgcctgggggaagagccaggccctgaggaacagccgcagcgtgtcacaggtgttggtgaggacacacactaggcccaaggtgcctgtgctcccagcaggtccaagtgcagctccagccacctttgcgtgtcaccttcacgggacttccagctccagctacctttgtgtgtcacctcacacaccacaagggggctggggcatctggtccctggggcctgggccgccccgccgggttccataggccgatgctctgaaagaagagacgtggggctcgagagatttaaagattttatttttacaaatcacagctgatagacagcgaagccttccccatagagaccgtgctccaactcgggcctggggcactgctcgctgctcccaggaagggggtggcgtgacaggcaggaacctgcgaagtccagagtccagggtggagcgcgccagcctcagccagagcagccacgacagccacagtgtgtgcactcgatgatgcggccctgcaacggaggaggacagtgagacgatgccactgcgccacgctcgcccctgcacactcacatatgtggcaaccctcccacgaaggacctgccaccatgccatatagggacacacctcagaaacccttccttgacagctctggacagggaaaatttggctccctcatgaaggtagaaccagctgctgttgacaccgaggttacatctgtatgtctatttataatatgttctgcaaatccaacacacgtttgccaatcaagaaaaagaaatcggtgtgaatgagtctcgttattctgctaagtgagcatgacagaccctgcgatgagcagacgtggctctgctactgtttggggacttcaggggggcctctgggctggtacactctggtgggggaagagggcaggagactatgcacttgagtcacacccttctggcccagagccccccagaaagaagggtcttgtcccccaggcctggtgcggcccaacacttggccagccagaaagccctagaacagtggcttgtgtttattttactttttcaagttctttttttggaagaacaagaccatagtttaagtaaacaggatcctctggtgaaacccaggtaagtctacagcgggctgttttggccacagggctgaagcagcaccccagcccaccagcccctgacctggactccttgtggaatctgggcactcagaggaagggggcttctgccactctgccacctgtccctgcctccatcagaaaaccaacaccccagtcttccgtcggggaggcggcccttgctcgcccccactgctcagtacccaagtcctcagcatccagccacagctctccattgtcagtctcactgcagcataaaggggactcatgtgaagaggcccctgtgtggagctggggaaaagaaggccaggctggcagatgggcggtggggccaacaactgtgctgaggggctgcactgagcggccactgctgtgactctgcctcgggccacagctgcctttcagaggggcttggaaccggatggagctcagctcctgtccctcagcaccactcctgaggcgcctggcctaggagtggtacttggaacagaaagttctgaaagaagaaacacagtgggctgggcgcagtagctcatgcctgtaatcccggcactttgggaggctgaggcgggtggatcacctgaggtcgggagttcgagaccagcctgagcaacattgagaaaccccgtctctactaaaaatacaaaattagccaggcgtggtggtgcatgcctgtagtcccagctactcaggaggatgaggcaggagaaccgcttgaacccgggaggtggaggttgcagtgagccaagatggcatcactgcactccagcctgggcgacaaagcaagactccgtcttgggggggcgggaaagatagtgatggtaatgttaaagtatcactgtgaggactgaaagggacaggaactcactggttgtccttccctgatgtcaccctgccaccaccttgggattagggctccccaccaccatttcctaagtgaggaaaggggttcagtaatttgcccaaaagtggagttgagattgaccccagacctaacaaacacacagccacacgctgcctcacatggattcctgaatacagggacccactcccacgagggagagccagcaggacatccagggacaaaacgacattccagcccaaccaaataacataagatcccttgcagtcgactaaggcagaattttgagctgaaaacaacaccaagcttgagtgtcagacattaccacttccagcttgcttttgggcacgcggcagatgcagttcgtcccgaagttggtgtcccgtgtctgaatgcaccgcaggcagcacaagttctcatatccttgctttttccattttgcaatcaggtttttgtctgcatagccttctttaatacaatattcatagagttctgtcaaaaagatggggaaagagcatcaggccatggtctaaaaaccttccccacccttgatcaaaaaaagcattcaggccgggtgcagtggctcacacctgtaatcccagcactttgggaggccgaggcaggcggatcacctgaggtcaggagttcaggaccagcccggccaacatggtaaaaccccgtctctactaaaaatacaaaaattactcgggcgtggtagcagctgtaatcccagctacttaggaggctgaggcaggagaatcacttgaacccaggaggcggaggttgtagtgacctgaggtcgtgccactggactccagcctgggtgacagcgaaactccatctcaaaaaaaaaaaggcattcagtattgcaacgggacagtccttggaggaggaacaaaaaaaaaaagtacttaggccaggcaaggtgcctcacacctgtaatcccagcacttttggaagccaacgccagaggatcatttgagttaagaaaccagcctgggccaagggcccatctccacaaaaaatttaaaaattagctgggtgtggtggtgcacacctgtagtcacagctactcaggaggttgaggtgagaggatcccttgagcccagaaggttgaggctgcagtgagccatcattgcaccactgcactccagcctgtggaacagagcaagaccctgtttc

SEQ ID NO: 62063 - DNA, 2233 bp, Homo Sapiens
gggaggagcggcggcgacggaggaggaggatggaggcggtggtgttcgtcttctctctcctcgattgttgcgcgctcatcttcctctcggtctacttcataattacattgtctgatttagaatgtgattacattaatgctagatcatgttgctcaaaattaaacaagtgggtaattccagaattgattggccataccattgtcactgtattactgctcatgtcattgcactggttcatcttccttctcaacttacctgttgccacttggaatatatatcgatacattatggtgccgagtggtaacatgggagtgtttgatccaacagaaatacacaatcgagggcagctgaagtcacacatgaaagaagccatgatcaagcttggtttccacttgctctgcttcttcatgtatctttatagtatgatcttagctttgataaatgactgaagctggagaagccgtggttgaagtcagcctacactacagtgcacagttgaggagccagagacttcttaaatcatccttagaaccgtgaccatagcagtatatattttcctcttggaacaaaaaactatttttgctgtatttttaccatataaagtatttaaaaaacaaaaaaaaaaaaaaaaaatcattttaactcacattaccatgatctggagcattgttacatgttggatttgtgtgtgcactggtgtgtttatgcaagggagactggattcacaagtcagaggtgaatctgagcctcattaggcagaatattcaacccagcagaaaattgaatttgtcgcacaaagcacttaaacctacaacccattgcaagaattgaaatcagatcagggataagtgatatcagaatctgggaaagccggaggtgagggtggaggggaaaaagctgaaagtctcaaagcaagcatcgttttcaccttggtggggtgaaatttcaggacaggattttacctgaatgccacagctgaggaggaaggtcagttgcagctttaggcgatttaccagctttgagaaactagtcagtttaggaaatgattagggtattaaagctaaggtttaagataaagaaagaaaaggccacctagttgagatccaactggttggacttgggtttatgggaaagagagacagtggttatggttgctgtgggacaaggtctggaaacagattcctgagggacatagcagctggcagtgggcatagatggaaatcccaaatgcctctttcttctgacccctctgtcttaaacagggtagtgtggctgattttaggtcatgtgcctgatagcagtgcaagagaatatacaagaggtaattgggagataaaactctggtgcagttgttactgggggcactcatagtgtacacaggagaaaaatgtcatggaatgtttcattagctgcatccttggattagagaaaacacctttccagagcctccttcctcctgcccgttaggttacctgggcatcgactcccctgtctttgagatagtcagctccctgaggccaaggatgctggcttgagttggtttcttcacagcatttaacatagtgcctgacacataatagtctctctatttatgctaaataaatacaatcctcaagacttgacatcagctctggaatagtagagtgggaatgctgcagaaaagatccagagaggaaagaaggcaccgagatgttaaaatgcggcttgttgacagaatacttgggattgtccagtgctgctatttctatttttcacttttggcaggtatttattatttcactgataggagacatcaagttccagcattttaatcctgtacttgaaacctacatttacaagcacttcagcgccactttggcatatgtgtaagtatgatctgaaggaactacatgttgttggatctttggatttgtactcttaggactggattgttgagaaacgagacggacctattactattcagtaaatacgcctgttaaggcagaactcttattctaagcttccgggtggaaaaagggaaccatctaagtattctaactctggaaagggggctaagatcagggccttcattctggatcaggcgaaatttccttaaggatccagaataggccaggcgtggttgctcatacctgcaattccagcactttgtggggaggattgcttgaggccaggaattcaagaccagcctaggcaacataacaagaaccttattctttacaaaaaaaaaaaaaaa

SEQ ID NO: 62064 - DNA, 2169 bp, Homo Sapiens
cttaaataacacatgaatgagtcaaccacacccttgtggagttcagtgtgaaacaaatgccatccgattgcttgtccatcctctgtacacacccatgagattcatggtgccagcctagtaatatgtccctttcatgggaaagtagaatattcattgtcttagagttcaactgaagacgacaatctactgtagctggttgaagccgcaagggatttattatgcatcattagttggcttccaaaatttttggtagggttggaggagcaggctctaggctgagcttccaggagcacctactggaatcataccatggaactggcctgccatcagaaggaagacgaggaagcaggatctactctcatgtctgctgggtcctggatgtccattgtccccattgcgagtcatgatatcacatggctgccccctgacttgcctctcaacaccacgaagcgaggaatgggacgctgggatttcagttttctgtggactgccacagaagaggaagtaccttcttggctatgtctgccagcaggaacaaagaggcatccaaagcatgtcctttgggccatggcattgtctttttccttctaagtctaggatgggtgtgtctgctgaagctacatcattgtgtggaacctgagctgtggtccagctttccagcctctagtgagcagtaaggcacactgcaaggggaatgtggcagaggtgagtggatccacatggagtatttactacatccacttcattggattctacctggatcactgtgttggaggtggaaggccatctgtgatttgtggtgcttctaaaacattctaaggacgtgccctatctagttaagacacacatttgatttctagctatgcaacctttacaactgacctgatacttcctgaacttccatctgtaataatgagaaagataatgacgatgtcacatgttagtagaagataaagtgagcaaaaatacaccgaagctctgtctcagaggaaaatattagcttatttcttgggttactgtaggcttatttcttcccttttttaatcagccggtctaaatattgtacattaattccccctggactgggctgtatttggaatgagtggtcatatcagcttctagtgagttttcacacactcagcaatgagcgggaacatagaatttagcctctctggtacatactagggttaggattaggatcatacttgtaactaaagaaagcttaaaagctatattaaaaaccacagagcagggcagttccaaaatagccgaataggaacagctccaatctacagctcccagtgtgaacgatgcagaagacagatgatttctgcatttccaactgagattggaagacagtagcggttctctcagcacgcagcttgagatctgagaacggacagactgcctcttcaagtgggtccctgacccctgagtagcctaactgggaggcaccccccagtaggggcagactgacacctcacacggctgggtacccctctgagacaaaacttcaagaggaacaatcaggcagcaacgtttgctgttcaccaatattcgctgttctgcagcctccgctgctgatacccaggcaaacggtctggagtggacctccggcaaactccaacagacctgcagctgagggtcctgactgttagaaggaaaactaacaaacagaaaggacatccacaccaaaaccccatctgtacgtcaccatcatcaaagaccaaaggtagataaaaccacaaagatggggaaaaaaacgagcagaaaaactgaaaattctaaaaatcagagcgcctctcctcctccaaaggaacgcagctcctcaccagcaacagaacaaagctgggccgagaatggctttgacgagttgagagaagaaggcttcagacaatcaaacttctccgagctaaaggaggaagttcgaacccatggtaaggaagttaaaaaccttgaaaaaagattagacgaatggctaactagaataaccaatgcagagaagtccttaaaggacctcatggagctgaaaaccacggcacgagaactacgtgacgaatgcacaagcctcagtagccaattcgatcaaccggaagaaagggtatcagtgatggaagatcaaatgaatgaaataaagcgagaagagaagtttaaaaaaaaaaaaaaaaa

SEQ ID NO: 62065 - DNA, 1943 bp, Homo Sapiens
ttttttttttttttttttttttgaccgagtctcactctgtctcccaagctggagtgcagtggcgcgatctcggctcactgtaacctccgtctcctgggttcaagtgattctcctgtctcgccttcctgagtaactggtactataggtgcatgccagcacacccggctgattttttattttattttattttttattttttttggtggagatgggtttcaccatgttagccagaatggtctcgatctcctgacctcgtgattcacccgcctcggcctcccaaagtcctgggattacaggcgtgagccaccaggcctagcagtggtattataatcttaagataggtgaaaagatactaaagacctttttggagaatgagaataccactgtcaatcaataaatccaactatattaaatagttttgtctagagctataatatagaggatttacgaaaactttgctttgtataacaaaggcagatattttatattctggttctatttttactttttctgatattaacttcagattttttattttggctttttttttgttttgtagagacaaggtctcactgtgtttcccaggctggtctcaaactcctgggctcaagctatcctcctgccttggcctctcaaagtgttgggattacaggcttgagccaccatgcctggtcaacatcaagttataacatgatgttaattctatgtgttttaggactttgtagaataaggaaagaggcaaatatgggagatttgaagattttcagtgagacaggcaaagtaagttaacaatctgataggaaataatgtgacagaaggagaagttttcattgattagggccaggcactttatttgacttaaaataattagagctcagatagtattaggagtagcaactcaggtaggatattaattgaaggggacagaattgatgtgggtggtgggtagggcaaggacttaaaattgaccaaaaatacgtaacaatacgtatttctggggcctgaaggacaaaccctcactggttgtatttcttggctggcaggcttataacaagaagttttcaagggagactacatgttagttttttattttgcttgaagagagagatcatttccaagttgacttttgtcttctcagtgtaacatttggcacttcttttcctaaaattatcacttgtggctgagatacaagctgttgaattcagactataagctaaattgttggctctcgattattcttgagattgaaaatctttctggcatcaacaatttagatctatcaaaatgtgtcaatagcagtaaatcttcaacttagagacctagaatatactgcaatatttcaattctgatgctaaccactcaaaagttagcatagaccccacaagttagaggcacagttcccaaaaagactgccctcacttcagatgcctgttgcaagttggggttgggggtcccaggccatcttcatttctgaccaactggctataaattggagggatcccttaagcctccttcaggctctataattagaacaactcacagaactcaggaaagtactatacatttgacccttgaacaacacgggtttgaactgcacaggtccacttactagtgattttttcccaacaaaaagtaaatcagaaatatagttggctgggtgcagttgctcacgcttgtaatctcagtactttgagaggccgaggaaagagggtcgcttgaggtcaggagtttgaggccagcttgcacaacatagcgagaccctgtcaccaaaaaaaatatttaaaaattagccaggcatggtgatgctttcctgtaatcccagttactgtggaggctgatcacttgagctcaggagtttgaggcttcagtgagctatgatcatgccactgcaacctagcctgaatgacagagcaagaccctgtctccaaaaaaaaaaaaaaaaa

SEQ ID NO: 62066 - DNA, 1199 bp, Homo Sapiens; identical to SEQ ID NO: 57061

SEQ ID NO: 62067 - DNA, 1604 bp, Homo Sapiens
cggagtgggctgggtggggtggggtgtctctggtctggcaggggtcttaccaggggtcctcttgccaggacgcccagcccaactcgggtctgctgcaggcctcggtcatcaccctctacaccatgtttgtcacctggtcagccctatccagtatccctggtaagtatgggcccaggctcaaggaggcctggcctcgttcctgggtcagtatcagtctactgtggggctggggaccctcacaggtgacagggacatccctgctccagcccattctgagactcagtcctcccatgagatgggagggccccgtctgttcctgagttgtctctctgcccttgtgactgctgagcgctctgttgctgggacttgagtggttggctgtgtatctgtctgtctattaggggtggctctctagccatcctcagggccacttggctacctaggcctggcctgcatgggctgagggtgattgtgctcccatctccagaacagaaatgcaacccccatttgccaacccagctgggcaacgagacagttgtggcaggccccgagggctatgagacccagtggtgggatgccccgagcattgtgggcctcatcatcttcctcctgtgcaccctcttcatcaggtatggccaggtctggattctggggaaggatcgtgattgagggccctgagccagagtgaggggagggtgtgggagccaggataccaaactggaacgtgctcttcacattcaatatatccaggtcttgcattgtgcgggaggggaaactgagtccctcagagggcatggcatgagtgggcaacagaggcaggcgtgaccttgcctcctggctcacagccctttcctgcatactgggccagttcagttgggtgcagacggctgtggggtcagggaaggagcatggactggggtcagtgggtccagggtctgtttctcccctgctgtgcggcttggggtaagtggcttaacctttctgagctcctgtttcctcctcagtaagaggatgacaacctccactgtagtggatgtggctgtgaccccacactctcccccgagagaaggcagctcatgctgaagttcacatagaggttcttttcaaaggggcatcttagtaggtgcttatccatgtggactcaaatgcctgcatttgagcctggcattgccacttactagctatgtgatcctgggcaagtcacttagcctctttgggcctccatttccttgtctgtaaaatagagataaaaatagtaccttcctcattggattgttgaagggctatagatgaatcagtatgtgtaaaacacttagaaaggggccaggcatggtggctcacacctgtagcccccagcactttgggaggccgaggtgggaggatctcttgggcccaggagattgagaccagcctgggcaacatagtaagacgctgtctctttttaaaaattaacaaaacaaaacaaaaacacttagaaaggaacttggcaagtagtaagttatttgtaatccaaacactttgccagactgaagcaggaggattgcttgggcccaggagttcagggccagcctgggcaacatggtgtccccaaaaaaaaaaaaaaa

SEQ ID NO: 62068 - DNA, 1082 bp, Homo Sapiens
gagatggggtttcaccatgttggccaggctggtcttcagctcctgacctcaagcgatctgcccaccttatcctcccaaagtgctgtccttacaggcgtgagccactgtgcctggcctacatcttgttttaatgtggtacatttactacaattgatgaaatgatactgacactgattactaattaatgtctataatttacattagaattcacactttttgttgtatgttttattgtttttggtttttggtttgttttgttttaagagacaggtctcattaatgttgcccaggctgaagtcaaatttctggactcaaacgatctcccaagtatctgggactatagtcaagcactgtaggttttgacaaatatataacatgtatccaccattactatattatgcaaaatagtttcactttccaaaaactctcctgtgctccatcttcatccctccattacataaaaataaagatcctagcccttttaatttcatgttttactattcaaagcatttggtcttttaagtctcataaaaatccagtgaggtaaatatgaatcctatcattgctatcctgcaaataataaaatggaggaatgtgaaggaatggtagaggagttaaaaagagtaagggtgaatgtgggtttaaaaaaagaaatactctctcaacatcaaaagaaaaggacataggaatagatggtttaatactttgtgaaaaggaaatacatacacctttccacagctaatttaaaagaggaagaataaatgtaaagttgacaataatacagataagaaagtaataggctgggtgtggtggctcatgcctgtaatcctaaccctttggaaggctgaggccagaggattgcttgaagctatgagttctagaccaacctgggcaacttggcattttttttatttagctgggcatggtggtacactcctgcattcctagctccttgggagagaggcaggaaaatcgcttgagtccacaagttcaaggctgcagtgagccatgattgcaccactgtactccaacctggtgacagagagagaccttgtattttaaacaaaaaaaaaaaaaaaaaa

SEQ ID NO: 62069 - DNA, 3181 bp, Homo Sapiens
ctgtagtcggacacactcccagctggcccagtttgtgcatgaggtgaagaagagcccctttggcaaggatgttcggctggtctcccttggctcccggcaggtaaacagtagccagtatttccaccaggggccatcctgctcctttcgccacaactttgtcctgctcgtccaggccttgggagacgctgggtctgtgacaggctgaaccgtgtgaggagcagccccctccctgacctggccggcccagcactggaaggcaaaggagaggtggcggggcaggtccacatgtgttggtaggatgtcatttagctggcaccatctttttgcctctttctttctcctttgctgcagaacctttgtgtaaatgaagacgtgaaaagcctaggttctgtgcagcttatcaacgaccgctgcgtggacatgcagagaagcaggcacggtagccactgggaccgtggtgtagccgcaggtggtctggagagagtgaggcaggggtggcagtgactgaagaccattaagtgtctttcatagaaagaatggcagaggagaccccagttccttcctgagtcccctctccttgggaaaaagtgttcctactctctgggtcagtgtctggtccgaatccttggcttggagatgattttacgggctctttctggagaacagaagtaaaaccttacagtgttccgatgagaccacagtaggcagtacttgggagggtcttatagaccccaccccacggaagtgggtctcaacattacacaaccccctcttgggcccgtggacagttgctgtcctctctgttttctctctttgtgcctgtgccaccctcagagaagaagaaaggagctgaggaggagaagccaaagaggaggaggcaggagaagcaggcagcctgccccttctacaaccacgagcagatgggccttctccgggatgaggccctggcagaggtgaaggacatggagcagctgctggcccttgggaaggaggcccgggcctgtccctattacgggagccgccttgccatccctgcagcccagctggtggtgctgccctatcagatgctgctgcatgcggccactcggcaggccgcgggcatccggctgcaggaccaggtggtgatcatcgacgaggcacacaacctgatcgacaccatcacgggcatgcacagcgtggaggtcagcggctcccagctctgccaggcccattcccagctgctgcagtacgtggagcgatacggcgtttgaaggccaagaacctgatgtacctgaagcagatcctgtatttgctggagaaattcgtggctgtgctagggggtgagagcctcgtccccctgctgaccccgggcctgcaaaactcgctgggctgctttttccttggatgcccatcaggacacctcagttctctgtgtttttaagaagggtcggctgggtgcggtggctcacgcctgtaatcccagcacttgggaggccgaggcaggtggttcacctgaggtcaggagttttaagaccagcctggccaacatggtgaaatcccatctctactaaaaatacaaaaaaattagctgggagtgttgccgtggcctgtagtcccagctgctccagaggctgagacaagagaattgcttgctcaaacccgggaggcggaggttgcagtgagccgagattgtgccactgcagtccagtctgggcgacagagtgagaatcagtctcaaaaaaaaaaaaaaaaaaaaaaggccacagcatcgagtcggccttgttggcctactgggtttgccaatacctcagaaacaaatacctcggacaaatctttctctaaagacctcagtcagatactagtcaatatcaaatcatgtagatggcggcattttaggcctcggacaccatccctacatgacagtgacaatgatgaactctcctgtagaaaattatataggagtataaaccgaacaggaacagcacaacctgggacccagacatgcagtacctctacgcaaagtaaaagtagcagtggttcagcacactttgcatttacagccgaacaataccagcaacatcaacagcaactggcactcatgcagaaacagcagcttgcacaaattcaacaacagcaagcaaatagtaattcctccaccaacacatcacagggttttgtttctaagactttggattctgctagtgcacagtttgctgcttctgctttggtgacatcagaacaactgatgggattcaagatgaaggatgatgtggtgcttggaatcggggtgaatggcgtccttccagcctcaggagtatacaagggcttacacctcagtagtactacaccaacagcacttgtacatacaagtccatcaacggcaggttcagctttgttacagccttcaaatattacacagacttcaagttcccacagtgcactgagtcatcaagtaactgctgccaattctgcaacaactcaggttctgattgggaacaacattcgattaactgtaccttcatcagttgccactgtaaactctattgccccaataaatgcacgacatatacctaggactttaagtgctgttccatcatctgccttaaagctggccgctgcagcaaactgtcaagtttccaaggtcccatcttcatcctctgtagattcagttccaagggaaaatcatgaatcagaaaagccagcactgaacaacatagcagacaacacagtagcgatggaggtgacgtagcttcctccgagtggaactgcagcctggggacttgattaggtgctatgcatcagtagcattttgaatgcaagggatgatggaaagcagcacatgcgtttctgtggcagctgtggggacttgacagcaatgctcatctctcatgcttcaatttttcttttcttactgttaataggaaaaaaaatcaacatctgtaaattaagaatacagcagatgaagtgtcatcacatcatgtgcatggtgcggaacctgctgttttatctatttattgtgccgtgtttacagttttttgtacactgtaccttcattggttcctgtgctgtagtaaatgtgttaggtagctgtggactccttggtattttgtaaatggtataacataacttggttcccctctgggtccttgagttttctgtgtatcatgtgaaaaaaaatggtgacatacatacagaattttac

SEQ ID NO: 62070 - DNA, 5002 bp, Homo Sapiens; identical to SEQ ID NO: 22751

SEQ ID NO: 62071 - DNA, 1487 bp, Homo Sapiens
ctggcgtactgtcctctccactgtggtcttggcacataggtcgatcttgctgaccacgatgaagaagggcactttcagggccagggccagccccagatgttcccttgtggtgccagcaatcccagtgttggcactgacgaggagcagggcgcagtcggggcagtatgatgtgaggccaaagatggtggtgtgtaggtacttatggtggcctgccaggtcgatgaaggtgatcatcttggagctgctctcacagatctcttctgctgtccgtgagtcgctgtaattcaccacctggcccagggcccagggccctcagtgcctcctgccagcccttccaaccccttcagagttgccaggacctaaaccattccctgggtgaccctgcctcttaatcttgaccccattttttatttaatttagttgattccccattgatttcctaagaggggcagagcttgttcacagtcccctcagggcattcatctatactatttcaaaaagtctccacactctacccccatcctatgtccttcactactaccatcccatcctcagagtctggccccattgggtcccattgatcccatgcacctctcccttgctgttaaagcccaggatctcgaagctgatgctggaggttcggccagactgaatctcatgcaggtggcggaaaaggttgagccgagcccggccccgcccattgtccagctctccctgggtcaggactccaagcagagttgacttcccagagtccacattccccaggacggccacacggaggtctaggaactgttggttgtcagggacctttcgtactagcacctcggtgatcttccggggcatgtcgcttcgggagccgcggcttatggtgcagacatggccaagtccaagaaccacaccacacacaaccagtcccgaaaatggcacagaaatggtatcaagaaaccccgatcacaaagatacgaatctcttaagggggtggaccccaagttcctgaggaacatgcgctttgccaagaagcacaacaaaaagggcctaaagaagatgcaggccaacaatgccaaggccatgagtgcacgtgccgaggctatcaaggccctcgtaaagcccaaggaggttaagcccaagatcccaaagggtgtcagccgcaagctcgatcgacttgcctacattgcccaccccgaatcgtgcccgtattgccaaggggctcaggctgtgccggccaaaggccaaggccaaggccaaggatcaaaccaaggcccaggctgcagccccagcttcagttccagctcaggctcccaaacgtacccaggcccctacaaaggcttcagagtagatatctctgccaacatgaggacagaaggactggtgcgaccccccacccccgcccctgggctaccatctgcatggggctggggtcctcctgtgctatttgtacaaataaacctgaggcaggaaaaaaaaaaaaaaaaaaaaaaaaaaaaaaa

SEQ ID NO: 62072 - DNA, 3803 bp, Homo Sapiens
ccatggtaggagcgctcgcctcgctgcggtgcccgctgaggccatgccggggccccggcgccccgctggctcccgcctgcgcctgctcctgctcctgctgctgccgccgctgctgctgctgctccggggcagccacgcgggcaacctgacggtagccgtggtactgccgctggccaatacctcgtacccctggtcgtgggcgcgcgtgggacccgccgtggagctggccctggcccaggtgaaggcgcgccccgacttgctgccgggctggacggtccgcacggtgctgggcagcagcgaaaacgcgctgggcgtctgctccgacaccgcagcgcccctggccgcggtggacctcaagtgggagcacaaccccgctgtgttcctgggccccggctgcgtgtacgccgccgccccagtggggcgcttcaccgcgcactggcgggtcccgctgctgaccgccggcgccccggcgctgggcttcggtgtcaaggacgagtatgcgctgaccacccgcgcggggcccagctacgccaagctgggggacttcgtggcggcgctgcaccgacggctgggctgggagcgccaagcgctcatgctctacgcctaccggccgggtgacgaagagcactgcttcttcctcgtggaggggctgttcatgcgggtccgcgaccgcctcaatattacggtggaccacctggagttcgccgaggacgacctcagccactacaccaggctgctgcggaccatgccgcgcaaaggccgagttatctacatctgcagctcccctgatgccttcagaaccctcatgctcctggccctggaagctggcttgtgtggggaggactacgttttcttccacctggatatctttgggcaaagcctgcaaggtggacagggccctgctccccgcaggccctgggagagaggggatgggcaggatgtcagtgcccgccaggcctttcaggctgccaaaatcattacatataaagacccagataatcccgagtacttggaattcctgaagcagttaaaacacctggcctatgagcagttcaacttcaccatggaggatggcctggtgaacaccatcccagcatccttccacgacgggctcctgctctatatccaggcagtgacggagactctggcacatgggggaactgttactgatggggagaacatcactcagcggatgtggaaccgaagctttcaaggtgtgacaggatacctgaaaattgatagcagtggcgatcgggaaacagacttctccctctgggatatggatcccgagaatggtgccttcagggttgtactgaactacaatgggacttcccaagagctggtggctgtgtcggggcgcaaactgaactggcccctggggtaccctcctcctgacatccccaaatgtggctttgacaacgaagacccagcatgcaaccaagatcacctttccaccctggaggtgctggctttggtgggcagcctctccttgctcggcattctgattgtctccttcttcatatacaggaagatgcagctggagaaggaactggcctcggagctgtggcgggtgcgctgggaggacgttgagcccagtagccttgagaggcacctgcggagtgcaggcagccggctgaccctgagcgggagaggctccaattacggctccctgctaaccacagagggccagttccaagtctttgccaagacagcatattataagggcaacctcgtggctgtgaaacgtgtgaaccgtaaacgcattgagctgacacgaaaagtcctgtttgaactgaagcatatgcgggatgtgcagaatgaacacctgaccaggtttgtgggagcctgcaccgacccccccaatatctgcatcctcacagagtactgtccccgtgggagcctgcaggacattctggagaatgagagcatcaccctggactggatgttccggtactcactcaccaatgacatcgtcaagggcatgctgtttctacacaatggggctatctgttcccatgggaacctcaagtcatccaactgcgtggtagatgggcgctttgtgctcaagatcaccgactatgggctggagagcttcagggacctggacccagagcaaggacacaccgtttatgccaaaaagctgtggacggcccctgagctcctgcgaatggcttcaccccctgtgcggggctcccaggctggtgacgtatacagctttgggatcatccttcaggagattgccctgaggagtggggtcttccacgtggaaggtttggacctgagccccaaagagatcatcgagcgggtgactcggggtgagcagccccccttccggccctccctggccctgcagagtcacctggaggagttggggctgctcatgcagcggtgctgggctgaggacccacaggagaggccaccattccagcagatccgcctgacgttgcgcaaatttaacagggagaacagcagcaacatcctggacaacctgctgtcccgcatggagcagtacgcgaacaatctggaggaactggtggaggagcggacccaggcatacctggaggagaagcgcaaggctgaggccctgctctaccagatcctgcctcactcagtggctgagcagctgaagcgtggggagacggtgcaggccgaagcctttgacagtgttaccatctacttcagtgacattgtgggtttcacagcgctgtcggcggagagcacacccatgcaggtggtgaccctgctcaatgacctgtacacttgctttgatgctgtcatagacaactttgatgtgtacaaggtggagacaattggcgatgcctacatggtggtgtcagggctccctgtgcggaacgggcggctacacgcctgcgaggtagcccgcatggccctggcactgctggatgctgtgcgctccttccgaatccgccaccggccccaggagcagctgcgcttgcgcattggcatccacacaggacctgtgtgtgctggagtggtgggactgaagatgccccgttactgtctctttggggatacagtcaacacagcctcaagaatggagtctaatggggaagccctgaagatccacttgtcttctgagaccaaggctgtcctggaggagtttggtggtttcgagctggagcttcgaggggatgtagaaatgaagggcaaaggcaaggttcggacctactggctccttggggagagggggagtagcacccgaggctgacctgcctcctctcctatccctccacacctcccctaccctgtgccagaagcaacagaggtgccaggcctcagcctcacccacagcagccccatcgccaaaggatggaagtaatttgaatagctcaggtgtgctgaccccagtgaagacaccagataggacctctgagaggggactggcatggggggatctcagagcttacaggctgagccaagcccacggccatgcacagggacactcacacaggcacacgcacctgctctccacctggactcaggccgggctgggctgtggatccttgatcccctcccctccccatgctctcctccctcagccttgctaccctgtgacttactgggaggagagtcacctgaaggggaacatgaaaagagactaggtgaagagagggcaggggagcccacatctggggctggcccacaatacctgctcccccgaccccctccacccagcagtagacacagtgcacaggggagaagaggggtggcgcagaagggttgggggcctgtatgccttgcttctaccatgagcagagacaattaaaatctttattccagtg

SEQ ID NO: 62073 - DNA, 1004 bp, Homo Sapiens
gcctcgctcgggcgcccagtggtcctgccgcctggtctcacctcgccatggttcgtctgcctctgcagtgcgtcctctggggctgcttgctgaccgctgtccatccagaaccacccactgcatgcagagaaaaacagtacctaataaacagtcagtgctgttctttgtgccagccaggacagaaactggtgagtgactgcacagagttcactgaaacggaatgccttccttgcggtgaaagcgaattcctagacacctggaacagagagacacactgccaccagcacaaatactgcgaccccaacctagggcttcgggtccagcagaagggcacctcagaaacagacaccatctgcacctgtgaagaaggctggcactgtacgagtgaggcctgtgagagctgtgtcctgcaccgctcatgctcgcccggctttggggtcaagcagattgctacaggggtttctgataccatctgcgagccctgcccagtcggcttcttctccaatgtgtcatctgctttcgaaaaatgtcacccttggacaagctgtgagaccaaagacctggttgtgcaacaggcaggcacaaacaagactgatgttgtctgtggtccccaggatcggctgagagccctggtggtgatccccatcatcttcgggatcctgtttgccatcctcttggtgctggtctttatcaaaaaggtggccaagaagccaaccaataaggccccccaccccaagcaggaaccccaggagatcaattttcccgacgatcttcctggctccaacactgctgctccagtgcaggagactttacatggatgccaaccggtcacccaggaggatggcaaagagagtcgcatctcagtgcaggagagacagtgaggctgcacccacccaggagtgtggccacgtgggcaaacaggcagttggccagagagcctggtgctgctgctgcaggggtgcaggcagaagcggggagctatgcccagtcagtgccagcccctc

SEQ ID NO: 62074 - DNA, 2033 bp, Homo Sapiens
ggacgagcagcggaggcggtcgggagcgatggtgaagatggcggcggcgggcggcggaggcggcggtggccgctactacggcggcggcagtgagggcggccgggcccctaagcggctcaagactgacaacgccggcgaccagcacggaggcggcggcggtggcggtggaggagccggggcggcgggcggcggcggcggtggggagaactacgatgacccgcacaaaacccctgcctccccagttgtccacatcaggggcctgattgacggtgtggtggaagcagaccttgtggaggccttgcaggagtttggacccatcagctatgtggtggtaatgcctaaaaagagacaagcactggtggagtttgaagatgtgttgggggcttgcaacgcagtgaactacgcagccgacaaccaaatatacattgctggtcacccagcttttgtcaactactctaccagccagaagatctcccgccctggggactcggatgactcccggagcgtgaacagtgtgcttctctttaccatcctgaaccccatttattcgatcaccacggatgttctttacactatctgtaatccttgtggccctgtccagagaattgtcattttcaggaagaatggagttcaggcgatggtggaatttgactcagttcaaagtgcccagcgggccaaggcctctctcaatggggctgatatctattctggctgttgcactctgaagatcgaatacgcaaagcctacacgcttgaatgtgttcaagaatgatcaggatacttgggactacacaaaccccaatctcagtggacaaggtgaccctggcagcaaccccaacaaacgccagaggcagccccctctcctgggagatcaccccgcagaatatggagggccccacggtgggtaccacagccattaccatgatgagggctacgggccccccccacctcactacgaagggagaaggatgggtccaccagtggggggtcaccgtcggggcccaagtcgctacggcccccagtatgggcaccccccaccccctcccccaccacccgagtatggccctcacgccgacagccctgtgctcatggtctatggcttggatcaatctaagatgaacggtgaccgagtcttcaatgtcttctgcttatatggcaatgtggagaaggtgaaattcatgaaaagcaagccgggggccgccatggtggagatggctgatggctacgctgtagaccgggccattacccacctcaacaacaacttcatgtttgggcagaagctgaatgtctgtgtctccaagcagccagccatcatgcctggtcagtcatacgggttggaagacgggtcttgcagttacaaagacttcagtgaatcccggaacaatcggttctccaccccagagcaggcagccaagaaccgcatccagcaccccagcaacgtgctgcacttcttcaacgccccgctggaggtgaccgaggagaacttctttgagatctgcgatgagctgggagtgaagcggccatcttctgtgaaagtattctcaggcaaaagtgagcgcagctcctctggactgctggagtgggaatccaagagcgatgccctggagactctgggcttcctgaaccattaccagatgaaaaacccaaatggtccatacccttacactctgaagttgtgtttctccactgctcagcacgcctcctaattaggtgcctaggaagagtcccatctgagcaggaagacatttctctttcctttatgccattttttgtttttgttatttgcaaaagatcttgtattcctttttttttttttttttttttaaatgctaggtttgtagaggcttacttaaccttaatggaaacgctggaaatctgcagggggagggagaggggaactgttatctcccaagattaaccttcacttttaaaaaattattgtacatgtgatttttttttttcctgttcatacatttgtgctgcccatgtactcttggcacatttcaataaaattgtttggaaaataaacacagc

SEQ ID NO: 62075 - DNA, 1801 bp, Homo Sapiens
agaggagtgggaccgatcgatagcgcagcggtcgcttggcgccctttcagcgtgcgcagtgaacgtgcgctcggagcggtagattgggcaggattcgcgcctccatttttccaggagagagcgggataccaagagaaccggaccagctgctggcagggaaactgtcttccttttctccaagatgtacagaaccaaagtgggcttgaaggaccgccagcagctctacaagctgatcattagccagctgctatatgacggctacatcagcatcgccaatggcctcatcaatgaaatcaagcctcagtctgtgtgtgcaccctcggagcagctcctgcatctcatcaaactcggaatggaaaacgatgacaccgcagttcagtatgcaattggtcgttcagatactgttgcccctggcacagggattgacctggaatttgatgcagatgttcagactatgtccccagaggcttctgagtacgaaacatgctatgtcacatcacataaaggaccatgccgtgtagctacctatagtagagatggacagttaatagctactgggtctgctgatgcttcgataaagatacttgacacagagaggatgttggccaaaagtgccatgccaatagaggtcatgatgaatgagaccgcacaacaaaatatggaaaaccacccagtgattcgaactctttatgaccatgtggatgaagtcacgtgccttgctttccacccaacagaacagatcctggcttctggttcaagggattatactcttaaattatttgattattccaaaccatcagcaaaaagagccttcaaatacattcaggaagctgaaatgttacgttccatctcttttcatccttctggagactttatacttgtcggaactcagcatcctactcttcgcctttatgatatcaacacctttcaatgttttgtctcttgcaatcctcaagatcaacacaccgatgctatatgttccgttaattacaattctagtgccaatatgtacgtaactggaagcaaggacggctgcatcaaattatgggatggtgtttcaaatcgatgcatcacaacttttgagaaagcacatgacggtgctgaagtttgttctgccattttttccaaaaattctaaatacattctctcaagtggaaaagactctgtagctaaactttgggaaatatcaacgggacgaacactggtcagatacacgggcgcgggtttaagtggacgccaggtgcaccggacacaggctgtgtttaaccacaccgaggactatgtgttgctgcccgacgagaggacgatcagtctttgctgctgggactcgaggacagccgagcggagaaacctgctgtcgttggggcacaacaatattgtacgctgcatagtgcactcccccaccaaccccgggttcatgacgtgcagcgatgacttcagagcgcggttttggtaccggagatcgaccactgactgagccaccctctccgtagggttctttctcgaggactctaccctcctcccccacgtcctgtctcagctgcagtcgtaagtccgtgcaccatccttgacgttttgctgccacctctgtccacattcttcttggatttgtataaaagaatctttttttaccttgatgtagaatcatggtggaaaaagttggaaacacagatctgtgcagttctacattcactgattattacagtgtgattttcatcggttttgtaagtacaggacttgccgtttcttttgatctcttgattgaaggaggatagggcattaaagtgcttttgacatgagg

SEQ ID NO: 62076 - DNA, 13747 bp, Homo Sapiens; identical to SEQ ID NO: 28819

SEQ ID NO: 62077 - DNA, 1540 bp, Homo Sapiens; identical to SEQ ID NO: 29231

SEQ ID NO: 62078 - DNA, 2360 bp, Homo Sapiens
gctacgcgggccacgctgctggctggcctgacctaggcgcgcggggtcgggcggccgcgcgggcgggctgagtgagcaagacaagacactcaagaagagcgagctgcgcctgggtcccggccaggcttgcacgcagaggcgggcggcagacggtgcccggcggaatctcctgagctccgccgcccagctctggtgccagcgcccagtggccgccgcttcgaaagtgactggtgcctcgccgcctcctctcggtgcgggaccatgaagctgctgccgtcggtggtgctgaagctctttctggctgcagttctctcggcactggtgactggcgagagcctggagcggcttcggagagggctagctgctggaaccagcaacccggaccctcccactgtatccacggaccagctgctacccctaggaggcggccgggaccggaaagtccgtgacttgcaagaggcagatctggaccttttgagagtcactttatcctccaagccacaagcactggccacaccaaacaaggaggagcacgggaaaagaaagaagaaaggcaaggggctagggaagaagagggacccatgtcttcggaaatacaaggacttctgcatccatggagaatgcaaatatgtgaaggagctccgggctccctcctgcatctgccacccgggttaccatggagagaggtgtcatgggctgagcctcccagtggaaaatcgcttatatacctatgaccacacaaccatcctggccgtggtggctgtggtgctgtcatctgtctgtctgctggtcatcgtggggcttctcatgtttaggtaccataggagaggaggttatgatgtggaaaatgaagagaaagtgaagttgggcatgactaattcccactgagagagacttgtgctcaaggaatcggctggggactgctacctctgagaagacacaaggtgatttcagactgcagaggggaaagacttccatctagtcacaaagactccttcgtccccagttgccgtctaggattgggcctcccataattgctttgccaaaataccagagccttcaagtgccaaacagagtatgtccgatggtatctgggtaagaagaaagcaaaagcaagggaccttcatgcccttctgattcccctccaccaaaccccacttcccctcataagtttgtttaaacacttatcttctggattagaatgccggttaaattccatatgctccaggatctttgactgaaaaaaaaaaagaagaagaagaaggagagcaagaaggaaagatttgtgaactggaagaaagcaacaaagattgagaagccatgtactcaagtaccaccaagggatctgccattgggaccctccagtgctggatttgatgagttaactgtgaaataccacaagcctgagaactgaattttgggacttctacccagatggaaaaataacaactatttttgttgttgttgtttgtaaatgcctcttaaattatatatttattttattctatgtatgttaatttatttagtttttaacaatctaacaataatatttcaagtgcctagactgttactttggcaatttcctggccctccactcctcatccccacaatctggcttagtgccacccacctttgccacaaagctaggatggttctgtgacccatctgtagtaatttattgtctgtctacatttctgcagatcttccgtggtcagagtgccactgcgggagctctgtatggtcaggatgtaggggttaacttggtcagagccactctatgagttggacttcagtcttgcctaggcgattttgtctaccatttgtgttttgaaagcccaaggtgctgatgtcaaagtgtaacagatatcagtgtctccccgtgtcctctccctgccaagtctcagaagaggttgggcttccatgcctgtagctttcctggtccctcacccccatggccccaggccacagcgtgggaactcactttcccttgtgtcaagacatttctctaactcctgccattcttctggtgctactccatgcaggggtcagtgcagcagaggacagtctggagaaggtattagcaaagcaaaaggctgagaaggaacagggaacattggagctgactgttcttggtaactgattacctgccaattgctaccgagaaggttggaggtggggaaggctttgtataatcccacccacctcaccaaaacgatgaaggtatgctgtcatggtcctttctggaagtttctggtgccatttctgaactgttacaacttgtatttccaaacctggttcatatttatactttgcaatccaaataaagataacccttattccataaaaaaaaaaaaaaaaaa

SEQ ID NO: 62079 - DNA, 1539 bp, Homo Sapiens
gaattcggggggagggggcagtgtcctccgagccaggacaggcatgttgttgggactggcggccatggagctgaaggtgtgggtggatggcatccagcgtgtggtctgtggggtctcagagcagaccacctgccaggaagtggtcatcgcactagcccaagcaataggccagactggccgctttgtgcttgtgcagcggcttcgggagaaggagcggcagttgctgccacaagagtgtccagtgggcgcccaggccacctgcggacagtttgccagcgatgtccagtttgtcctgaggcgcacagggcccagcctagctgggaggccctcctcagacagctgtccacccccggaacgctgcctaattcgtgccagcctccctgtaaagccacgggctgcgctgggctgtgagccccgcaaaacactgacccccgagccagcccccagcctctcacgccctgggcctgcggcccctgtgacacccacaccaggctgctgcacagacctgcggggcctggagctcagggtgcagaggaatgctgaggagctgggccatgaggccttctgggagcaagagctgcgccgggagcaggcccgggagcgagagggacaggcacgcctgcaggcactaagtgcggccactgctgagcatgccgcccggctgcaggccctggacgctcaggcccgtgccctggaggctgagctgcagctggcagcggaggcccctgggcccccctcacctatggcatctgccactgagcgcctgcaccaggacctggctgttcaggagcggcagagtgcggaggtgcagggcagcctggctctggtgagccgggccctggaggcagcagagcgagccttgcaggctcaggctcaggagctggaggagctgaaccgagagctccgtcagtgcaacctgcagcagttcatccagcagaccggggctgcgctgccaccgcccccacggcctgacaggggccctcctggcactcagggccctctgcctccagccagagaggagtccctcctgggcgctccctctgagtcccatgctggtgcccagcctaggccccgaggtggcccccatgacgcagaactcctggaggtagcagcagctcctgccccagagtggtgtcctctggcagcccagccccaggctctgtgacagcctagtgagggctgcaagaccatcctgcccggaccacagaaggagagttggcggtcacagagggctcctctgccaggcagtgggaagccctgggtttggcctcaggagctgggggtgcagtgggggactgccctagtccttgccaggtcgcccagcaccctggagaagcatggggcgtagccagctcggaacttgccaggccccaaaggccacgactgcctgttggggacaggagatgcatggacagtgtgctcaagctgtgggcatgtgcttgcctgcgggagaggtccttcactgtgtgtacacagcaagagcatgtgtgtgccacttcccctaccccaacgtgaaaacctcaataaactgcccgaagc

SEQ ID NO: 62080 - DNA, 1497 bp, Homo Sapiens
accaacctcttcgaggcacaaggcacaacaggctgctctgggattctcttcagccaatcttcattgctcaagtgtctgaagcagccatggcagaagtacctgagctcgccagtgaaatgatggcttattacagtggcaatgaggatgacttgttctttgaagctgatggccctaaacagatgaagtgctccttccaggacctggacctctgccctctggatggcggcatccagctacgaatctccgaccaccactacagcaagggcttcaggcaggccgcgtcagttgttgtggccatggacaagctgaggaagatgctggttccctgcccacagaccttccaggagaatgacctgagcaccttctttcccttcatctttgaagaagaacctatcttcttcgacacatgggataacgaggcttatgtgcacgatgcacctgtacgatcactgaactgcacgctccgggactcacagcaaaaaagcttggtgatgtctggtccatatgaactgaaagctctccacctccagggacaggatatggagcaacaagtggtgttctccatgtcctttgtacaaggagaagaaagtaatgacaaaatacctgtggccttgggcctcaaggaaaagaatctgtacctgtcctgcgtgttgaaagatgataagcccactctacagctggagagtgtagatcccaaaaattacccaaagaagaagatggaaaagcgatttgtcttcaacaagatagaaatcaataacaagctggaatttgagtctgcccagttccccaactggtacatcagcacctctcaagcagaaaacatgcccgtcttcctgggagggaccaaaggcggccaggatataactgacttcaccatgcaatttgtgtcttcctaaagagagctgtacccagagagtcctgtgctgaatgtggactcaatccctagggctggcagaaagggaacagaaaggtttttgagtacggctatagcctggactttcctgttgtctacaccaatgcccaactgcctgccttagggtagtgctaagaggatctcctgtccatcagccaggacagtcagctctctcctttcagggccaatccccagcccttttgttgagccaggcctctctcacctctcctactcacttaaagcccgcctgacagaaaccacggccacatttggttctaagaaaccctctgtcattcgctcccacattctgatgagcaaccgcttccctatttatttatttatttgtttgtttgttttattcattggtctaatttattcaaagggggcaagaagtagcagtgtctgtaaaagagcctagtttttaatagctatggaatcaattcaatttggactggtgtgctctctttaaatcaagtcctttaattaagactgaaaatatataagctcagattatttaaatgggaatatttataaatgagcaaatatcatactgttcaatggttctgaaataaacttctctgaag

SEQ ID NO: 62081 - DNA, 2106 bp, Homo Sapiens
ctttgcaactactggccagtgggaggttaccactgaaagggatggtaaaaaagaaactgcccagacggttggacaggacgtagacacacagaagaaaagaagacaaagaacgggtaggaaaattaaaaaggttaccatggggaagaaagtggccatcattggagctggtgtgagtggcttggcctccatcaggagctgtctggaagaggggctggagcccacctgctttgagaagagcaatgacattgggggcctgtggaaattttcagaccatgcagaggagggcagggctagcatttacaaatcagtcttttccaactcttccaaagagatgatgtgtttcccagacttcccatttcccgatgacttccccaactttatgcacaacagcaagatccaggaatatatcattgcatttgccaaagaaaagaacctcctgaagtacatacaatttaagacatttgtatccagtgtaaataaacatcctgattttgcaactactggccagtgggatgttaccactgaaagggatggtaaaaaagaatcggctgtctttgatgctgtaatggtttgttccggacatcatgtgtatcccaacctaccaaaaaagtcctttccaggactaaaccactttaaaggcaaatgcttccacagcagggactataaagaaccaggtgtattcaatggaaagcgtgtcctggtggttggcctggggaattcgggctgtgatattgccacagaactcagccgcacagcagaacaggtcatgatcagttccagaagtggctcctgggtgatgagccgggtctgggacaatggttatccttgggacatgctgctcgtcactcgatttggaaccttcctcaagaacaatttaccgacagccatctctgactggttgtacgtgaagcagatgaatgcaagattcaagcatgaaaactatggcttgatgcctttaaatggagtcctgaggaaagagcctgtatttaacgatgagctcccagcaagcattctgtgtggcattgtgaccgtaaagcctaacgtgaaggaattcacagagacctcggccatttttgaggatgggaccatatttgagggcattgactgtgtaatctttgcaacagggtatagttttgcctaccccttccttgatgagtctatcatcaaaagcagaaacaatgagatcattttatttaaaggagtatttcctcctctacttgagaagtcaaccatagcagtattgggctttgtccagtcccttggggctgccattcccacagttgacctccagtcccgctgggcagcacaagtaataaagggaacttgtactttgggccctttctatgggaagacattgatgaatgatattattgagaaaatggagaaaaagcgggcaaatgggtttggcaaaagcgagaccatacagacagattacattgtttatatggatgaactctcctccttcattggggcaaccaacatcccaatgctgttcctcacaggtcccaaattggccatggagttatttgggccctgtagtccctaccagtttaggctggtgggcccaggcagctggccaggagccagaaatgccatactgacccagtgggaccggtcgttgaaacccatgcagacacgagtggtcgggagacttcagaagccttgcttctttttccattggctgaagctctttgcaattcctattctgttaatcgctgttttccttgtgttgacctaatcatcattttctctaggatttctgaaagttactgacaatacccagacaggggctttgctatttaaaaattaaaattttcacaccacctgcttttctattcagcatcttttgcagtactctgtagacattagtcagtaataccagtgttatttctaggctctgaaatagcactttaagaatcatgtcatgatcttaagagagcactaatcatttctgtttgagttccactcaacacttcaaaatcagaactatgttctttatatctaacttaaatcatttcctgaaacattttgacatgattcctttttccttttaaacaatgtatgaaagatgtattttaaatctaaataaagagcaaattaagcaga

SEQ ID NO: 62082 - DNA, 2678 bp, Homo Sapiens; identical to SEQ ID NO: 58521

SEQ ID NO: 62083 - DNA, 1162 bp, Homo Sapiens
acgcgtctcccccacggtgcgaagtgggtacggctcgcaggggcggggccaggtcatgtgacgcggccgcgccgcattttgttctgcggtgctggtatttagagcgcacgctgacgggccggatcgccttcgccgccgcccgcccgcaaaccttcgtgcccggcccgtcctcgcccccgcctccgccaccgcctcggcccgcagagcttgccccctccccacccgcagacatgtccgagtccaagagcggccccgagtatgcttcgtttttcgccgtcatgggcgcctcggccgccatggtcttcagcgccctgggcgctgcctatggcacagccaagagcggtaccggcattgcggccatgtctgtcatgcggccggagcagatcatgaagtccatcatcccagtggtcatggctggcatcatcgccatctacggcctggtggtggcagtcctcatcgccaactccctgaatgacgacatcagcctctacaagagcttcctccagctgggcgccggcctgagcgtgggcctgagcggcctggcagccggctttgccatcggcatcgtgggggacgctggcgtgcggggcaccgcccagcagccccgactattcgtgggcatgatcctgattctcatcttcgccgaggtgctcggcctctacggtctcatcgtcgccctcatcctctccacaaagtagaccctctccgagcccaccagccacagaatattatgtaaagaccacccctcctcattccagaacgaacagcctgacacatacgcagcgccgcccgcccccagtagttggtcttgtacatgcgcagtatcctagtgcccatcgtctgtttccccgccttgcccccgcccgccccgtgccgtggacatctgggcccactcatcgcccctccaggcccccggcgccccaccccctaaagtgctctagtatgcggatgatttagaattgtcatttctctttactggatgtttattattaaagatctcgcctgttcctgcgtctgcggagccgcccttgtctcccagctatctataaccttagcttgtgtgtcgccttgtgggttcctgttgctgagacttttcctggatggagccgccctcaccgcgcccgtggccctgcgcggagctgtgtccaataaagttcttgct

SEQ ID NO: 62084 - DNA, 3301 bp, Homo Sapiens; identical to SEQ ID NO: 61023
  misc_feature (2966)..(2972): n is a, c, g, or t

SEQ ID NO: 62085 - DNA, 2309 bp, Homo Sapiens; identical to SEQ ID NO: 31801
  misc_feature (2255)..(2256): n is a, c, g, or t

SEQ ID NO: 62086 - DNA, 2134 bp, Homo Sapiens
gggccacccttagcagcggtcgcggtcggtgccgaagcggtgttccccgccttagccgctgcgcctcccaagagagcggccggtgggccctcgtcctgtcagtggcgtcggaggccggcctgcggtggccgcgcccttctggtgctcggacaccgctgaggagccggggccgggcacggctggctgacggctccgggcagctaaggctgcccgaggagaaggcggcggccgcggcgtaggcgcacgtccggcgggctcctggagcctggaggaggccgaggggaccatgtccgggaggcgcttccacctctccaccaccgaccgcgtcatcaaagctgtcccctttcctccaacccaacggcttactttcaaggaagtatttgagaatgggaaacctaaagttgatgttttaaaaaaccatttggtaaaggaaggacgactggaagaggaagtagccttaaagataatcaatgatggggctgccatcctgaggcaagagaagactatgatagaagtagatgctccaatcacagtatgtggtgatattcatggacaattctttgacctaatgaagttatttgaagttggaggatcacctagtaacacacgctacctctttctgggtgactatgtggacagaggctatttcagtatagagtgtgtgctgtatttatggagtttaaagattaatcatcccaaaacattgtttctgcttcggggaaatcatgaatgcaggcatcttacagactatttcaccttcaaacaggaatgtcgaatcaaatattcggaacaggtgtatgatgcctgtatggagacatttgactgtcttcctcttgctgccctcttaaaccagcagtttctctgtgtacatggaggaatgtcacctgaaattacttctttagatgacattaggaaattagacaggtttacggaacctcccgcctttggacctgtgtgtgacctgctttggtctgatccctcagaggattatggcaatgagaagaccttggagcactatacccacaacactgtccgagggtgctcttatttctacagttaccctgcagtttgtgaatttttgcagaacaataatttactatcaattatcagagcccatgaagcccaagatgctgggtatcgaatgtacaggaagagccaagccacaggctttccatcacttattacaattttctctgcccccaattacctagatgtctataacaataaagctgctgtgttgaaatatgaaaacaatgtcatgaatatcaggcagtttaactgttctccacacccctactggcttccaaactttatggatgttttcacatggtctttgccttttgttggggaaaaagtcacagagatgctggtaaatgtgctcaacatatgctctgatgacgaactgatttctgatgatgaagcagaaggaagcactacagttcgtaaggagatcatcaggaataagatcagagccattgggaagatggcacgggtcttttcaattcttcggcaagaaagtgagagtgtgctgactctcaagggcctgactcccacaggcacactccctctgggcgtcctctcaggaggcaagcagactatcgagacagccatcagagggttctcgcttcagcacaagatccggagttttgaagaagcgcgaggtctggaccgaattaatgagcgaatgccaccccgaaaggatagcatataccctggtgggccaatgaaatctgtaacctcagcacactcacatgctgcgcacaggagcgaccaagggaagaaagcccattcatgacttagagtcctgccgtgctcaggtggatctaaaactcaagaacaaattctatttatttattattggaaaatgaaaagcaactcaaaacaacttcaacctggaggtgcatttataattcagtctgcatttattctgtaaaaaggtgactgttttataaattcttttaatttatgttcaatatatataaaaagtgcatctgttttgtttttcccttttttctccataattttaagaaatgaatctgattgttgtcaacacatttgtgaagtcttgtgctataaaggggaacttcccctaataaaagggccttggaaacctcaaacctgggtttctgacccc

SEQ ID NO: 62087 - DNA, 5134 bp, Homo Sapiens
ggacacggagccgcgaggagacagctgaggcccgcggagaccagggggtgaagcctggagaccctcttgccctggcctagctgcaggcccccgggatgctttgggcatgtcctctggagccccacagaagagcagcccaatggccagtggagctgaggagaccccaggcttcctggacacgctcctgcaagacttcccagccctgctgaacccagaggaccctctgccatggaaggccccagggacggtgctcagccaggaggaggtggagggcgagctggctgagctggccatgggctttctgggcagcaggaaggccccgccaccacttgctgctgctctggcccacgaagcagtttcacagctgctacagacagacctttccgaattcaggaagttgcccagggaggaagaagaagaggaggaggacgatgacgaggaggaaaaggcccctgtgaccttgctggatgcccaaagcctggcacagagtttctttaaccgcctttgggaagtcgccggccagtggcagaagcaggtgccattggctgcccgggcctcacagcggcagtggctggtctccatccacgccatccggaacactcgccgcaagatggaggaccggcacgtgtccctcccttccttcaaccagctcttcggcttgtctgaccctgtgaaccgcgcctactttgctgtgtttgatggtcacggaggcgtggatgctgcgaggtacgccgctgtccacgtgcacaccaacgctgcccgccagccagagctgcccacagaccctgagggagccctcagagaagccttccggcgcaccgaccagatgtttctcaggaaagccaagcgagagcggctgcagagcggcaccacaggtgtgtgtgcgctcattgcaggagcgaccctgcacgtcgcctggctcggggattcccaggtcattttggtacagcagggacaggtggtgaagctgatggagccacacagaccagaacggcaggatgagaaggcgcgcattgaagcattgggtggctttgtgtctcacatggactgctggagagtcaacgggaccctggccgtctccagagccatcggggatgtcttccagaagccctacgtgtctggggaggccgatgcagcttcccgggcgctgacgggctccgaggactacctgctgcttgcctgtgatggcttctttgacgtcgtaccccaccaggaagttgttggcctggtccagagccacctgaccaggcagcagggcagcgggctccgtgtcgccgaggagctggtggctgcggcccgggagcggggctcccacgacaacatcacggtcatggtggtcttcctcagggacccccaagagctgctggagggcgggaaccagggagaaggggacccccaggcagaagggaggaggcaggacttgccctccagccttccagaacctgagacccaggctccaccaagaagctaggtggtttccaggcccctgccctccccttcctcccatccttgtccttctctccctcagaagcctcaggacccaacaggtggcaggcagtggacagggtgcccgccccacagtgctttccccagcaccccagagccagtcgggacaccccccgcagcccgtcctggtggctgtggaactgcactgggtggcgggcagatggtggaaggcagcttaggagacctcaccaaagagaagatggaccggctcttgctcccagctcctattaggcccggggtgggaccagaggtcataggtgcccaacggcagccaaaccaaagacactggtgtgcatggggcagcatggttgtgcacgtgggaccctggggcggacccaggagccaaactcttgaagcaccccctgggtcaggcccagcagcggagtggccagccccagtttcccattgctcctctctgcggccagggccaggtgggttcatatttacagatatgcccagccagtcctggtcggccacaccagtgtcccaaagaggagagcgcagcagagccaggggtctgttctgtagcagccacccccctgcccccactccagggcagccatgatgtgcttggcccaccagggccttccgggctgctctcttccctgagcccggaaccggcgacgcacatgtgtcttttgttggtgtgtttgtttttttccagggaggtctaattccgaagcagtattccaggttttctctttgttttatcagtgccaagatgacctgttgtgtcatataatttaagcagagcttagcatttattttattctttagaaaacttaagtatttacttttttaaagctatttttcaaggaacctttttttgcagtattattgaatttattttctaaatcaggattgaaacaggaacttttccaggtggtgttaataagccattcaagtgccttacacagctttgaagaaactaggactgcagtgggctcggataggcccattgaggtttttagaaaagcaggatttgttttgttagggaggcatgattttggtgagatctttctggaagagttttccgcctctttgtgatgctgaacacccccaaggttctcccctccccccgctgcccaggtgactggcaggagctgcgactgccacgtagtgttgcctgggcccgacagcggggctctgggcatcccgggtgaccttggcccatctgcctgcattcccacccccttgggcctggctggatcccaggcagagggaccttgctgctgtgtgattggaacattcccaaatatcttgtgaatttgtaatcaaattggtctcattgggaaagactcttaattaagaggctcaggcaagcacagaggcagcccgtgggtctctgtctcagtctggaggcagcagggatgctgctgggagtccatggcacaggccacagcccctcaccttgccgcggtggctggcagcacgcctgccttgctctgccccatgccctgaacaggcatgagagctccacgtcccctagtgcaccctgagagggggctcacaagtgaccgatcctgggtgcctcagggagctcactgagggcgtgcaaagttgaaagtggcaaggctgggggagggtgtcgggtagagggaagagggcagggggctaggggaggactcagaggccatctgcagggccaagccacaggaagggctgagctggaggtgggcagggctgctccaggcaggtcagagcagtgcagggggaggagaggagaaagggaggaagctgggctgtgtggtccccatgaaggcattcagagtccacctgcagacagcgagagccccaggaaggtttgcacagctgtgccccaagcaccttggcctcctctcagctcgccgaggaggcacgctagagccgccttcccggtgggagccctctgtcccacagggagcggggagccagctttgctggggccctacctgcatgcccagccttacccctcattctcacagcacagatgaggttgagaccatgcagtcaatgcattgcttaaggtctcttatttacaaaaaaaaaccttaaacatagtcgctgtcattcagacattcagagaatggttggccacaaacaatgaccaagtattgcttggcttaacttgaaggcctgctgtctccttctgggggtcagggacgcagctccaccctcaccactagcccaccctgcccgtgggcataaccttgacgaagagagagaatgattggcatctgcttttctcttttctttgctaataattctgttcctggctgccgagagtgaagtttcaccatgtggaggtttggctcctatcacctggtggtctgattcataccctagcctgaggctccactggaagatctcgcagcctcagtgtatgggaaaccctttccccaggcttgtcccagcactgccgctccccacccctgagccaggaccccagaggatggccatgccccgtgcctggcagaggtctggtgccagcactgggagctgctccgcccttgccttggggccgagggagccctcgtccacccctgcacagcagctgggcacagaggagcgctcttccatcttgaccaggactgcaccaagaagcaccaggtgtcttcagcctccaacctccggggcgaccttctcttccagccacagtcccatgagggcccctagccagggacactggtctgtaaattgtaatcctttctccagcccagctctccacttgttccttgtgtgagctgagcaggcagtgcacctctgagtgtcccttttgtaaggcccaggggttgcactgagtctgcagaggccgcgacctcctagaacgctgtgggtgcaagtgagccggcgtgtcctggggagatgctgccagcacacaggggccctcctgctgccagcaggttggggtggttaagtcttattagtgtctattcttaaaattaagtgggctggagaagaatggagctccacatgccagcaccgtatatggaatacaaaagctggggaagcagggcctgccttacaggtgtggctgactctgagcccaggcctgcaggggtggagggcagtccctcagaatcccagaggcagtcccagcctcagaacccaggataggaaatgggtgtgtttagtggggaaagggacggggtgcagacggcagggccagtatggggccccctccctctcctctcctctcctatggtgagcccagcgtgggcaccgggccgtctcagccgtgttcccagggctgggaggacagctctggcccttcttaggcctagcctcgtcccaagctaaatgtaagccagttgggctgtgttaaaggaagcagtgtttttggtttgattctgcctctgtagctcaaggggggcagcccccagagtcctgtgcattctgccaaggctccatagctttgccaaatgcacggagctctgccattccggtgcagtgcaggccttgcgaagggtttatctgcgttcgtctcggtgggcttctcctgcatgggagttgtgttcctgtgcaagggggagctttgctcaggacaggatgactgtcttccctattcttagggacaagtcccaagatgccagaaaggcagtctcccaaggacccaccatgcagaagtgtcaataaaccacaagttctg

SEQ ID NO: 62088 - DNA, 1529 bp, Homo Sapiens
ggctgctgtttctaaaacccctttccctctaacccacaccacctttctactcactgatgccttcaggaagccataatggatggcacagagattgctgtttcccctcggtcactgcattcagaactcatgtgccctatctgcctggacatgctgaagaatacgatgaccaccaaggagtgcctccacagattctgctctgactgcattgtcacagccctacggagcgggaacaaggagtgtcctacctgccgaaagaagctggtgtccaagcgatccctacggccagaccccaactttgatgccctgatctctaagatctatcctagccgggaggaatacgaggcccatcaagaccgagtgcttatccgcctgagccgcctgcacaaccagcaggcattgagctccagcattgaggaggggctacgcatgcaggccatgcacagggcccagcgtgtgaggcggccgataccagggtcagatcagaccacaacgatgagtgggggggaaggagagcccggggagggagaaggggatggagaagatgtgagctcagactccgcccctgactctgccccaggccctgctcccaagcgaccccgtggagggggcgcaggggggagcagtgtagggacggggggaggcggcactggtggggtgggtgggggtgccggttcggaagactctggtgaccggggagggactctgggagggggaacgctgggccccccaagccctcctggggcccccagccccccagagccaggtggagaaattgagctcgtgttccggccccaccccctgctcgtggagaagggagaatactgccagacgaggtatgtgaagacaactgggaatgccacagtggaccacctctccaagtacttggccctgcgcattgccctcgagcggaggcaacagcaggaagcaggggagccaggagggcctggagggggcgcctctgacaccggaggacctgatgggtgtggcggggagggtgggggtgccggaggaggtgacggtcctgaggagcctgctttgcccagcctggagggcgtcagtgaaaagcagtacaccatctacatcgcacctggaggcggggcgttcacgacgttgaatggctcgctgaccctggagctggtgaatgagaaattctggaaggtgtcccggccactggagctgtgctatgctcccaccaaggatccaaagtgaccccaccaggggacagccagaggaaggggaccatggggtatccctgtgtcctggtctatcaccccagcttctttgtcccccagtacccccagcccagccagccaataagaggacacaaatgaggacacgtggcttttatacaaagtatctatatgagattcttctatattgtacagagtggggcaaaacacgcccccatctgctgccttttccattgccctgcaacgtcccatctatacgaggtgttggagaaggtgaagaaccctcccattcacgcccgcctaccaacaacaaacgtgcttttttcctctttgaaaaaa

SEQ ID NO: 62089 - DNA, 2894 bp, Homo Sapiens; identical to SEQ ID NO: 28842

SEQ ID NO: 62090 - DNA, 1967 bp, Homo Sapiens
caaaacaaaaggtagtggggagctgctccggcttcggcgcggaggggcggcggccggggaggcggcggcggcggcaggattcccaggagccatgttgtcagaagtcctactggtgtctgctccggggaaagtcatccttcatggagaacatgccgtggtacatggcaaggtagcactggctgtatccttgaacttgagaacattcctccggcttcaaccccacagcaatgggaaagtggacctcagcttacccaacattggtatcaagcgggcctgggatgtggccaggcttcagtcactggacacaagctttctggagcaaggtgatgtcacaacacccacctcagagcaagtggagaagctaaaggaggttgcaggcttgcctgacgactgtgctgtcaccgagcgcctggctgtgctggcctttctttacttatacctgtccatctgccggaagcagagggccctgccgagcctggatatcgtagtgtggtcggagctgccccccggggcgggcttgggctccagcgccgcctactcggtgtgtctggcagcagccctcctgactgtgtgcgaggagatcccaaacccgctgaaggacggggattgcgtcaacaggtggaccaaggaggatttggagctaattaacaagtgggccttccaaggggagagaatgattcacgggaacccctccggagtggacaatgctgtcagcacctggggaggagccctccgataccatcaagggaagatttcatccttaaagaggtcgccagctctccagatcctgctgaccaacaccaaagtccctcgcaataccagggcccttgtggctggcgtcagaaacaggctgctcaagttcccagagatcgtggcccccctcctgacctcaatagatgccatctccctggagtgtgagcgcgtgctgggagagatgggggaagccccagccccggagcagtacctcgtgctggaagagctcattgacatgaaccagcaccatctgaatgccctcggcgtgggccacgcctctctggaccagctctgccaggtgaccagggcccgcggacttcacagcaagctgactggcgcaggcggtggtggctgtggcatcacactcctcaagccagggctggagcagccagaagtggaggccacgaagcaggccctgaccagctgtggctttgactgcttggaaaccagcatcggtgcccccggcgtctccatccactcagccacctccctggacagccgagtccagcaagccctggatggcctctgagaggagcccacgacactgcagccccacccagatgcccctttctggattattctgggggctgcagttcgactctgtgctggccagcgagcgcccagctcctgacactgctggagaggccccagccgcttggcgatgccagccaagctctgcagtcccagcggtgggacctagggaggcatggtctgccctctgcatcctctggagccagccgagcaggaggcctaggagggtcctctgagactccagacctgaggcgagaagggctgcttccctgaagctcccacagtcccatctgcttcaggcccccgccttggcctgtgttcttcctggccgcctgggtccaatgctcaggtgctggggcctggttcccggagaagtgtgccttctctctcccttttcagggacggccccctgtctctcagggccaggcctctccctcctccaggaagccttcccctaccccttgtcgcccctccctcccagagcacctgctgtctgggtggctcactcagcacttggcccttctacctagcgggatggggctcccccaggggctgtcccggaggcggtgggcctggttaaataaggcagtgtggccttggtttatatgcactttcttccgatctgtacctgagaggtttgtggaaaagatggcaaatggggaataaaaagattttgtgtcaac

SEQ ID NO: 62091 - DNA, 2577 bp, Homo Sapiens
cacatgtcggcgcaggcggccaaagtcagtaaaaaggagctcaactccaaccacgacggggccgacgagacctcagaaaaagaacagcaagaagcgattgaacacattgatgaagtacaaaatgaaatagacagacttaatgaacaagccagtgaggagattttgaaagtagaacagaaatataacaaactccgccaaccattttttcagaagaggtcagaattgatcgccaaaatcccaaatttttgggtaacaacatttgtcaaccatccacaagtgtctgcactgcttggggaggaagatgaagaggcactgcattatttgaccagagttgaagtgacagaatttgaagatattaaatcaggttacagaatagatttttattttgatgaaaatccttactttgaaaataaagttctctccaaagaatttcatctgaatgagagtggtgatccatcttcgaagtccaccgaaatcaaatggaaatctggaaaggatttgacgaaacgttcgagtcaaacgcagaataaagccagcaggaagaggcagcatgaggaaccagagagcttctttacctggtttactgaccattctgatgcaggtgctgatgagttaggagaggtcatcaaagatgatatttggccaaacccattacagtactacttggttcccgatatggatgatgaagaaggagaaggagaagaagatgatgatgatgatgaagaggaggaaggattagaagatattgacgaagaaggggatgaggatgaaggtgaagaagatgaagatgatgatgaaggggaggaaggagaggaggatgaaggagaagatgactaaatagaacactgatggattccaaccttcctttttttaaattttctccagtccctgggagcaagttgcagtctttttttttttttttttttttttccctcttgtgctcagtcgccctgttcttgaggtctcttttctctactccatggttctcaatttatttggggggaaataccttgagcagaatacaatgggaaaagagtctctacccctttctgttcgaagttcatttttatcccttcctgtctgaacaaaaactgtatggaatcaacaccaccgagctctgtgggaaaaaagaaaaacctgctccctttgctctgctggaagctggagggtgctaggcccctgtgtagtagtgtatagaattctagcttttttcctcctttctctgtatattgggctcagagagtacactgtgtctctatgtgaatatggacagttagcatttaccaacatgtatctgtctactttctcttgtttaaaaaaagaaaaaaaaacttaaaaaaatggggttatagaaggtcagcaaaggggtggggtttgagatgtttgggtgggttagtgggcattttgacaacatggcttctcctttggcatgtttaattgtgatatttgacagacatccttgcagtttaagatgacacttttaaaataaattctctcctaatgatgacttgagccctgccactcaatgggagaatcagcagaacctgtaggatcttatttggaattgacattctctattgtaattttgttcctgtttatttttgggtttctttttgtttcactggaaaggaaagatgatgctcagttttaaacgttaaaagtgtacaagttgctttgttacaataaaactaaatgtgtacacaaaggatttgatgcttttctctcagcataggtatgcttactatgaccttccaagtttgacttgtataacatcactgtcaaactttgtcaccctaacttcgtattttttgatacgcacttttgcaggatgacctcagggctatgtggattgagtaatgggatttgaatcaatgtattaatatctccatagctgggaaacgtgggttcaatttgccattggtttctgaaaagtattcacatcatttgggataccagatagctcaatactctctgagtacattgtgcccttgatttttatctccaagtggcagtttttaaaattggccttttacctggatataaattaattgtgcctgccaccaccatccaacagacctggtgctctaatgccaagttatacacgggacagttgctggcatgtcttcattggctctctaaaatgtggccaagaagataggctctcagtaagaagtctgatggtgagcagtaactgtccctgctttctggtataaagctctcaaatgtgaccatgtgaatctgggtgggataatggactcagctctgtctgctcaatgccattgtgcagagaagcaccctaatgcataagctttttaatgctgtaaaatatagtcgctgaaattaaatgccactttttcagaggtgaattaatggacagtctggtgaacttcaaaagctttttgatgtataaaacttgataaatggaactattccatcaataggcaaaagtgtaacaacctatctagatggatagtatgtaatttctgcacaggtctctgtttagtaaatacatcactgtataccgatcaggaatcttgctccaataaaggaacataaagatttaaaaaaaaaaaaaaa

SEQ ID NO: 62092 - DNA, 3892 bp, Homo Sapiens
ggcgcagaagcgggacgtcggcttctaggggcccaggccggcggcggcgatggcctcggcagctgtggagagcttcgtgaccaagcaactggacctgctggagcttgagagagacgcggaggtggaggagcgcaggtcctggcaggagaacatctctctgaaagagctccagagccgaggcgtgtgtttgctgaagctgcaggtatccagccagcgcactgggctgtacggacggctgctggtcacctttgagcccaggcgatacgggtccgcggcagctcttcccagtaacagctttacttctggtgatatcgtgggcctgtacgatgctgctaatgagggcagtcagctggccactgggatcttgacccgggtcacccagaagtcggtcacggtggcctttgatgagtcccacgatttccagttgagcttggaccgagagaattcctacagactgttaaaacttgccaatgatgtcacttacaggcgactgaaaaaagccctgattgctctaaagaagtatcattctggcccagcctcctcactcatagaagtgctctttggcagatctgctcccagtcctgccagtgaaatacacccgctgacattcttcaacacctgcctggacacctcccagaaagaagcggtttcatttgcgctgtctcagaaagaacttgccatcatccatggacctcctggcactgggaaaaccacgactgtggttgagatcattcttcaagctgtgaaacaaggcttaaaggttctgtgctgcgccccctccaacatcgccgtggacaatctggtggagcgcctggctctgtgtaagcagcggattctgcgcctgggacaccctgcccgcctcctggagtccgttcagcagcactccctggatgcggttttagcgcggagcgacagtgcccagaatgttgcagatatcaggaaggacatcgaccaggtctttgtgaaaaacaaaaagacccaggataagagagagaaaagtaattttcgaaatgaaattaagctgttaagaaaagaactgaaggagagggaagaagcagctatgctcgagagcctcacttcggcaaacgtggtccttgcaacaaacacaggtgcgtctgccgatggccccctgaagttgctgcccgagagctacttcgacgtggtggtcattgacgagtgtgcccaggccctcgaggcgagctgctggatccccctgctgaaggccagaaagtgcatcctggcgggcgatcacaagcagctgccccccaccacagtctctcacaaggctgcgctggcaggactgtcactcagcctgatggaacgcctggctgaggagtacggcgcgagggtggtgcggacactgacggtgcagtaccgcatgcaccaggctatcatgcgctgggcctcagacaccatgtaccttgggcaggtcacagcccactcttccgtggcaaggcacctcctgagggacctcccaggtgtggctgccacagaagagacgggtgtgcccctgctcttggtggacaccgccggctgcgggctgtttgagctggaggaggaggacgaacagtcgaaagggaaccctggcgaagtccgcctcgtcagtttgcacatccaggctctggtggacgctggtgttccagcccgtgacattgctgtggtctcgccatacaacctccaggtggacctgctcagacagagccttgtgcacaggcaccctgagcttgaaatcaagtctgtcgatggcttccaaggccgagagaaggaggccgtgatactgtccttcgtcagatccaacaggaaaggtgaagttggttttcttgctgaggaccggaggatcaacgtggctgtcacccgtgcccgacgccacgtggcggtcatctgtgactcccgtactgtcaacaaccatgcatttttgaagaccctggtggagtatttcacacagcatggggaagtacgcacggcctttgagtatcttgacgatattgtcccagaaaactattcccatgagaactcccagggttccagccacgctgccaccaagccccagggacctgctacgtccaccaggaccggaagccagcggcaggagggaggccaggaggctgcagcacctgccagacagggccggaagaagccggctgggaagtctctggcctctgaagctccatctcagcccagcctcaacggaggcagcccagagggagtggagagccaagatggcgtggaccacttccgggccatgatagtggagttcatggccagcaagaagatgcagttggagtttcctccttccctcaattcccacgacaggctgcgggtccaccaaatagccgaggagcacgggctgaggcacgacagttccggggaagggaagaggaggttcatcactgtgagcaagagggccccgcgaccccgagcagccctgggacccccagcagggaccggtggcccagcccctctccagccagtgccccctacccctgcgcagacagagcagcctcccagggagcagcgtggcccagaccagcctgatctgaggacgctgcacctggagagactgcagagggtcaggagcgcgcaggggcagcccgccagcaaggagcagcaggcctcagggcagcagaaacttccagaaaagaaaaagaaaaaagccaaaggacatccggccacagatctgcccacggaggaggactttgaggccctggtttctgccgccgttaaggctgataacacctgcggctttgccaagtgcacagccggcgtcacaaccctgggccagttctgccagctctgcagccgccgctactgcctcagccaccacctgcccgagatccatggctgcggtgagagggctcgcgcccatgcccggcagagaatcagccgggaaggggtcctctatgccggcagcgggaccaagaacggatccctggacccagccaagagggcccagctgcagaggaggctggataagaagctgagtgagctcagcaaccagaggaccagccggaggaaggagagggggacgtgaccggccgcatccttgcacgccccgcggagctctctccatggtagcccagggcgctggcagaccatgctccgcctccaccagggccacagaggagcggaggggcctatgggggaggagcggagggccctgttggggaaggttgggtttttggaccccagggataagcttttccgatgtcacaatgtggaggaaagcacctgggggacaacagtgctcgtgcaggtggggcttgggaaatgcacgtcccttccccttactccccgccaaaacccacatcccagcctctggatcctggggaaggttccagtccctggagaatacccagggcctcaaacttgaagtcactcctccaatgtctgggacttgccagctcagcccgttaggatgagggtgctgagaggaaacaggaaacaagactgcgaatggcgctcaggcagggagcagggagtggcgtttggcttgcacgttcccatgtggccagatgctggggccactttccttctgtctgctggtgactgcagtgttccccctcctcctcaccacggggctcctgtgagtctggggggcacctctttctggcctgtgcacctctctctggcttataaaggtgcctggcctgtgccaacccctccttgttgcgcctcaccgtggggaccaggtgagccggctctcccacgtggttgtcccgggaaaagctgccccacagcctcagcatcttcagcacttaccgatccagagcctcccggccttctccggtgtcctgtaccaactcttctatttaagagaacctcagatgatgtacctgagcctcagggttttgtttcagagggatataaattatttaaaaattaaatgaaaacg

SEQ ID NO: 62093 - DNA, 5323 bp, Homo Sapiens
cggggctggaggcggtggctgcggttgcgggaccggcactatgctgggccttcctaccacttgtgtgtggcttggtagtggcctagggtctctcctccctgctgaagtccctctcctgcaggtggccgtctgcccggcccagcaccatgcacacgcttgtgttcttgagcacacggcaggtgctgcagtgccagccagctgcctgccaggccctgcccctgctgccacgcgaactcttccccctgctgttcaaggtggccttcatggacaagaagacagtggtactgcgcgagttggtacacacgtggcccttcccgctgctcagtttccagcagctgctacaggagtgtgcccactgcagccgtgccctcctgcaggagcggcctagcactgagagcatgcaggctgttatcctggggctgactgcccggctccacacctcagagcctggggccagcacacagcccctctgcaggaagcatgcgctgcgggtgctggacatgacgggcctcttggatgatggtgtggaacaggatcctggcaccatgagcatgtgggactgtactgctgccgtagctcgcacatgcattgcccagcagcagggtggggccgcagagcctgggccagcccccatccccgtggaggtgcgcgtggacctgcgggtgaaccgggcctcctatgcgttcctgcgggaggcactccgaagcagcgtgggcagcccgctgcggctctgctgccgggacctgcgagctgaggacctgcccatgcgcaacactgtggccctgctgcagcttctggatgcaggctgcctgcgccgcgtggacctgcgcttcaacaatctgggcctgcgcggcctgtctgtgatcatcccacacgtggcccgcttccagcacctggccagcctgcggctccactatgtgcatggggattcaaggcagccctccgtggatggcgaggacaacttccgctacttccttgcccagatgggccgcttcacctgtctgcgtgagctcagcatgggctcctctctcctttcagggaggctggaccagctgctcagcaccctgcagagccccctggagagcctggagttggccttctgtgctctgctgcctgaggacctacgcttcctggcacggagcccacatgctgcccacctcaagaagttggacctgagtggtaacgacctgtctggcagccagctggcacccttccagggtctgttgcaggcatcagcagccacactgttgcatctggagctgactgagtgtcagctcgcagacacccagctgttggccacactacccatcctgactcagtgcgccagtctccggtaccttggcctctatggcaacccactgtccatggcgggcctcaaggagctgctgcgggactcagtggcacaggctgagctgcgtactgtggtgcaccccttccctgtggactgctatgagggcttgccctggccgccgcctgcctctgtcctgctggaggcctccatcaatgaggagaagtttgcccgcgtagaagctgagttgcaccagctgcttctagcctcaggccgtgcccatgtgctctggaccacggacatctacgggcgactggctgcggactacttcagcctatgatgaagtagctctgggtgagacacaggccgccctgcagtctctttaggtaggcagggcctttgctgggacccctggtggaggccttcacaaaagcactggttactggtttcctgctgggtctaccttgcttctgggcacacctcaagcctcccctgctttctgcagtgccccacgcggttttccctgcacttgctccataattggctgatcatctgtgggccccggggctggatgtcaggcctccattgccctgctcagtttggctgcatttggctgccgtctggggtcctggtcctttgtgcaaatgctttgggattccagttgtgagctgagagagatgatggcctctctgggcctttcctctccctttactgagagctcagtgcttctggggttgaagttggacagaggcctgcttcagggaagctgggagtccccaggcactcacgcctcttacgtgttccctaccctgccacccagccaccccactgggctgggctcgggctggagggggtcatcaaggtacacatgtgcctggaagttgaatttgtggctgtttttttttctgtccacgttggtcacccttatccttatctctgctgtcacccccaacatggccaccgggcaacaactgccatccagcctgtcgccccgcccttcgcggggcagccccgtcggcactgccggccagtccttgctcttcccacctttcggaggcccaagatcctactgtggccggccagggccagcgagggaccccccccatgcagagctggaggttggggtgatgtcttttcggaagagcttcaagggaggtgttggggcctccccggccaccttccattgctaccccaggattcccgagtgcaacgttcccggctcgcgccccacacacggctcagcgcacactgcgcggcttccacctttactgacggagcatgcgcgaggccgcaccggccaatctccggcgcccacgtcatccgcgcgcccgcggccctagcagtggatctcgtaggcgaccggcgggggcacgcggagtcccggccccgccccctgttccgggccgcagtcagcgggcgcctccgccggaccctcggcgaagagcggcttggagcggttgatgacgaacatctcgtggccgcgctcgtcgcggagctcctctagctgtgcgaacgtacaggggccgtccaagtagtcgttgacgaacagcgctccctcccccggaggcccccgcgccttttttcgcctgcggcgccggcgacagatcatggcgaccaggagcagcgccgtgagcgccagcagcgcgatggccgccgcaatggccgtctgtgtggccacgcccagggcgcggaaggccatgctgcccgcctcgggccggggctcgctgccggcggggcgggcggccggaggcggcggttgcgcgggctgctgcggctgctgccgggacgcgttgaccaggagccggaagggcacgcgggcagcgccgccggcgttggaggcctcgcactcgtacttaccggcgtgcgccagcgtgatgttgctgaggaagagcatgccgctgcccgtgtcggatgccgagtgtccgcccaggcccagcaacccgccttctagctgggcctgggctcgcggccggccctcgcgaggctggggcacctttctccaggtcaccaatggctgcgggtagccggaggcttggcaggcaacccgcaggtcctcacccaggttggctgtgagctccagcggctgcacgtggacagagggcggaatgcagatgaggctgctgtgggatacgtccaggagactctggagcgccaggcgcgggggctctgcacacatgatcttcctgtccctggaggtgagcagccgctggccgccctccttgatccaggcccccagccagtgcagggcgcagtcacagcgccatgggttctctgtgggagagcagcgttaggcaggtggcttgagggtgctgctaaaacagcctgtgcagttggggttttgcaggccaggacagaggcctctttcccacctcccacagcgttttcacacggagtccaaggccctgccaccccttccttgaccccaagctccttggggcggcaggcccttcaccctcgcccccctcccctttagctctgtgatgcctgcctgttacagatcacttctccgtcggtctctgagaaagcacctgctccttaagtcttcctgcaacaagtgccactgtttttaggaacctgggcgtccacatagacatctcaccagcactgaaacctcacaagtcctctcagctttgcctttggatgccctctcttgggaatgtccccagtcctggtcagctgtctctctcctttgcaattttgtctgcctcccctcagcctaaaagtgtgcagaaccctcaattctgttaagtcaccctgtggagttcctgtcttctgttttccccaggcagggtgcctgagctgtatcccccagcacacccactcccgcagccctccagtgtggctgcaggcggtggtgcagccttccagactgctgcccagttgcctgatgtcagagcccctccacacatgagcctgctccctactgccaacaccgtggcccagacagagacgctttccgaggaagaggtacctgtgaggcgcaggacttgcagactggccaggggctgcagggcctctcggctgatggtgcccagctggttcctgctgaggtccagcagtgctagggaggacagccccgctagagcctggtcctccagcagctcaatgctgttttcttgcaggtgaagctcctgcagtcgctgaagtaaggacagcagatcgtgaggaaaaagggcgccgaggttgggggcatgtctctcttcttaccaagctagactgggttgccttttctaactattccagccctacagggcgaggggccataatggagtatcccgcccctttagaccccaggcgctcaccggcaggtgcaagaaggtgaaatccagcagccgcgccagctggttgcccgccaggtagagcacgcgcagctgggccaggcctacgaaggcgccgctgcgcaagccgcgcagccggttgctagtgagcgccagctccagcaggcgcggctgcgcgcggaaggcgccggcctccagggcgcgcaggctgttgttgtgcaggtagagccggcgcagagcggcgagtggcgccagggctcccggctctaggcgggcgatgttgttgtcctgcaggaacagtgtctgcaggccggggaaagaggaggcgcttaccccgctgcgggggtcttcctctccctgggggcaccccgtcctcccgcagctccacacggtgcccacctgcgtccctggcgggattcccagcgggacgacgcgcaaccgcagggcgccacactccaccgtggcgctgtagcagcggcaggctgctgggcagccggcggcgcggagcggcagtagtagcagcagcagcggcagcagttcgggggccctcagggccatctcccgaggcccggttcctcaccggcccttccgcggttcagccgcagacgcgtgccctcctgaaacacaggttggcaggccagtctcggcagtcgagagccagccaatagatggaatggaggcctgcacctgcgtctaacttttgacactataaataggttcaagaaactaataaaacgttctggttttctcctttgac

SEQ ID NO: 62094 - DNA, 1008 bp, Homo Sapiens
ctggagtgaggccctcggatcggccccgccggggtcggcccacggccctggcggagcgctgagaacgcgggtccacgcgtgtgatcgtccgtgcgtctagcctttgcccacgcagctttcagtcatggcctccggtaacgcgcgcatcggaaagccagcccctgacttcaaggccacagcggtggttgatggcgccttcaaagaggtgaagctgtcggactacaaagggaagtacgtggtcctctttttctaccctctggacttcacttttgtgtgccccaccgagatcatcgcgttcagcaaccgtgcagaggacttccgcaagctgggctgtgaagtgctgggcgtctcggtggactctcagttcaaccacctggcttggatcaacaccccccggaaagagggaggattggggcccctgaacatccccctgcttggtgacgtgaccagacgcttgtctgaggattacggcgtgctgaaaacagatgagggcattgcctacaggggcctctttatcatcgatggcaagggtgtccttcgccagatcactgttaatgatttgcctgtgggacgctccgtggatgaggctctgcggctggtccaggccttccagtacacagacgagcatggggaagtttgtcccgctggctggaagcctggcagtgacacgattaagcccaacgtggatgacagcaaggaatatttctccaaacacaattaggctggctaacggatagtgagcttgtgcccctgcctaggtgcctgtgctgggtgtccacctgtgcccccacctgggtgccctatgctgacccaggaaagggcagacctgcccctccaaactccacaagtatgggaccctggaggggtagggcaagggccttctcaatgcctccacctagaagttgaattgtgaggcctcccccaagcccaacccaggcggacaaaaggcctagaggtaacaataaagtattagggaaaggaaaaaaaaaaaaaaaaaaaaaaaaaaaa

SEQ ID NO: 62095 - DNA, 52173 bp, Homo Sapiens
gaattcaagaccagcctggccaacatgacaaaaccctgtatttaccaaaaatacaaaaaaaaaaaaaatagctgggagtgatggtgcatgcctgtaatcccagctatttgggaagctgaggcaggagaatcgctcaaacctgggagatggaggttgcggtgagccaagatcgtgccactgcactccattctgggcgacagagtgagactgggtctcaaaaaaagaggccgggcgcggtggctcatgcctgtaatcccagcactttgggaggccgaggcgggcggatgacaaggtcaagagatcaagaccatcctggccaacatgatgaaaccccatctctactaaaaatacaaaaattagctgggcgtggtggtgcacaactgtagtcccagcggctgaggcagaagaatcgcttgaatccaggaggcggaagttgcagtgggtggagatcacaccactgcactccagcctggtgacagagcgagattctgtctcaaaaaaaaaaaaaaaagaaagaaagaaagaaaaagaaataaaataataatgggagaggattgcgagggatataaacaaaattagtcagaagttgataccttcaattgttgaagttggtagctgtgaatgtaagatttactatactggccgagcgcagtggctcacacctgtaatcccagcactttgggagtctgaggcaggcagatcacctgaggtcaggagttcaagaccagactggccaacatatagtgaaaccccgtctctactaaaaatacaaaaattagctgggcgtagtggcgcacgcctgcagtcccagctacctgggaagctgaggcaggagaatcgcttgaacccaggaggaggaggttagagtgagctgagatcatgccactgcactccagcctgggcgacagagcgagactccatctctcaaaaacaaacaaaccaaaaagatttactatactcatttttctactttcgtacatttttgaaatttccaataataaaatgctcaaagcactgtctctgagctggattactgcaattacctcttaccacgccacccttcttttacccttgcccactatggtctggtctccccaccactgctagaacgatcagtgtaagacgtaattccgatcacattcctcctctactgagaaccctaccatggatccccgttgccttctgcgtaaaagccaatctccctacaacggcctacaaggccctgtaccatcgggttccccatcccttcctctccaactgtgctcccctccctcactctgctccagctatagtgacctccgtgctattcctctaatgtgccaggagagcccattcattctcagatcacagaaacagtatgacgataggcagatgttgtcttgcaaaacgagcaaacaggcatatgaaatcagatacctagctgccaaactatatgtgaggcatttccgaagaatttaacgacctcgatagagcgcagtcaagtttggtgaacagaatatgtctctgaactagaggagtcctcacacaaggagtagggtcagaccccgcagtggaggaggagggaggagtagaaacagtccagctcgccgcccaagtaacctgggtcctgaatcggcccgccttggccagtgctccagaagcgcggagcaggaacgggctggggcccaaaaaagaggggggagcctgaacgtccgggggaagtttcggaggcggcggaacgcccacggatggaaccctgtctttggggaaaaggaccacacctgtcagcagagtccgtcagacgtgagaagggtgggagcggcggactgtgaacgctggtagggccccggcgctccgagaaagtcccagtttcgcggtcgcccttccctaccacgcttccggcttccggtgtcatagctgtgggatccggaagtaaaaacacaagccccgcccccgagaactcgggaagccggcgagaagtgtgaggccgcggtagggccgcatcccgctccggagagaagtctgagtccgccaggctctgcaggcccgcggaagctcggtaatgataagcacgccggccactttgcagggcgtcaccgcctacacgccccctcgtctctcggacggcggcgtctagcctcggggcgctcggccgccccgccctctccgggggaggaatcaagaagagactgcccaatagggccggcttgacccgcgaacaggcgagggttcccgggggagtggcgcggcagaaggccccgcccaggagccgagggacagcccagaggaggcgtggccacgctgccggcggaagtggagccctccgcgagcgcgcgaggccgccggggcaggcggggaaaccggacagtaggggcggggccgggccggcgatggggatgcgggagcactacgcggagctgcacccgtgcccgccggaattggggatgcagagcagcggcagcgggtatggcaggcagccggcgggccggcctccagcgcaggtgcccgagaggcaggggctggcctgggatgcgcgcgcacctgccctcgccccgccccgcccgcacgaggggtggtggccgaggccccgccccgcacgcctcgcctgaggcgggtccgctcagcccaggcgcccgcccccgcccccgccgattaaatgggccggcggggctcagcccccggaaacggtcgtacacttcggggctgcgagcgcggagggcgacgacgacgaagcgcaggtaaccggccgggcgggcgccgcgcaggcggaggagcgtactgtcccgcgctgcgccgcgcggcggtaaaatacacgctgtttgttgtgcttgagaaccgagcagaatcgagagggtcttaaccaatccctttataccccgcacctcctctcttgagcccctgagaccccgagagcgaaggggacttgccgaccggggtcacccagcttggcaaggggagggctggagctgaactccagcatctgcaccatctcccatgctccaggtcattgtggagttcccgctacagtcgggaatgagatggtcctgggcacgcagttccatgccccacaaggattttactcggttgtccagaattgatgctgtagtcggaatacaccaatgctttgagtaattttgtaatgtacaccctgaatgaaggctgcctaggagagagtggctggagcccagagccagcagtttctaacccatcaaccactccccaatgcccagccgttcacaaggagtgatttgggcaatcaggtgtcaccctggtgtgagaccccagaggaactctcaagaaaggggctaacttctcaatgctctcctgttcttctgccttgttaacgagcctttcttccaccagacagcgtcatggcagagcaggtggccctgagccggacccaggtgtgcgggatcctgcgggaagagcttttccagggcgatgccttccatcagtcggatacacacatattcatcatcatgggtgcatcggtgagtatctcccaggccccaatcttaaaagccaggaagtgcctgctccatgcctcagcttttccaactaattgttgcagggccccacaggctctgctaagttgagctcctcctcccgctcctgctagtgcgccaggatcatcccggctctacctggtgtgcatatgcacttgcaagacttttttttttttttttttttggagacggagttttgctctggtcgcccaggatggggtgcagtggcgccatcttggctcactgcaacctcggcctcctgggttcaagcgattctcctgcctcagccccccaagtagctgagattacaggcatgcaccaccacacccggctaatttttgtattgttagtagagacggagtttcaccatgttgaccaggctggtctcaaactcctgacctcaagtgatccgcccgcctcggcctcccaaagtgctgggatgacaggcatgagccaccacgcccggctgcaggacgtttctgaaccctgtgcctagccgctgaatgtagcccttaatcctggagttgcaggctctttagggactgtctagatggacttcttggggaaaacagggaatgctattcattctgtagttttttcagacctgttcatgccttaacaaatgagttccaaaggcaggatctgaggcctgatctctgcctcttcactaacacttcaagttccgtcgatacaaacacttagcttttctttgaacactgtctctttgcctcaatttcgaaagcctaccaaggagctctgcctcaccccacctggccccaattgtccagcttgtagaaccgccattctgcactcataggaaagacaaaagaatagtatagcatgaggatttccatgggaggggagggaggggtggtcctaggacagccatcgcccgagactagagcaccctcccctgtgtcccatggggcagtgagactgtgcaggggctggtggaacaagggcttcatctcaaattacacgtggtctcagttttcacttttaaccctggatgcactcaagaatctctctgctcattactgtatgaccatctttgccattaacttaccttgtaaccttgagcaggagctctatcaaaactagttagttcttccacatcgtgcgcccctcagtgctggctgagctcagtggttctttgttcacatagaacaacgcgctgtcacactttgtcaaacctactccttgacacctttgtacttctgatcagaacttagaaaaggagagccaaaagggaatgaggaggcagccgagggagaagggctctgccagtggcagagtaaggaggggccattgtcctctgactccccataagcctgagacccaggagaggtaccaggtggagcccacagtagattgggcttggcctcagccccagccccagcctggtcccctcagaagagccatacctggccgggcacggtggctcacgcctgtattcccagcactttgggaggccgaggcaggtggatcgcctgaggtcaggagtttgacaccagcctggccaacatggcgaaacccagtctctacttaaaatacaaaaattggctgggcgcagtggctcacatctgtaatcccagcactttggggggccaaggtgggcagatcacaaggtcaagagatcgagaccatcctggccaacatggtgaaaccccatctctactaaaaatacaaaaattagctgggcgtggtggtgcgtgcctgtagtcccagctactcagtaggctgaggcagtagaatcgcttgaatcagggagtcagaggttgcagtgagctgagatcgcgccactgcactccagcctggcgacagagcgagactctgtctcaaaacaaaacaaaacaaaaaggccgggcgcagtggctcacgtctgtaatcccagcactttgggaggctgaagcgggtggatcatgaggtcaggagattgagaccatcctggctaacatggtgaaatcccgtctctactaaataaaaaattagccaggcctggtgtgggcacctgtagtccagctactcaggaggctgaggcaggagaaaggcgtgaactcgggaggcggagcttgcagtgagcagaaatcgcaacactgcattccagcctgggtgacagagtgagactccatctcaaaaaaaaaaaaaaaataacaaaaattagttaggtgtagtggcacccatctgtaatcccagctacttgggaggctgaggcaggaaaatcgcttgaacccaggaggtggaggttgcagtgagctgagatggcaccattgcactccatcctgggtgacggagtgagtgagactccatctcaaaaaaataaaaataaaaagagccatacctgcatcagccacaaaccttaacagccaggactctgaccgttaaacccttagtccaagaagcagactggaggagaaggtaactgaggttgctttctccatccccaccccatgctgtcacaaggcactgcaacagagcaacccaggccacaatgatagcttatgactcctggccttcagctcttattagacacctcattgagagcatccaagcttgctgtgtgagttggagcaagtgtcttccttttcctgaacctcagcatttcgtgtagcaaatgacagcttttgaaacgagggcccagggtccttaggtttttccaagctgattttgtcatttcactgcctccgcctgtggccagcttcgggttgggcaactttgttttgttgaaatcagtagggttcccctttgctctcctctgttctgagagtgacaacctgaggctttcaaagcagaaataggaagtgccagctccagcactgtgggtaggggacaaggggtcctctctctgaagagcctcgtggtttgttttttcctcttcctgctgtgggggagatgggaggtggcgtgctcaggcagcacctggaacagctccggctcccaggcttcttccacgcctgatgcctcactcggtgcgggaggtaggcagggtggcacttgagggcacgtgatcctagaatctgctgttccaggaaagcagcccattctccgttcattgagcagacagcgattgggtacttctgggccacagcagccagtccctgccctcctcatgggacctatgtgctattgcggccagggaaccacggcaagtaagcagaccagcaagagttcaggctgacgtgtgtttcagaagatacacatgggccctgtgtccccagtcccccaaagcgcatagatcccacaaagagggccgggagagcacaaacacagaaggaagagcaaatgcccggagccccgagttgggaacaagctcagcatgacctagaaactgaaagcaggcaagtggctggcagacccacagcctgggcaagcaggacaccctggggcaggctggacccacgtggccttcctctgtcccttcctcctccctggccagcttacctcacacttgcccacacacccagcttccttcctgggggccctgatggcacctcagagttaccaagtgggccacttcctgccttctcaggactcccacccctaccagaaagggagccgaggtacttactgcccccttccagaaagctctggccttgtagactagtgtgcgcctggaacagcatctttccccacctgatgggacctcgatgatgctggagagcttcacagggagtgaggggaagagactgggattgatagtctgcggggtcctcacttctctgggccttagtttccccacctggatcacaagggccatgggcttgatgggcgttcaggacgcatcccaatgatgggcctgtgggagggatgacccagcggcccccgcctcccctttcctcagaacatttctgggctgacttccccattggtctgataagattcttgctgtgtcatgatgatgttggcactcccccaaagccccggtgactcatgagcccccgggtatagcagggaggcccttttgttggtttttcagctgaactaactcagcagcccccaggttctctggccccagtggccaggaaccagctgggcccctgccaaggcccagggctccacccagggagtctgggcaggtccttaaccccagtgacccttggggatgggatggcccacccccgctggccctccagcaggcatcgtgctctaccatgaaaccctcatgccaagacaagggctgcagcgatttcggtttataaaacagacaggtcatggcccaggtccctttgccctggcctagccagatgttggtggctagagatcttcatcatgccctgcttctactaagtcaccttgtgtccttgggcagatccctcccctgctgtggtcctcaggaaagaggagggcgtggggaagatgagaagctcccaactgcttttcactaaggaccccttgaattgcccccacccacatggcacgagtagactcttgaccaagctgtcaggtttcccgatgtcttcccatgtttgttcctccagaaagtcccactagagcatcgcagccagctgggagggcagggctacccctgagtcctgaggagagcagctcagtccggctcagctcagcttagctccctgtcaccatgggagagagcggcctgccttaccccacccctactgtccgtcttacctcacctcgcctctcaggtgacttggagcccagcagacggtcggtcggttgcagggcctgagctgaaacaaggtgagccggttcaatctctagttaatcccaaagggagcagcaggaacaaacggcctggagcgtggggttgctgtgactcagcagaccagtcccctgccaccagtacctttctggagtctgtcccgatgcctcccagtcttccggaatttggtcatgagcaaacatgacctgctttgagtgaggcttagaggtatttgcaggctgtggttctttccgtttatttcagggtccagttagttcccagtaagctgaccctttctgtgtggggccagccgtgagttgatgtgacatgggcaacgttcccctccccagccccactgatggcaggtgctgtgaggagctgagtagaggagctcctaccccagggcgaggggttgtctgctggactttgaagggtgcagcagtgagaggtccgtgtcgctgtagtcctggcaccgagctcacctgaggagcatcagaagtggagcagggcccctgaagagcgcaagcacacaaggcacccacaccatagcagttgccctcctggaagccctgtggtggcttcctaactgcctggctctgggtgagggcgtttgacctggtggcatggcccccattctgtaatggtttgtagaaatggacccatccatggttgcagtgcctgattgcttcgaagagcatgtgtttttttttttttttttcgtgacatggagtcttgctgtcacccaggctggagtttggtggcgcaatcttggctcactgcaacctccgtctcctggattcaagtgattctcctgccttagcctcctgagtagctgggattccaggtgcctgccaccacatccagctaatttttgttttttcttttttttgagatggagtcttgctctttcaccaggctggagtacagtggcgcaatcttggctcactgcaatctccacctgcgaggttcaagcaattcccctgcctcagcctcccgagtagctgggactacaggcgcgcaccaccacatccagctaattttttgtattttagtagaaacggggtctcaccatgttggccaggatggtctcaatctcctgacctcgtgatccacccacctcaacctcccaaagtgctaggattacaggcatgagccaccgcgcctggcctgtatttttagtagagacggggtttcaccatgtttgccaggctggtctcgaactcctgacctcaggtgatccaccctcctcagcctcccaaagtgctggggttacaggcatgagccaccacgcccagactattagtttttaccatgttttattgaaatatatgtcatgggccggccacggtggctcacgcctgtaatgccagcactttgggaggccacggcaggtggatcacaaggtcaggagtttgaggccagcctggccaacatggcgaaaccccatctctagtaaaaatacaaaaattagccgggcgtggtggcaggtgcctggagtcccagctactcaggaggctgaggcaggagaatggcttgaacccaggaggtggagatttcagtgagccaagatcacgccactgcactccagcctggccgacagagtgagactccgtctcaaaaaaaaaaagaaatacatgtcatgaagaacacagatggtgcaggtctagcttgttgatgacttttcacaaactcagcacagccacagaaactgctcctagatcaagaaacagaatatgctctgcacccaggaagccccctcacctggggctctcacagtcactggccctcaaagggtcatttctgacccactccccaccctccgctccattgttggttttctcgccgtcttttgttggtgcgcaaatcttaactgtacaattggctgtacaccctcatcacaataaaggccatcgtcatctccccagaaagttcctgggtacccattcccagccaatctgccctgctccaggcaaccgctgatctgatttctgtcacaatgggttgcatctctgatgctgagatttcccagtgttgctgagtagtatccgttgtatgaatgcacagtttgccgggtcacatgttaattcaagtgtttgacttgtttccagtttggggccgctatgaaccaaggctgctgtgaccattcgtgtgcaggtctttgtgtggacttgcactttcatttctcttggggtggaacggccaggtcacaggataggtgtgtgtttcacttgatcagagggagcacccgcaccacctcacagctcaacttcagccattttcattttcttgccttactgcacttttcttgttcctgattgcttaaagggatgattaatatttcagcatttcctataagtgtgatatttgtagtatttgtaaggatgatggtttgggggtttttttgttctttgttttttggtggtggtttttttttttgagacgacgtctagctctgttgctcaggctacagtggtgtgatctcggctcactccagtctctccctcctggttcaagcgattctcctgcctcagtctcctgaatagctgggattacaggcatacaccaccatgttcagctaagttttgtatttttagtagaaatggggtttcaccatgttggtcaggctggtctcaaactcctgacctcaagcgattccccgcctcggcctcccaaagtgctgggattacaggcttgagccaccacgcccagccagaatggtgttttatagatgccctttatcaagttagtgaagttcccttgcattccccctctgctaagagttttagcgtgaataggtgatttctgaaacacttgatctacatctgttgggttgagcaagattgctagatttaaaaaatcaaaacatagcagtaggcagagagttcttagaggttttttttaatctcttaatatggtgaatttcaatgatttttttctgttaatatcaaaccaactttttatttacagatgtatttattctgtaaataaaaaacctaccgtttttaacattgcaggatttggtttgctgatgttttcttctttttttttaaagagacagggtcagtgggtcgtcgtggctcacgcctgtaatcccaacactttgggaggctgaggcgggcagatcacttgagcccaggagttcaagagcagcctggacaacatggggaaaccctgtctctacaaaaaatacaaaaaattagctgggtgtgttggcatgtacctgtagtcccagctactccagaggctgaggtgggaggattgcttgagcccagaggcagaggttgcagtgaactgagatcgtgccactgcactccagcctaggtgacagagtgagaccatgtctttaaaaaaaaaaaaaaaaaaaaacctcctgatttcaagcaatcttcctcccaccttggtctcccaaagtgctggggtgtgtgagttgtgcccggcctgctgatatttcgtgtgggatttctgcatctgcatgtgtgtgtgaatgaggcgtatgggttttcccatgtgcctttctcatcaggtttccgtaccaaggctctgtaggccccataaggtggcttgggaagtgttcccctttcttccttctgcaggaagagtttgcttcaggctggaattctcttgtgcttgcattttggtagaacccactggcaacactctctatgccagggggttgtttctgtaggaagatttgtggccactgtcccctctcaggtccattgctctgttttttgtttgtttgagacggagtttcgcttttgtagcccaggctggagtgcagtggcttgatcttggctcactgcaacctccgcctcccaggttcaagcgattctcctgcctcagcctcctgagtagctgggattacaggcatgggccaccatgcccagccaattttgtatttttagtagaaacggtttctccatgttggtcaggctggtcttgaactcccgaactcaggtaatccatccgcctcggccttccaaagtgctgggattataggcttgagccaccgcgtccagctgtttagttgtttttttgttttttgttttttgagacggagtttcactcttgtcgcccaggctggggtgcaatggtgcaatcttggctcactgcaacctccatctcccgggttcaagtgattctcctacctcagccttccgagtagctgggactacagacacccgccaccacgcctggctaattttttgtatttttggtagaggcggggtttcaccgtgtcagccaggatggtctcgatctcctgacctcttgatccgcctgcctcggcctctcaaagtgctgggattacaggagtaagccactgtgcccggcctatgcccttttaaaaaagcaaccatgccagggggttgtctgtttctattcgtctttttcaaacaccaatttccagctttgttcatcttttctttgggttagcttttaattttattaattttacttgtcattatttcctattttcttcctggtaatttggcttgcagttctatctttttctcactttttttttggagatgaagtctcactcttgtcacccaggctggagtgcagtggcacgatctcggctcactgcaacctctgcctcccggattcaagtgattctcctgcctcagcctcctgagtaactgggattacaggtgcctgccaccacacctggctaatttttgtatttttaatagagatggggttttgccacattggctggtcttgaactcctgacttcaggtgatctgcctgcctcagcctcccaaagtgctgggattacaggtgtgagccaccgcatctggccctttttctcacttcttaagtggaatgcttagcttcttatttttgaaccactcttttttgctaatgtaagcacttgaggtcacgtctcacaaatgtggctacatgatacttctgtcgtcccttggttctactgaattgaattttcaggttttctcctggaacgcaggagatgcgtttatgtcttctgggtcagggatggagggctggcacaggcttgaatctcggggctcttctgtctgtgtatcaggcaagacagacatgcttgtggcccagtagtgatcctgagtagtgcccagatcaccaagggtggaggatgatgtatgtaggtcgtgtccccagccacttctaaccacacacctgttccctctgccacagggtgacctggccaagaagaagatctaccccaccatctggtaagtgtgtcccaccactgcccctgtgacctcccgccagggacaggcctggtcctgccctgcccgcactggttacagctgtgccctgccctcaggtggctgttccgggatggccttctgcccgaaaacaccttcatcatgggctatgcccgttcccgcctcacagtggctgacatccgcaaacagagtgagcccttcttcaaggtgggtggtgtcagggcctcccccagcctggttctgccctctctaccagcccccagcatggccagcttcggggacctccccccatcccatcccgggatgctctcctcctctcctgccccgccccgcctgctctcgtacttcttgagacccccattaccagcccccgtgaccaggacccacaggtccctcctgctgtgctctgctgcgttttctccgccaatcatagttgggtgtcatgattttggagagagagctttctccagtgtatttctcccaggtcaaaatatcctgaaatctggcctctgtcctaaggcacaggggtcccagcctggggcagtgtctgtgctgcctgctttggcctccctccctctggatgtgcagagctgctaagatggggctgaacccagtgtgggacggggacactgacttctgagggcaccctccctggacctccagggaagaccctccactcccctggggcagaacacacacggactcaaagagaggggctgacatctgtctgtgtgtctgtctgtccgtgtctcccaggccaccccagaggagaagctcaagctggaggacttctttgcccgcaactcctatgtggctggccagtacgatgatgcagcctcctaccagcgcctcaacagccacatggatgccctccacctggggtcacaggccaaccgcctcttctacctggccttgcccccgaccgtctacgaggccgtcaccaagaacattcacgagtcctgcatgagccagatgtaaggcttgccgttgccctcccttcccgcctgccaggctggcccaggcagtgctcccaccactctatgagcgtgtccggggccggggatctgggcagcatccatggtgccggggccatccccagcgggaccacaaggtggcagcgttgctccacgaaacaccgcctttccgctctgcttccccaaaggcccggccaggccgcagggtggcagccttgctctgcgaatgcagcatggcccgcgctgggtggtttcccaacccagccagaggctcttgtcctctggctggttttgaatgcgggggtagtaaagcaaaggtcctcttctcattttcaaaaccaatgaggaagccatggcttggatgcctcctccccctgctcccctacaggccttcaggccactcagacccaccggggacccagcatgaggcaggaggggaacgggcccccggcagcatgccagcaatgccaccctggcacccagggtgggaaggcttcccggaaggtgttgagccagagggtcatctgggaacacaaggcacgggaggtggccacgggggcgaggaggttctggcctctactcccctgggagggcgtctgaatgatgcagctgtgatcctcactccccgaagaggggttcaagggggtaacgcagctccgggctcccagcagaggctggaaccgcatcatcgtggagaagcccttcgggagggacctgcagagctctgaccggctgtccaaccacatctcctccctgttccgtgaggaccagatctaccgcatcgaccactacctgggcaaggagatggtgcagaacctcatggtgctgaggtggggccaagcctgggccgggggaccagggtgggggtggtactcaggagcctcacctggcccactgcctccccgaggacgaattcctccagaactcagacaagggtgacccctcacatgtggcccctgcaccacagaggcccaaggtcagttcctccaccttgcccctccctgcagatttgccaacaggatcttcggccccatctggaaccgggacaacatcgcctgcgttatcctcaccttcaaggagccctttggcactgagggtcgcgggggctatttcgatgaatttgggatcatccggtgagagctcttcctctctcctgggaggctggcacagggtggcagagccagtcaccctgcagggctactcttccctatcttgggggagctcctcctcaccctgcagttcaaaacctaagtgtctgagctatcagaccgggctggaaagggctggacccctacacagccaagcactccacggttttatgattcagtgatagcatcaccatgtccttccttgatttaaggggacctggaagacaagggggatcaggaagtgagtcttgcagcttgtcactaggaagccttgtttggggtccccatgcccttgaaccaggtgaacagggcggggagctaaggcgagctctggcctcttccgtccccagggacgtgatgcagaaccacctactgcagatgctgtgtctggtggccatggagaagcccgcctccaccaactcagatgacgtccgtgatgagaaggtagggggtgcaccccagtccccaggagcatgccctgtcgcaggcccatctgtgacgaggcactgagctggggtgtgcatgcagagcaggtgtcctcaaccccggagaagtcaccacctctgagcacagcgtggcctcccggaggtgacctggactggcagtcatgaagcccaagttgtcatgtcccaggcctgacagtcactatgtgaccagggaaggccattgcctctctgggcctcagcttgttcatcagaatagactcgagatggaccagggtggtcctggagggtcctcagggaggggccctgagctgggcctctggcagggtgagcagagccaagcaggggcctcctcctgccctgagggctgcacatctgtggccacagtcatccctgcaccccaactcaacacccaaggagcccattctctcccttggctttctctcaggtcaaggtgttgaaatgcatctcagaggtgcaggccaacaatgtggtcctgggccagtacgtggggaaccccgatggagagggcgaggccaccaaagggtacctggacgaccccacggtgccccgcgggtccaccaccgccacttttgcagccgtcgtcctctatgtggagaatgagaggtgggatggtaggtgatgccttcgaggcccagcaaggcagaactgggcatgccctgtgtgcgggcactggagctcccactgagacactcacgcactggtccacaccctgagagagctggtgctgaggctgccctttccgccacgtaggggtgcccttcatcctgcgctgcggcaaggccctgaacgagcgcaaggccgaggtgaggctgcagttccatgatgtggccggcgacatcttccaccagcagtgcaagcgcaacgagctggtgatccgcgtgcagcccaacgaggccgtgtacaccaagatgatgaccaagaagccgggcatgttcttcaaccccgaggagtcggagctggacctgacctacggcaacagatacaaggtgccctacagagaaggagcagtgtggagggtgggcggcctgggcccgggggactccacatggtggcaggcagtggcatcagcaagacactctctccctcacagaacgtgaagctccctgacgcctacgagcgcctcatcctggacgtcttctgcgggagccagatgcacttcgtgcgcaggtgaggcccagctgccggcccctgcatacctgtgggctatggggtggcctttgccctccctccctgtgtgccaccggcctcccaagccatactatgtcccctcagcgacgagctccgtgaggcctggcgtattttcaccccactgctgcaccagattgagctggagaagcccaagcccatcccctatatttatggcaggtgaggaaagggtgggggctggggacagagcccagcgggcaggggcggggtgagggtggagctacctcatgcctctcctccacccgtcactctccagccgaggccccacggaggcagacgagctgatgaagagagtgggtttccagtatgagggcacctacaagtgggtgaacccccacaagctctgagccctgggcacccacctccacccccgccacggccaccctccttcccgccgcccgaccccgagtcgggaggactccgggaccattgacctcagctgcacattcctggccccgggctctggccaccctggcccgcccctcgctgctgctactacccgagcccagctacattcctcagctgccaagcactcgagaccatcctggcccctccagaccctgcctgagcccaggagctgagtcacctcctccactcactccagcccaacagaaggaaggaggagggcgcccattcgtctgtcccagagcttattggccactgggtctcactcctgagtggggccagggtgggagggagggacaagggggaggaaaggggcgagcacccacgtgagagaatctgcctgtggccttgcccgccagcctcagtgccacttgacattccttgtcaccagcaacatctcgagccccctggatgtcccctgtcccaccaactctgcactccatggccaccccgtgccacccgtaggcagcctctctgctataagaaaagcagacgcagcagctgggacccctcccaacctcaatgccctgccattaaatccgcaaacagcccctcctgtccccttgtcatttgcttccctgaggacccacttccttgtcccactccccaagtcacccgggtgcttcctctgtggccactgaggagcctcctcacttctggttctgaccccatgtccagccatgaccatgtttggtgtcagagacacctcctgagtcctcctccgctccacgcatattgtcattgtgagaccagcttgaggtgcaaggatgtggggtcaccttccgctcttactgtccatgtccctgccccacccaagatgacttccagcaacactgccagtccacagaagtatttaggaaggagaggggatgggttttgtgactgatgtcagaggccaagggagaggggacagtccacagtgatgcacagccaggcccagccaccccttccaggcagaagggccacacactgggcagctctcaacataggctgattctcccagttctggaggccagagtccaagatccagcactcccgccagaggcccaaggggagggtccttcctgccctctccagctcctggggaaccaggcatcttgggctggtggtcacctcactccactcactctgcctgtcttctcgtggcctccccatggtgtgacttctatgtcctaactcagcgacatctgcagacctcctatttccaaataaggccacatcaggaactcccaggagacatgtatttgggggccgctgttcagcccctgcactgctccccacacagcccctgggtgtttcagtgcagcatgtgtcctgccagggagatggcgaaaccagacactatggtccctgcacttgtggcccgggttctaggaggtgaggccggcagggaacaaaataaccaggtggtgctgggatttgtcctttgcggagagcaaaccagtggcctggaaagtggccagggaggagtgttccacccgcagcacaggtgaggacgcgcaccctgggcgctgcaggtagcagggcccgatgtcgtagaacgaaggaggcctctggtgagacctgtggcaacagggacacatgctgcatcccggtgttcaattcttgctcttcctgtgccctgaatggggagtggcacctcttgagttttcagagggaggaagtatgccaagttcacctggaccctagatagggaaaggagcttgatgggggccaaggacaggtcacaggctcagtgggctctgtgtgcacaggattgggggccaggcttcggccacaggggcagtggttttagtcctcttgtcctggttcctgtggcctccagaaggggctgtggcaaggctgagagtcgggttgggctgggggctgatggggtgtggtaaggctaagcagggtaggttccagggcagggaacaacacccaagtaaggccaggcgcagtggctcaagcgtgtaatctcagcactttaggaagccaagatgggcagatcacttgaggccagaagttcaagaccagcctgaccaacatgacgaaaacatgtccctaccaaaaaaaatacaaaaatttgccaggcgtggtggcgggcacctgtggtcccagctactcaggaggctgaggcaggacaatcgcttgaacccgggaggtggaagaccatccactggcacctgaacccatcaggcaactgtcccttcagctctgggcgcctacttgggtggaggcaggaggtcccaggtgaggacagcactgggtccacaatgggagagaatgagagatcaggtcagggcattccactgtcacctcagttgcgggtgtccacactgagacatggacataagcccgagaaaacaacacgagctgtaccctgaacaagaaggcagtcctccccagccccttggagctcacaggagcactgaggcccttgcctgtgagcccagatccaccctggcccattccatagggtgactcactcagcctccctgacccctgctgaccggttcaaggctggagccctgttttcaccccttctctgcctgcaatgccaaagaattcagccacaatttgcttttttttttttttttttttttttttttaaactgggactcacccttttttccagggtggagttcaattaccccatcaccaattccttcaacttccaccccccagggtccaaaaaccccccacctcaaccccctgaaaaactggggccaaaggcgttaacccccacccctgggcttccattgacccctttttttttttttttttttttttttttttttttgagatggagttttgctctgtcgcccagtctggactaactggcgtgatctcggctcactgcaacctccacctcctgggttcaagtgattctcctgcctcagcctctcaagtagctgaggctacaggtgtacgccaccacgcctggctaatttttgtatttttagtagagacggggtttcatcatgttgggcaggttggtctcgaactcttaaccttaggtgatcccccagccttggcggcccaaagtgctgggattacaggcgtgagccactgcactcggccccgcaatttaccgggttttttgtttgtttttgtttttgttttttgagacagagtgtggctctggcactcaggctggagtgcagtggcacgatctctgctcgctgcaacctctacctcccaggttcaagcaattcttctgtctcagcatcctgagtagctggtattacaggcgcccgctaccatgcccagctaatttttatttttagtagagatggggtttccccatgctggccaggctgatcttgaactcccgtgatccgcccgcctcagcctcccaaagtgctgggattacaggcatgggccaccgcacctggccacaatttactctttttttttttctttttttcttttttttctttttttttttttgagacagactcttgctctttcgccaggctggcgtgcaggagtgcagtggcgtgatctcagttcactgcaacctccaccacctggggtcaagtgattctcctgcctcagcctcccaagtagctgggactacaggcacccgccagcacacacagctaatttttgtatttttagtagagatggggtttcaccatgttggtcaggatggtctctatctcttgaccccgtgatccacccgcctaggcttctcaaagtgctgggattacaggcaagagccaccgcacccagcccacaatttactgttaagtgcactctacctcgtgggtcttcagaggccctggattggtgtctcatctctcaaggtttcaccccacgcgggagtgggtaggagctggaaaaagcccccctgccggacccctgacactcgcagtgtactcagagctttacctcccagcccagacctgcaaattattaagccggaagagaatttcaaacctagcctgatcccttcacactgagtcccaggtgccacagcagcacagacccaaatgccttagcttccttctctgctgccggtgtctgacatcacatcaatttgcgtccagcaaccactgaagccagcaatgtgagaagcccagagagtacttaaaactctctccagctcctctccctccctccatccgaacctggcccactgccgggtggctgagccagaaagggatgggagtggagaaggggtcttcaggctgagctgggcgggggcgactgttgcattgtctgctctgcgaagcagaaaaggagaggagggagaggcacaaatggggcggggctggcttcgggcctttattttctaggctcaccactgccctctccctgtgagaagcagtcggaagggattgtccttcctgtactgcaggaggagaagctgagaaactcagctgtgagacgtgatcagactagtccaggacgacacccagacatacaggccaaagctggggtccctgagaaggcctcttgcctcctagagcttcactgctcgcctccactagaacacttcgaggaagctttgagggaacaagaagcagactgaattctggctttctgtaaggacagtgagactctatggctggacacagtgtctcactcctgtaatcccagcactttgggcattttgcttgagcccaagagttccagaccagcagagcaacatgatgaaaccctgtttctacaataatacaaaaattagccgggcatgttggcacatgcctgtagtcctagctactcaggagactgaggtgggaggttcacttgggccatgatcacaccattgcactccagcctgggccacacagcaagaccctgtctcaaatatatatataaatatatatatatacacacacacacactcatacacacacacacacacacacatttgcaaggccaaattttcagagaaaactaggaccccatgatacaaattaacccccaagttgcctttgcccacccaggaacttttccttgacagccctataaagcgaagaggacagaaatcaaatcttgaggcccccaacttgctgccccatcatactgagaggaaacccagaattgcaactgagccagggtgcaaattcccagggttcaaattcccagggttcaaattcccagggttcaagttcccagggttcaaattcccagggttgaccatggaaccttaagcctttcacttggcttaaggggtcctggatgggcagttccccaatgcagatggttctgcctgtctgacagaacccagagcaaaccctctcaggagagactccttcctcctacaggtactttttaaagcatgagggcaagcacatcatcagagataaccgggcgcaccaggaaacaacattgcaagagaaacaatgagcaatagcgacagatcgtgaggtcttcaggcgctggaattgttagccagacataaaataaccgtacttaaccagatctaatgaaataataagtcgtggtgggacagctgggtgcagtggctcatgcctgtaatcccagcactttgggagggatcaagcagacagattgcttgagcccaggggttctaggccagcctgggcaacatggtgagaccccacgtctacaaaaaatacaaaaactagccaggtgtggtgacgagtgcctgtagtcccatctactcaggaagctgagatgggagggtcgcttgaggccaggaagtggaggttgcagtgagccaagatcaagccactgcactccagcctgggcgacatagtgagaccctgtctcaaaaaaggtaaaatgtgagctagtaagtttaaaagtagatggactggtttagtggcaaattacgcaacatcaaagagagaatgcgggaaccaaaaactggctcagaagaatgtattcagaatacaacccagaaagacaagttcagggaagacactaaagacagaggaagaagccgcaaggagaatgagaaggtgttccatacatttaactgatttcacagaaacagaagacagcaagtatggcagaagcaaaacttgaagatataatgatggctggctgggcatgatggtcgctggccaggcgtggtggctcacacctgtgatcccagcactttgggaggccgaggtggccggatcacctgaggtcaggagttccagaccagcctagacaacatggtgaaaccccgtctgtaataaaaatacaaatattagccaggcatggtggcgcttgcctgtaatcccagctgcgtgggaggctgaagcagaatcacttgaacccgggaggcagaggttgtagtgagcctagattgtgccactgcactccagcctgggcaaaagagcgagactccgacttaaaaaaaaaaaaatctttcaagtatgatggtgaagtgcaaacaaaagcaaagaatttgccaccaacattttctcaccaaaaagtgtgtgcctcaagcagaagaaacccagtactagatggaacaatctgagatgcaagaaggaataacgagctaaagaggtcaatgtgcagctcacctaagtagacattgggtgtttgtaaatacagttttatgggaacccagccacacccatttgcttacatgctgtttgtagtggcagagttgagtggagtcttcccttggtatccacggggattggttccaggacccccaggggtatcaaaatccacagatgctcaagtccctgatataaaatggcacagcatataacctacgcacatcctcctgtatacttctttttttttttttttttgagacagagtcttgtctgtcacccaggcttgagtgcagtggcacaatctcggctcactgcaaccttcgtctcccagattaaagcgattctcctccctcagcctcccgagtcactgggattacaggtatatgccaccacgcccagctaatttttttatttttagtagaggtggggtttcactatattggccagtctggtctcgaactcctgacctcgtgatccgcccacctcggcctcccaaagtgcttataggcgtgagccaccgtgcccggcccctcctgtgtactttttaaatttgtattttttttttaatagagttgggatcttgccatgttgccaaggctgctcttgaactcctgggctgaagcaatcctcctgcctcagcctcccaaagtgcagaactccccagtcctcccatacacttgaaataatctaatcatctctagataacttatagtatctaatacaatataagtactacgtaaatagttgtttcactgtcttgctgctttttttttttttttttttttttttttgagacacagtccaactctgtagcccaggttggagtgcagtggccacaatctcggctcactgcaaccttcacctcattggttcaagcgattcttgtgcctcagccacctgaaaagctggaattaacaggcacgcactaccacctggctaatctttgtatttttagtagagacagaattttgccatgttgaccgagctggtcttgaactcttgacctcaggtgatccgccctcattggcctttcaaagtgctgggattacaagcatgagccaccacacccacccagtgctgttattttttagtggtggtggtggtggttttttttttttttcccaaacattttctgcttaaacaatatgatcctgaatgaccagtgagtcagtgaagagattaagaaggaaattgaacattttcttcaaataattctgggtagcgctgtacacagcaaatgtctggggtcgtctttctgagttcttttttcagatgttcagcctcagggagctttctggcaggaaaatgagacaagatctaccttttggccaggcacggtggctcacacctgtaattccaggactttgggaggatgaggcaggcggatcacttgaggtcaggagttcaagaccagcctggccaacatggtgaaaccctgtctctactaaaaatacaaaaattagccaggcttggtggtgggtgcctgtaatcccagctactcgggaggctgaggcaggagaatcacttggacccgggaggcggaggttgcagtgaggcgaggtcacaccattgcactccagcctgggcaacggagtgaaacggcgtctcaaaaaaaaaaaaaaaaatctatctttctccaaagccagcaatacagtgatgttccagcatctcatgacccaatgacccatcacatggggtttgactgcttcccagggtgaatgcaggcagtcctgaggctgacagtacatttatccagctgaccaagcagctcattcccatataccattgaaaagccagccgggtgccgtggctcacacctatatatctcagcactttgggaggctgaggcaggcagatcacctgaggtcaggagttcaagatcagcctggccaacatagtgaaacctcgtctctactaaaaatacaaaaattagccaggtgtggtggcgggcgcctgtaatttcagctactggggaggctgaggcaggagaattgcttgaacccgggaggcggaggttgccagtgctcatttatttttacataaacacactctttgaggctgaagtaaatctgactgattttcaatgtgaaaataatatataaaaactgtacttggagttatttctaaacagaactaacatcagaatcatctattttggaaaaatctgattcatcagatgaatcttcggctaacaacattttctacgatttgacattttcggcaattcagaattactatttttttgtcaatggaaataccactactaagaaaggaatgctctaaatagagtgatgtcttttgtttccaaagtcgatatactagagcgatgaaaaaataataaaaggaagatacttcatggcaaagttatctcggggtaaacactgcagccacaagcaccaccagcgtattctcagggcaaaggtaccagtaacctgcttgttggttcaaaggtccagcatcttcgctctgaagcccaagaatgacttgaagacaaggaagccatgtttctgctcaactccaggctgaagttacaggtctgagggaaagaacaaggtgcatataaatggaacccatgtcttggaggacatcagaaagggaactgtcaagtcctttcttgtacaacctaactgttcaagttagcacaccatcattttagtattttagtcttcctagtggagctgctttttttttttttttggtgagatgaagtctcacccttattgcccaggctgctggagtacagtggcatgatctcggctcgccacaacctccacctcctgggttcaagcaattatcctgcctcagcctccccagtagctgagattacaggcacccgccaccatgcctggctaatttttgtatttttagtagagacgggggtttcaccatattggccaggctggtctcttggccaggctggtctcgaactcctgacctcatgatccgcctgccttggccccttggtgaaggggtggcctgcccctccatatctgtgggtatttctagtcgggtgggacgagagactgagaaaagaactaagacacagagacaaagtatagagaaacaatagtgggcccaggggaccggcgctcagcacaccaaggacctgcactggcctctgagttccctcagtttttattgattattattttcattatttcagcaaaaaggaatgcagtaggagagcagggtgataataaggagaaggtcagcaaaaaacgtgagcaaaagaatctgtgtcataattaagttcaagggaaggtactatgcctggatgtgcacgtaggccagatttatgtttctctccacccaaacatctcagtggagtaaagaataacaaggcagtattactgcaaacatgtctcgcctcccgccatagggcggttcttctccgatctcagaattgaacaaatgtacaatcaggttttatactgagacattcagttcccaggggcaggcaggagacagtggccttcctctatctcaactgcaagaggccttcctcttttactaatccacctcagcacagaccctttacgggtgttgggctgggggacggtcaggtctttctcatcccacgaggccatatttcagactatcacatggggagaaaccttggacaatacccggctttccagggcagaggtccctgcggctttccgcagtgcattgtgcccctggtttattgagactagagaatggcgatgacttttaccaagcatactgcctgtaagcattttgttaacaaggcacgtcctgcacagccctaggtcccttttaaaccttgattttatacaacacatgtttttgtgagctccagattggatcaaagtggttgggtcaaagtggctggggcaaagctacaaattaacaacatctcagcaaagcaattgtttaaagtacaggtctttttcaaaatggagtctcttatgtcttccctttctacgtagacacagtgacagtctgatctctcttttccctacacttggcctcccaaagtgctgggattacaggcgtgagccaccgcacccagccttatttatttatttatttattttatttatttatttagagacagagtctcgctctgtcacccaggctgcagtgcagtggcacaatctcggctcactgcaacctccacctcccaggttaaagcgattctcctgcctcagcctcccgagtatctggtattacaggcgtgtaccaccatgcccagctaatttttgtatttttagtagagacgaggtttcaccatgttggccaggctggtcctgaactcctgacctcaggtgattcacctgcctcagcctcccaaagtgctgagattacaggcgtgagccaccgtgcctggcccctattttatttttttgagacagggccttgctctgctgcccaggctggagtgcagtggtgtgatcatagctcactgcagccttgacctcctgggctcaagtgatcctcccacctcagcctcccaagtatctgggaccacaggtgtgcaccaccacatgctgctaatttttgtatttttggtagagataaggtcttcctgtgttgtccaggctggtctcgaactcctgggctcaagtgatactcccgcctgggccttccaaattactgggattacaggtgtgagccactgagcccagcctgggtgatgttttagctgtaccttaaacaactttagcagatgtggattaagacactaggagccaatgagacttggcaattaatggctgggcgtggtgactcacgcctgtaatcccagcactttaggaggccgaggcaggtggatcatttgaggccaggagttcgagaccagcctggccaacatggtgaaaccccgtctctactaaaaatacagaaattagccggccagtagtggcacatgcctgtaatcccagctgctgaggaggctgaggcaggagaatcgcttgagcctgggaggcagaggttgcagtgagctgtgactgcgccactgcactccagcctgggcaacacaatgagaccctctctccaaaaagaaagaaaaaaatcgtgaaaaatgaggcaatgcagttatgtgttggctgtgtcaggtcaggtttctgcattttatcacccccttcctgcacaggaatcttcaacatggtttctgtggagtctagctgccctttatttatttgtgtaaatatatatatatatatatatatatatatgcagggtctcactttgttgcccaggctggtctcaagttcctggcttcaagcaatcctcccacctcagcctcccaaagtcctaggattacaggcgtgattcactatgcccaccttagctgccctttcttggacgatcaggcccagagctgaacctcagaggcaccgcgcatcaatccccagttgagtagcctgtagctgccccgcttgttgccagttgttgagcatgaactccctgcgactgctgataagtcccctttatctgcgctcctctctatacacagccaccttttgttcccataacaagccttcaggtctccacatttgcacatctcaaattctgtgttccacgtaggtggctcattcagggcccttctcaagccactttctaaaagtgtcaaccagtcactgttaactgatgcttctgtattggtggaaatgaaatatctattgatttccgtgcatggtggcacatgcctgtaatcctagcactttgggaggccgaggcaggcggatcacctgaggtcaggagttcgagaccagcctagccaactagtgaaaccccatctctactaaaaatacaaaaaaattagccgggtatggtgacagacgcctgtagttccagcttctcgggaggctgatgcaggagaatcacttgaacccgggaagcaggagttgcagtgagccgagatcacgcaactgcactccagcctgggcaacagagtgagattctgactcaaaaaaaaaaaaaaaaaaagaaaagagaaaaagaaatatctattgatagaatttttaaaagaactctatatttctatggacatatatatgagcccataaaagtaatacatggccgggcacagtagctcacgcctgtaatcccagcactttgggaggccaaggcgggcagaacacgagctcaggagtttgaaacgagcctggccagcatgttgaaaccccgtctctactaaaaatataaaaattagctgggtatgatggcaggcacctgtaatcccagctacttaggagactgaggcaggagaattgcttgaacctggtaggcagaggttgcaatgagccaagattgagccactgcactccagcctggagacagagcaagactctgtctcggggaaaaaaaaaaaaaagtaatatacacacacacaaaaagatagtagtgatggttgtacaacattgtgaatgtaactgatgccacaggatcgtatacttaaaatgatttggatggcaaatgttatgttatatatgtcttaccccaatacaaaagtacatctataaatatatagtattattttgggtgtgctcctctctgtatagaggttatcccgtggtgtgtgtctgtaacttgattttttccaattctgccctcagtttcctgctctttccgggcctcaggaggcttgacatccctttgaccacagcactgaaaggtgttctctttgctgagaactcagtgtcttctgcctggcagaggcttcggccctctgtttttgtttctatcccttatgcattctccccggcaggtgcccctcccagctttaagtgtatgtatactctggatttttccgtcttcagaacagtgctcaaaaatacctggggtgtccttctaacagaaagtgcagagacgtctgctgcaggattgcccacccccattttgtaacatctgctatttgagaactgctgaagctgccctgatctatgagggctgacctggaagaacagatgactgtgagtgtaccccaggacgttggcctggatggtgacagaccatgtgctctagtcaccgtgctggccagacccccacaggaatccaaaccatcccagagaaaataagggacttttgcaaggctgccccaggaagcacggaagacgtggaactgaatcccaggcctctggcccatcacccacgtggtgtccccaaggaagggagagttgtctcggaatgctcagggggactcattaaagcaacactttcataaatgcctgctctgaacaacatgtaaatattgtctttgaaaaacaccggctggcagctcaagggtgtgagtaacctggagcttcttcgactgggcccccctgaggagggcatggagcccaagattcgttaccataattacttgagaggctgtcaaattccatgacaaaacgcaaatgcaaagccctggccccagcagcaggcagctgaaagggaccttgaccctgttgagtactccagtatagaagctgctggattctaaccagggctctcccatgcccggctctataaactttctctatattttgcattgtttccctaagggtaggagattcccgtaagttgggtcaaagggcagggaggtttccgtggttctcattgggccctgctgctgctctccagacagatgatggatcagctgtcagggtggccccggccatgccagcgcagtaggtggtcagggcgcacttggggcagccggcagggcagaagggacgggagcttgacccgtgttctcatgggcagagggagcccgggcagtgttgggggcagcgtgcgggcaggcgcggaggggagatagccaggcagtcagggagaattggggtgactggagaaaggccgaagggccgcgtctgcctgcggccggagaccaccccaggtccatacagccagctgggtgccgggcaccgcttggagccgctgggaaagccaagcaccgctctttctggagccttcttttttcctattgttagggaattcacgacgtcacacttgttttcaagtgaaaataagagttgtgtaggacgcgaaagtcacgtgacttgaaagctgaacctgagaggcctcaaaataaattctggtttgctgtgaaagcctcgggttatagcgctaaactcccccctccactgcccccgaaagttgtattctcctctgcttttagggtggggtgtggcgtaaacaacacagcttgagcagctctgaggaggagggtgttagagaccaggcaggcggagcaggcaagagttttcaaggatgtcgaaatagtttgagacgccccgtcccattataaaagtgataacgagagacagcaggaacgcgcttctggacagaaaacagaccctaaggaaaggcagccagaggctcacgctggatcctgcggtcttccctatctgcgcctctgtacctcccttgcctttacaaagcgcatggatcaactttggaacaggttctaattctgccccagatccatctgcgtcttcccacgactcacaaatctgacctcagggtgcaagcgcagccccagccctctaagcctgggtaggcagggctctcccacccgagaaagggccgaggggagacttccggggcgggaccgacgtgggcccctcccactcggcggccggtgggttcagcctgaacgcaccgcggaggtggggccgacgagggatccaggggcgggacaggttcggggcgggacaggttcaggcccctcccatgcggcggccagcgcgagcggtagaggcgggtctggaggcggggcctgcgtggagccagacggcgcagctgctgccgggggcggggccggcgggctgtggccccgcccttagccgccattgccgggcctgcctggccaccctgcgcaggggccttgcgtcctctccgggggcggagcgggtcggcgggcctgacagggaacctccctgaccgagcccacgtctccccacggacagagaaatctccggcccggcccgcatcgccagcccccaggcccggaggaacggcccgagcccaggagaaccacatcttcgtcccagccccggaggctcctgtgggcaagatcgtgagccaacgggttcctgaggcccctcctggccaggcagggtttccccgcgcgtttccgaggagccctgcctggccgggcggctggacaaacaggtcgtagcaccgatcgcgcccgcccccagcaggggtcccgcacaggcttgcccctgacccccacccaaacctgtccttccgctttgcccccaaacagtgcacttgccggcggtcccaacccagcaggagaagtggacatgaggttggcaggtgggtggcttccacagcgaacgggagggagttgaaaagggcacctggctggaggcccagcgtcgcgacatctgtgtctggagaggcccgggtgaaccactgggtttggttttggaaatggaggactctgcacaaacactcgttccttgaccttaaccaaatcctttcacctctgaggacgtcagctccccgagctatgacatgaggattagtatagtcagtatctcccaacgcaggtagcagaccagctgctttttggaaaatgagtggtgagagagaggaggtgggcagtccaggtggagaggcgtggtcttagaggggaagtgacaaaagtggctgtgggcttcgacatgaacccgatgacagccctactgtcacctggacaagtaagatgaagatccttggggagggataggttggggctgggtggagagtagaaacaactcgggaattggacttcagacttgctaaggtggtaactttgtggacatatccaggtggagctggccactgaggaaccagctggcagggagtggtttcaagagaggccacggctggaactagaaaatagaaagtcattgacacatggtgcttaattaaagagctaggagtagatgacatcatctaaaaacacactacaggccgggcgcggtggctcacgcctgtaatcctagcactttgggaggccgaggtgggaggatcacttgaagtcaggagttcgagaccagcctggccaacatggtgaatcctcatctctactaaaaaaatacaaaaaaatgagcctggcgtggtggcgggtgcctgtaatcccagctacccgggaggctgaggttgcagtgagccgagattgcgccaccgcataactccagcctgggcgacagagcgagactccgtctcaaaaaagtaaagacagctgggcgcagtggctcacgcctgtaatctcaacactttgggaggccaaggcgggtggatcacctgaggtcaagagttcgagaccagtctggccaagatggtgaaaccccgtctctactaaaaatacaaaaattagccaggcatggccgggtgcggtggctcacacctgtaatcccagcactttgggaggccgaggcgggcggatcacgaggtctggagatcaagaccatcctggctaacatggtgaaaccccgtctttactaaaaatacaaaaaaattagccgggcgtggtggcgggcgcctgtagtcccagctaccagggaggctgaggcaggagaatggcgtgtaaccgggaggcggagcttgcagtgagccaagatcacgccactgcacttcagtctgggcaacagagcaagactctgtctcaaaaaaaaaaattagccaggcacggtggtgcgcgcctgtaatcccagctacttgggaggctgaggcaggagaatcgcttgaacccaggaggcggaggttgcagtgagccgacatcgcgccattgcactccagcctggggggcaagagcaagactccgtctcaaaaataaaaaaaataaaaagacactacaggtagggaccagaaggcagcctgagatgggagcctgggaaagtccagcttttaaggggagggtagaggagacgatctaactaaggagaatgaggagtgtccagagagattgggtcaggagagtgtgctgtccggaaagccagcagagaagttagtgcttctgtcaggtggacatgggcagcccactgagaggtcaaggaagatcaaggctgacaggtcaccaggggtggtgacaccacaaaggtcatcagtggccttggcaacaagctgatttggtgaggtggtggaagccaggccagactggagtagggtgggagggagtaggaggtgagatgatggaatgagtatagatgacttttgagggggttgacagggaaaagaaaggttaggggaaagaggatggggatgtggttttgaagaagagtgttttctttgcttccttaacattggagatgttgaaaatacaggagaaagagcgaactagagagagtgatcactattacaagaaatcagagaaggctggggagcttgcaatccaggtcccagcagatgacgggactgttgttgttttggttttgttttgttttgtttttgtttttgttttgaggcagagtctcactctgtcgccaggctggagtgcagtggcatggtctcagctaactgcaacctccgccacccaggttcaactgattctcctgcttcagcctcctgagtagctgggattacaggtgcgcgccaccatgcccggctaatttttgtattttctgtagaggcagggtttcaccatctttgtcaggctggtctcgaacacctgacctcatgatctacccgcctcggcctcctaaagttctgggattacaggcgtgagccactgcgcccggccgggactggtcttaaaagggagtagggacccttctccctcagaacaggaggaaagcaggggcaggtggatgcccaaatatattggtggtttcagaggcaggaagttgagggggttcttggaaagagggctggagcccttctcgagcagagagttctggaaggccccctcccagacccgccagggaaaaccaaacccagcagccttgggatttgaactcaatttcctccttccacctgccagggagctcaagtctccctttcagccctggtagaaggcaacaggtctccacctccttgtcctccagccacttcttcccaagtggcaggggagatccagtcatgcaaggctatggggtcattctggggttcgctggtatctgaggtgaccccaccctgtgtctatcctgcctccaggccctctccgcattgtggtcctagtcgtcagtgtgggtgtcacatggatcgtggtcagcatcctcctgggtgggcctggcagtggctttcctcgcatccagcaactcttcaccagtgagtgtgggaccccgccttatccttctctggaggccaccaaggtggccacctgggcctgtggttgaggctctgggttgggagttgacttgggttttctatctcctccctggcaggctacctttggctgtccccagtctgtctcctggcatcaggcgcagcctcccccaacacccagttgcttcatctaggaaagccaatacctgatcactagaattatatgcccaactggagtcagtagggccagagtaaggggtagggagcttccactgaacatggggagtgatgccccggttgctccctgcaggctctgagatggagaggggactctccaccttgttgactggtaataggtcacctgagtacttttttgtttgtttgtttgagacagtgtctcactttgtctcccaggctggagtgcagtggtgcaatctcggttcactgcaacctctacctcctgggttcaagcgattctagtgccccagcctcccgagtagctgagactacaggtgcgcaccaccaaacccggcttcttcttcttcttcttcttcttcttcttcttattattattattattattattgtatttttagtagagatggggtttcaccatgttgcccaggctggtctcaaactcctgggctcaagcaatctacccgcctcagcctcccaaagtgctacaggcatgagccactatgcccggccaggtcatctaagtagtttttctaattccatttccccctgttcctagagtagggagtttttcatctgaacatgacttacacttgagcaggaagcatgccaaggtcggcctggcttagcccccggcccctgagcctgactgcctgtgtctacacttcgcggtgtaaggagggccaggctgccctgccgcaggccccgggaggctccacactaacagaaaccactctgtatccacaggtccagagagctcggtgactgcaggtaaggcccctgtcacctccctgctcctcccctttgtgacatccctgcctgcccccggtcccgtagggcttcggttttccatttattcctccccaaaccagctgtggtggtccacgggggctgcttgccactgtcaacctacaaaacaagttacttcctgccaagttacttcctgccagaatatgacggtggggcaggcctaggatagatactcccactgcaaaagggcaacttggaaggaaaaaagaggtcacccgtcccaagcaagtccaaagcccagcagggcaaaattcatttggtttcaaggcctgaggggaatcctctgtggcctgagattctttcttctgggcctgctggaatgacccatgctctgaaacgagacagccccaccttcggggccacccttccttccctttatctcatctctgcccccttcactccaggccggcagtgtttctgctggtgtcagattctcaagagccttgttggtctcttttgcaagttatagaggcccaagctataaaatcagagagttttcccacagacgcttcctagataaccccatcttcattgtagatttctgctgaaagggttgagtggacccacgagtcacatacctcagctctggggcaaacgcttgaacagccttgctgttctgtccaggggacacttttgcagtttttgtaatatgattaggccaagaattttccacatcttcgctttctggctcctttgtgctcaacagtttcttccttatgtctctcacattttactataagcagcaaggagaagtcagctacgctctcaacactgcttggaaatctcctcagctgaatatccaagttcagcacccagcacttacacattctcctttcgacaaaacactagaacacaattcaaccaagtttttttttttttttgagacggagtcttgctctgtcacccaggctggagtgcagtggagccatcttggctcactgcaacctccgcctcccgggttcaagcgattctcccacctcagcctcctgattagctgggattacaggcacctgccaccatacccaactaattttcatatttagtagagatggggtttcaccgtgttggtcaggctggtctcgaattcctgacctcaagtgatcctcccgccttggccccgcaaagtgctgggattataggcgtgagccaccacacctgggccaagttcctttataacaaggatcagctttcctccagcgcccaataactcaataacatgtccctccagttcctctgaggcttaaccaaaagcaccctttttttttttttttttttttggtagagacagaggtcttactctgttgctcaggctggagttcagtggtatcatccccgtgcactgtaagctcaaactcctgggctcaagcgatcctctcacctcagtctcccaagtagctgcgactacaggcatgtgccaccacacccagctaatgttttattttttattatttattttttgaatgtattgagacagggtcttgctctctcacccaggctggagggcagtggcgcaatcatagctcaagtgattctcctgcctcagcctcctgagtagctgggattacaggcatgtaccaccacacccagcttattttgtattttttgtagagacggggtctcactatgttgcccaggctggtcttgatcacctggcctcaagtgatgctcctgccttggcctcccaaggtgctgggatcacatgcgtgaatcaccacacccaacccaaaagcacctttaacattcatgtttctagcaacgttctgttcttgatgatatttgtattctctaagaccacagaggctgtctctattgctctcccctcctctcaccagaattacctttaacatccatactcctaccaacagtctcttaaaggcaatccagaccttttctaacatgtacctcaaacttctatagccttgatatggtttaaatgtcatctctaaaactcatgttgaaatttgtcaatgtattggtattgagaggagggcctttttgaggtagttacgtcatgagggctctgccctcatgaatggatgaatgccattattatgggtgagttagttaccttgaagttcagcccccttttttcctgcgtctcatatgcttgcttccaccttccacctttctgccacgggatgaccctcaccagatgccggcgccatgcttttggacttcccagcctccagaaccatgagccaaatgaatctgttgtctttataaattacccagtctgtggtattctgttatggcagcagcaaatggactaagacaagcctctactgactacccagttccaaagccatttccacatttttaggtatttgttacctaagcaccacacttcctggtgccaaaacctgtatccatttcctggaactgccatttcaactgggtggcttaaacaacagaaatggattctctccccattctgaaagccagaagtctgaaatcaaagtgtcagcagggcgttactcaccctgaaagttctacaggagggtccttcctgacctccccaggttccagtggccccaggcataccttggcctctggctgtgtcactcctgtctcttcctccactgtaccatggctgtcttccctctgtgtgtctttgtcacttctgttcttataaggacatcagtcatgttgcattaaggacccaacctactccagtatgaccccatctgaactgcaaaggccctatttgcaaacatcacattctgaagtaccacagattagaacttcagcataccttgaggggacagaattcaacccataatagaagccatcctgctccagtcctcccaaccaacccccatcaaaatcgggagacaggctgcaccccctgccacactaccccctgccacactgcctttgctcaggttggcctcatccatgcagctagacccccagcctgacttacttcacccctgctttgttcctggctgtgcagtggcccaggccagccctcagcatcctttcttttctcccaccagtaacagaaaatccttctgtcttgggtccctgtggcctcaccagtaggacacagagtatggaagtgtccccagcctcggcctgagccacatccccctacttgtgtcctgctctgcggtcacttgttctaccatgtgtgctggtcctgacctccccttcagatctcaggtgacctcagggccaggcccatggataacacctgctatccctgcccagcgccacgggccaggaagtacaagtgtggcctgccccagccgtgtcctgaggagcacctggccttccgcgtggtcagcggggccgccaacgtcattgggcccaagatctgcctcgaggacaagatgtgagctccctggggtgactggggatcagggagggagtgggggatccagggccgggtctgcaagggagagtggagcagacgtgcccatgtgggatctccccgtcccccccacccccccccaactaggctgatgagcagcgtcaaggacaacgtgggccgcgggctgaacatcgccctggtgaacggtgaggcccctggctgagcgtggcctgccgccctccttccctgctccctccccaggaggcctctgggtgtttgccctcccttcccctcccattcaagatctcccagggaggcctgggaaggagtctgtgcaagcgcaaggctccacagaggagtgacccaatgaacaaaaaagcatgatggcaataaagaactagggaaggttctgggaggttgagggtgcttcatggagagcccccggagggcctcaaatgccagacagaggcaccacggcttggggtgggatgcagctgcctgaacaaatggatgaatattgggggactgtttgaaagcgtccagaagggctgccccccacccccggtgctacccgcctgccgtgccctgaggctggcctggcttacccagcagggcccctccctcctgacacaggggtcagcggcgagctcatcgaggcccgggcctttgacatgtgggccggaggtgagttgcagcgcagcgtcttgcattttgactgcagcaaaatgacctgggcagcttcccctgagacactgctctctctgtctgtacttggagcttctcagtcacctccgtgggttcagaaaggacaggggcatcgccagcttggtctggaggctgtgggaggtcacggggatgcctcagcttcctacaccagcctgtcccttggcggggcatgtcccaggcccaatccctacttctgtttccttgtttggagaacgggcttgtgggagggtgctcagtggtgcctgatgacccctgttccgtggcacctgcccccccagatgtcaacgacctgttgaagtttattcggccactgcacgaaggcaccctggtgttcgtggcatcctacgacgacccagccaccaagtaggtgcttggggaggccagcctcagccttgcccttctgcagcaacagctgacaccccttcctcccatgctgcaggatgaatgaagagaccagaaagctcttcagtgagctgggcagcaggaacgccaaggagctggccttccgggacagctgggtgtttgtcggggccaagggtgtgcagaacaagagcccctttgagcaggtatggggggttgcctggcatcacccccaccggggcagcctgtcgccccttctgcctgcatgcgacgagcctccccagctgctcacgccccagcaggggaccgtccccagtccagctatgaggggtgggccagtgcagctgatgccatgtttccctgggatgggtggaggggccaagtgccctgagagtacaccgttggccaacacagcacagttgactgacagcctgggtcctggtccactcctgtcccctgtccctgagggccaaagtcatgactttctgctcccctccccacagcacgtgaagaacagtaagcacagcaacaagtacgaaggctgccccgaggcgctggagatggaaggctgtatcccgcggagaagcacggccagctagcacggccagtgccaggaccgggccgagggaggccagaccaagggaggcacgcgcgctgccgggcggacagaggctgaggctcacaccccacacccgggcaggagcgctccctggccccaacacatcggggctccgaggcagtgaccagaacgtggtctcaaggtggtgggggctatgggggctgcagggggtagccctgccgcactttgtcacgggagcccagggtacccgcctccttttcgtaacactgttccccccggtcagcccatctagccctgtcctccattcctcacgccatctccatccccatcttgagtcctggaacggccctgggtgcctgcccctcactgtgcatctctgggagcagcccggcaggttggggcgtcttccagaacctctcccttctggagccactctgcactgcgggctaaacatgtttccagtgtgattccttccagtgagccaaacccggtggctgcttcatgagcctgactgcctctcgcctgctctcagcaggaagggacccctggagcaggctggcccggggtggtgaagtagctggagcccgatcacagtcccgcggtttgtcagggggcccaccttctagatgaccccttaataaagtgatggccccacagaagaaatgccttcagatgctgttgtcagtgcggagtcagaggtggcggtgtcctctggggtgcgggaggacagattccagagtcttaaccaacctgctcccacagcccgagcagacagccttttgtctccagggctcctgccaccaacaggccccgctgcgactgagatgtgactcaagcagtcaacagagcagtgggactcttttcgtctggcagagaagattgcacactcgggctgcaggaagctgactcaacaactccctctgacccagtgcaggcctgtacggacagggacagggattgggattaacaccagcccaggcccccaccacaccccatcatcatccaggagcacatgtcgcccacagacttcggctgcctttgaagtcagggttgtgaggggtcgagtcacttgggctttttgcgtctctcccaggttacggttaatacctccctttgctaagcgagagccagcaaattagaagcaattttgctggaatatcaactccagaggcccagaagcagtctgagttcagcgaaaggagagaaggcagttcctagatgggaggcactgtggtgtccttcatggggcgacgttaggggcgatggacttaggagccaatcccaggaagagtacagagcgcagacagagcctcagaagacaaaagtgcttctggagcaggcacatgtggggttggaggcacaggggtgccctggaggagcggctcaccagggaggaaacgatggtgatgccagtcctgcctctgcaccaggaactttctacgtgtattccattccttttttgtttttgtaaactttccttcttagagccattttaggttcacagcaaaactgagtgaaaaggtcagagttcctgtgtgccccctgccagcccccagcttcccatctgttgctgtcaatgaaccagtatcggtgctcacatgaggcttcagtttgctgttggacgttcagtgggtttggacaaaaatgtgtaatgatggatccactgcaggatcatacacacttcactctttagacttgctatggaaaattgcaaacatctccaggagacagactagcatacaatcggcccttcatatccatgggggttccatgtccacagattcaaccaaccacagattggaaatacttggaaaaaataaaaatacaagaataaaaaatagtacaagtaaaaaacaatacagtggccgggcgtggtggctcacgcctataatcccagcactttgggaggccaaggcaggtggatcacgaggtcaggagatcgagaccatcctggctaacacggtgaaacctcgtctctactaagaaatacaaaaaattagccgggcgtggtggcgggcgcctgtagtcccagctactcgggaggctgaggcaggagaatggcgtgaacccgggaggcggagcttgcagtgagctgagatcacatgactgcactccagcctgggtgacagagcgtgactcccgtctcaaaaaaaaaaaaattagccaggcgtggtggcgggcgcctataatcccagctacttgggaggccgaggcaggagaatcacttgaactcaggaggcagaagttgcagtgagccaagattgtgccattgcactccagcctgggcaacaaaagcaaaacttcgtcttaaaaaaaaaaaaaaaaatacagtgtaggctggcacggtggctcatgccctataacccagccttcgggaggccaaagtgggcagatcacttgagcccaagcattcaagaccagcctaggcaaaatagcgagaccccatctctacaaaaaaataaaattagccagtcgtggtgacacacatctgtagtcccagctacttgagagactgagacaggattacttgagcccaggaggtcaaggatgcagtgagccaagatcacaccactgcacttcagcctgggcaacagagtgagatcctatcaaaaaaaaacacacacacaatacagtgtaattgttatttgcagagcatttacattgtattaagcatgataaataatctcaagatggtttagattctatgggaccaggcttggtggctcatgtctgtaatcccagcacttacagaggttgaagcaggcagattgctgcagtccaggaggttgaggctgcagtgagccgtgattgtgccactgcactccagccagggtgacagagcgagactttgtctcaaaaaaaaaaaaaaaaaaaaatcaggccgcgcacggtggctcacacctgtaatcccagcactttgggagaccgaggtgggcagataatctgaagtcgggagtttcagaccagcctagccaacatggtaaaaccctgtctctactaaaaacacaaaaattagccaggcgtgctggcgcatgcctgtgatcccagctactcgggaggctgaggcagaatcacttgaacctgggaggtggaggttgcagtgagccgagatcacgccactgcactccagcctggacgacagagtgacacactgtctcaaaaaaaaagaaaaaagggctgggcgcacagtggctcacgcctgtaatcccagcactttgagaggccgaggtgggcggatcacaaggtcaggagatcaagaggtcaggagatcaagaccatcctggctaacacggtgaaaccccgtctctactaaaaatacgaaaaattagctgagcatggtggcgggtgcctgtagtcccagttactcgggaggctgaagcaggagaatcgcttgaacccgggaggcggagcttacagtgagctgagattgcaccactgccctccagcctgggtgacagagcgagactccatctcaaaagaaaaaaaaatctatgggaataaatatgtataactataatgtatccattttatatcagggacttgagcatccctggactttggcagctatagggtgccctggaacaaatacctatcggataccaacagatgactgtcatcaactctgatgtgctcatccctctagtgatcgacatgtgaccagtgctgtctcatctgtacccacatggtcccatatgttgatacaaatctcaacttccttcttgcatcaatacctcagttataccataggtaacacctcaccacaaccctagccagtaagtgtggccattgtccccactgtacaaaaaagtaaaggtccctagtggggataggagagttcccggtgtagcaagactacaagccagataagtacaattccacgaggttactagcttgcccctaaatgaaacggaaactcacggagtgtctatactgccaggctgggaggggcttgggctccccgacacttctccagcaactgctgtgattgcccagccttcctccatttgttccttcagctcatttgttcactaaacattcaccaagtgcctgaactggtccaggaacaccgtagtgagccacagtgacagcctctacctcttcatggggctgcaccctcactggggtcaccagtgtcacagcccaacacaggctaggaagctgatggcatggagcacagcctgcctgacttcccaaagaggaggtaagcttgacatatcccacggtcctggttttgccaggggtatcgccccctgggcctgccctttaggagttaggatgtcctcacttacaatgccagaattcaacactcaaactggcataagcaaaaaaaaaaaaaaaaaaaaagggaggatggcagaattgcattgttcctgtaatggaccccgaagcccaagggacttgggctctctccacctcttggctttgtttttctctctgtattggcttcattttccaacatggcagccttccttgccatgacagttgtcagaatcaaaatggagtcacttgtgttaaaaaacaaaaaacagagctggggaaggctgcaaatgcagaaaccacagctttccacagaaaaaaaatactgcaaggacatctgcccagcaactttttgagacggagtttcgctcttgttacccaggctgaagcgcagtggcgcaatctcggctcactgcaacctccgcctcctgggttcaagcaattctgcctcagcctcccaagtagctgggattgcaggtgtgcaccaccacacccagctaatttttgtatttttagtagagacacggtttcaccatgttggccaggctggtcttgaactcctgacttcaagtgatccacctgcctcagcctcccaaagtgctgggattaaaggcgtgagctaccgtgcccggctgacttttttttttttttttttctgaaacggagtctggatcagtcacccaggctggagtatagtggcacaatcttggctcaccacaacctccgcctcctaggttcaagcgattctcctgcctcagcctcctgagtagctgggatcacaggcatgcgctaccacgcctggctcatttttgtgtttttagtagagacagggttttaccttgttggccaggctgctcttgaactcctgacctcaggtgatccacccgcctcagcctcccaaagtgctaggattataggcgtgagccaccgcacccagctgagcaacttaaccctaaccctgtccaacctcatactgaggtcacccttgttatcgatccttgtagccaaggagaattctctcaaaacaattaggtgatcctcttcacttttccttgaaaaacctttgccttcttttgcctccctgtatatgcacacagtttaccatacagtttaccatggcacatgcattcccactgcaacgcattccagaataaatatcattttctctcagagagcctgttatttaggatgacataactagagtcagaagtgggacctacagctgggcgtggtggctcacacctgtcatcccagcacttgagagtccaaggcaggaggatcacttgagcccaggaatttgacaccatcctgggcaacacagcaagaccctgtctctaaaaaaaaaaaaaaaaaattaattagccaggtgtggtggtgcacacctgtagtcccagctactagggaggctgaggtgggaggatggcttgagcccaggggtcaaggctatctcagaaaaaaaaaaaagaaagaaagaaagaaaaaagaaaagaaaagaaaaaaaaaataagtgagacccgaaacaaaatcacctttaaaaggaattggggctgggcacggtggctcatgcctgttatcccagcacttttggaggccaagacaggaggattatttgagcccaggaattcaaggccagcctgggaaacagagtgagaccctgtttcaaaaaaataaaattaaaataaaaaataaaattaaataaataaaactaaaacactggtatgtagaggcgcctaacttctctatctgcttttcttttcttcctcctctctgctgactctgttggctttttcttcttcttcttctttttttttttttttgaggcggagtcttgctctgtcaccaggctggcacgatctcggcaacctctgcctcccgggttcaaggaattccactgccttagcgtcccgagtagctgggactacaggcatgcgccaccatgcctggctaattttttgtattttatcatgttggccaggatggtctcgatctcctgacctcatgatctgcctgcctcggcctcccaaagtgctgggattacaggtgtgaaccaccgcacctggcctttttcttctttttttttttttttttttttgagacagggtctcactctgccacccaggctggagtgcagtggtgcagtctcagctcactgcagcctcaacctcctgggctcaagcgatcctcccacctcagcctcccaaggagttgggaacacaggcacctgccaccacgcctggctaatttttgtagagatggggtttcatcatgttgttcaggctggtctctatctcctgagctcacatgatccactcatcttggcctctcaaagtgctagaattacaggcgtggccaccgtgcccagccagcttcttcacttgtattaagataattgtattaagataatttcaccctgggcaacctgatcagaccccaaccctacattaaaaatacaaaaaggtagctagcgtggaggcacacacctgtggtcccagctattcaggaggctgaggtgggaggatcacttgagcctggaagttcaaggctgcgttgagccgtgacacactactgcactctagcctgggcgatggagtgagatcttgtctcaaaaaaataagaataaaaaaagataatctaacattggtgatttcaaaagctgtttataacttttccttagggcatttcagccaagaaaaagaaaagaaaaaagggtgctttcaaattacaacagctccatggcaaccaaaaacctagccttgtacacttaggagtcattcctttcagaaacatgtatggaggtttgcctagctgacaattgcttagggtgacggaacagttaattaaaagattgatagtctaaaaaggaaagaactagatcaatgtttgtgaaagttaggttctcagatcaaacaggtcaaactcttgagcacacagcaatcacataaggtatctctgtccagcataaaaatttggctttgtctgtcatgtacaatccagaaaaagctgaggaaaaaaaacaactgtaaatatctttttgaaaagtgcctctccacctgtgctgactaatcaagcaaaccagattggccactggaaattctgtttttctcatacaattcagctagtcctaactgaaatgtgaacatttgaatatttaacctctaaactcatttgatatggaataaaaggattttaaaaagatattttaaatcaaactgctgtagacgctgctttacccaaaattttgatcttcagccttcataagattacctatggggtcaaataatgctcagccacacgaacgggtctcattttgtcagaaattggatccaactgtccttttataaactggcaagcgtatattactatattgtactgtctcatgacaaaaatttcaaaatgaaagctagggaatctgtttctatgtaatcatgtgtccgtacgttttcacattctgtgtaatattttctaccaaaatatatgaaaaatatctaattaattaaagggaaaaattaaaagcattaattattttatcaaaaatatagtaattaggtgggcatggtgagtcacgcctgtaatctcagcactttagaaggctgagacaggtgatgacttaagcccaggagttctaaaactagcctgggcaggcggggcgcggtgcttcacgcctgtaatcccagcactttgggaggccaaggcgggcggatcacgaggtcaggagtttgagaccagcctgcccaacatggtgaaaccccatctctactaaaaatacaaaaattagtctctactaaaaataccaaaggtacccaagttaaaaaaaaaaaaaaaaaaactagcctgggcaacataaggagacccccatctctaccacaaaaaaaaaaaaaatagccagtgtggtagtgcgcacctgtatgcccagctactcagggagctcaggtaggaggagaggattgcttgagcccaggaggttgagactgtagtgagccatgatggcaccactgcactccagcctgggcaacagagtgagaccctgtctcaaaaacagtggctcatgcttgtaatcccagctacttgggaggtggaagcatgagtgttgcttcaacctgggaggtgggggttgcagtgagctgagattgcaccactgcactccagcctgggcaacagagcgagactctgtctcaaaaaaaatctgtagctgggactacaggtgcgtgccaccacgcctggctattttttttttttttttttttttttgtatttttagtagagacggggtttcaccgtgttagccaggatggtctcgatctcctgacctcgtgatccgcccgtcttggcctcccagaaaaagttgtttctaaaggaaaaacactaaaatatgcctgctattagattgcagccctttgcattgtttcttatctacatgaagacgggactagaccccaaatcctcctaatttcctctaatatttggctaaaactctccaactaagaaaaaaacctgttatgttgctaaaggccttgaagctgaagctggaaaacttggtataaatatccagggacaagtctcatgcctgatgtatgggtcacacaggaagttctccaaaccacctgatgccataaccagagacactcaaactgcaaaccagaacaagaagttgagcgcttcagctgggcgcggtggcttcaggcctgtcatcccagcactttgggaggccgaggcgggcggatcacttgggggtcaggagttcaagaccagtctggccaacatggtgaaacccatctctaccaaaaatattttttaaaaattagctggctgtggtggcacgcacctgtaatcccagctactcgggaggctgaggcaggagaattgcttgaacctggagttggaggttgcagtaagccaagatcatgctgctgcactccagcctgggcgacagagcgagactccatctcaaaaaaaaaagaagttgagagcttcacccatcaaaatgaaaatcttgtcactcttaatttttcctttcttatgtctgccttttcgttgacaggataatggtgtaattgaaattgcacaatcaatagcttctgtcagtaacctcacagaacctgacctaagagatccttcagcatctattggttaaatcaggaaatatctgttctattgctaatagcacatgctgaacctggataaattcccctggggaacttgaggccccatatacacgaaattacaaaacataggttataacaggtcacataggttataatgggtctcacctaattccccatggtcatttgatttattcacttgattgcctttaagcctaggttcatagctcaaaactattatgaaaactgggggtatcatattactactaatattaatttgtattttccttttaacaatttgtacttgttacttgtgaaacttctgcagaagtacagctgctaacagagtatgctggcacggggcttccagatgatggccaaaagaccacagaacagaaaaaatagaatttaacgatggacttcaggtagacttagtctgagtgcaactctctccaaatttccactgttgctcagatgtgcctaaaggggttttgacactgactcttagttgtcaatcactccctcttatctggaaccagaccaacaacccaggacaggtccatcccagcactgagggacaatccaaacctactgcttttgaagaaagatc

SEQ ID NO: 62096 - DNA, 1620 bp, Homo Sapiens
gtcctccaaatgcagtgaggttaggaaggacgtctgcgctcagatcaagaatccagttacctcaaagctccccaacttccacctccgcagagctatgacgtcatggcaggcacgccagaggccgaaggatgcaaaagtggttttctgctttcgatgatgcaatcattcagcgacagtggcgggcaaacccctcccggggcgggggaggtgtgagcttcacgaaggaggttgacaccaacgtggccaccggcgcccctccacgccgccaacgagtccccgggcgtgcgtgcccttggagggagccaatccgcggccggcgtggggcccggcctggcggaggtgatgctggagggacgcccggggagaccgtacgtcactgctctgcgccggaagaccctattttcaggttctcttccctccattcctaccccttccccggtaccataaaatcccgggatatgagctggaagaggcatcacctgatcccggagacctttggagttaagaggcggcggaagcgagggcctgtggagtcggatcctcttcggggtgagccagggtcggcgcgcgcggctgtctcagaactcatgcagctgttcccgcgaggcctgtttgaggacgcgctgccgcccatcgtgctgaggagccaggtgtacagccttgtgcctgacaggaccgtggccgaccggcagctgaaggagcttcaagagcagggggagatcagaatcgtccagctgggcttcgacttggatgcccatggaattatcttcactgaggactacaggaccagagtcctcaaggcctgtgatggccgaccgtatgctggggcagtgcagaaatttctagcttcagtacttccagcctgtggggaccttagtttccagcaggaccaaatgacacagacctttggcttcagggactcagaaatcacgcatctggtgaatgctggagtcctcaccgtccgagatgctgggagctggtggctagctgtgcctggagctgggagattcatcaagtactttgttaaagggcgccaggctgtccttagcatggtccggaaggcaaagtaccgggaactgctcctatcagagctcctgggccggcgggcgcctgtcgtggtgcggcttggcctcacctaccatgtgcacgacctcattggggcccagctagtggactgcatctctaccacttcaggaaccctcctccgcctgccagagacatgaagattctgctcatcattgctcagctcctcagagtgggccgggaggggactagaagagctgcatgatggtggctgagacagggtcaccttgggaaggcttgggagccaggatgagtgtcgggctctcgtgtgtgcaaaaggtcagatgtgactgctgctgtttgcctggtttctgacccagtggtggggtttgagcaatgcttctctgcccttccatggaaagtggaaccagaaatggtgccaaggctgtggctgttccctttcgtgtaaaatggtgctgttattactctgtcttgaaataggaaggtgggatttctggggaggctggtgaaggagggcagggttcttttctctacgtgtcatgttaaaattgccaaataaagtacctctgcctgtga

SEQ ID NO: 62097 - DNA, 2532 bp, Homo Sapiens
cggcgccgctcgctcccccgacccggactcccccatgtatgacgactcctacgtgcccgggtttgaggactcggaggcgggttcagccgactcctacaccagccgcccatctctggactcagacgtctccctggaggaggaccgggagagtgcccggcgtgaagtagagagccaggctcagcagcagctcgaaagggccaagcacaaacctgtggcatttgcggtgaggaccaatgtcagctactgtggcgtactggatgaggagtgcccagtccagggctctggagtcaactttgaggccaaagattttctgcacattaaagagaagtacagcaatgactggtggatcgggcggctagtgaaagagggcggggacatcgccttcatccccagcccccagcgcctggagagcatccggctcaaacaggagcagaaggccaggagatctgggaacccttccagcctgagtgacattggcaaccgacgctcccctccgccatctctagccaagcagaagcaaaagcaggcggaacatgttcccccatatgacgtggtgccctccatgcggcctgtggtgctggtgggaccctctctgaaaggttatgaggtcacagacatgatgcagaaggctctcttcgacttcctcaaacacagatttgatggcaggatctccatcacccgagtcacagccgacctctccctggcaaagcgatctgtgctcaacaatccgggcaagaggaccatcattgagcgctcctctgcccgctccagcattgcggaagtgcagagtgagatcgagcgcatatttgagctggccaaatccctgcagctagtagtgttggacgctgacaccatcaaccacccagcacagctggccaagacctcgctggcccccatcatcgtctttgtcaaagtgtcctcaccaaaggtactccagcgtctcattcgctcccgggggaagtcacagatgaagcacctgaccgtacagatgatggcatatgataagctggttcagtgcccaccggagtcatttgatgtgattctggatgagaaccagctggaggatgcctgtgagcacctggctgagtacctggaggtttactggcgggccacgcaccacccagcccctggccccggacttctgggtcctcccagtgccatccccggacttcagaaccagcagctgctgggggagcgtggcgaggagcactccccccttgagcgggacagcttgatgccctctgatgaggccagcgagagctcccgccaagcctggacaggatcttcacagcgtagctcccgccacctggaggaggactatgcagatgcctaccaggacctgtaccagcctcaccgccaacacacctcggggctgcctagtgctaacgggcatgacccccaagaccggcttctagcccaggactcagagcacaaccacagtgaccggaactggcagcgcaaccggccttggcccaaggatagctactgacagcctcctgctgccctaccctggcaggcacaggcgcagctggctggggggcccactccaggcagggtggcgttagactggcatcaggctggcactaggctcagcccccaaaaccccctgcccagccccagcttcagggctgcctgtggtcccaaggttctgggagaaacaggggaccccctcacctcctgggcagtgacccctactaggctcccattccaggtactagctgtgtgttctgcacccctggcaccttcctctcctcccacacaggaagctgccccactgggcagtgccctcaggccaggatccccttagcagggtccttcccaccagactcagggaagggatgccccattaaagtgacaaaagggtggggtgtgggcaccatggcatgaggaagaaacaaggtccctgagcaggcacaagtcctgacagtcaagggactgctttggcatccagggcctccagtcacctcactgccatacattagaaatgagacaatcaaagccccccccagggtggcacacccatccgtttgctggggtgtggcagccacatccaagactggagcagcaggctggccacgctcgggccagagagagctcacagctgaagctcttggagggaagggctctcctcaccctgccaggaagcttcttaacatgtgacaggaccagggaccaggagcatggtgaagccaagtggcagatgggagccaacctggatgggggtttggggaaggagggcatgtgtagcagagaacttaggggggcctccttgcctttctcattcttttgccctgcatcctgtcatttctgttcttgtccctcatacatctttggagaaccgggctccagactttgttccctgactcatagctgccgcttgttaggttagggttagatggggagagacagggcacagaggacctgtctccccggctactcttgccttatggctctagtgtgtgacctacagagcatgctccacaagcccctgcctcacctcactgtcatcactaataaacatcatgcacagtc

SEQ ID NO: 62098 - DNA, 2417 bp, Homo Sapiens; identical to SEQ ID NO: 31838

SEQ ID NO: 62099 - DNA, 1509 bp, Homo Sapiens
taacattaaagagaaaatgctgctatccgtgacttccaggcccgggatttcgacttttggctacaatagaaacaacaagaagccatatgtgtcactggctcagcagatggcaccacctagcccaagcaacagtacacctaacagcagtagtggaagcaatggaaatgaccagctgagcaaaaccaacctatacatccgaggattgcaaccaggcactactgaccaagatcttgtcaagctgtgtcagccatatggcaagattgtttccactaaggccatactggacaagaccacaaacaaatgtaaaggctatggctttgtagattttgacagcccttcagcagcacagaaagctgtaacagcactgaaggccagcggtgtacaggcacagatggcaaagcaacaggaacaggaccccacaaatttatacatctcaaacctcccactgtcaatggatgagcaggaactggaggggatgctgaagccctttggccaggttatctccacccgtatccttcgagataccagtgggaccagcagaggtgttggctttgcaaggatggagtccacagagaagtgtgaagccatcatcacccactttaatggaaaatatattaagacaccccctggagtaccagccccatccgatcccttgctttgcaaatttgctgatggcgggccaaagaaacgacagaaccaaggaaaatttgtgcaaaatggacgggcttggccaaggaatgcagacatgggcgtcatggccttgacctatgaccccaccacagctcttcagaatgggttttacccagccccctataacatcacccccaacaggatgcttgctcagtctgcactctccccatacctttcctctcctgtgtcttcgtatcagagagtgactcagacatctcctctacaagtacctaacccatcctggatgcaccaccattcatacctcatgcagccttcaggttcagttctgacaccagggatggaccatcccatttctctccagcctgcctccatgatgggaccccttacccagcaactgggccatctctccctcagcagcacaggcacgtatatgccgacggctgcagctatgcaaggagcttacatctcccagtacacccctgtgccttcttccagtgtttcagtcgaggagagcagcggccaacagaaccaagtggcagtggacgcaccctcagagcatggggtctattctttccagttcaacaagtaacagtgggattcccctccccatctttactgaatagaaatgaattcttggagatactcatgctcccagattccagagggttaaccaggaatggagaccatccgtcggccctgctaaggactaacacttagccatcgtttttcacaggcctgggcctggaaaaagaaatctctacgttcctgccctttactattgctgatggagcctgggggaaccatcactttttttgtgtgctacattcaaggagatcaaaaaaacttttcttcttttgc

SEQ ID NO: 62100 - DNA, 2562 bp, Homo Sapiens
atgctgtccttccagtaccccgacgtgtaccgcgacgagaccgccgtacaggattatcatggtcataaaatttgtgacccttacgcctggcttgaagaccccgacagtgaacagactaaggcctttgtggaggcccagaataagattactgtgccatttcttgagcagtgtcccatcagaggtttatacaaagagagaatgactgaactatatgattatcccaagtatagttgccacttcaagaaaggaaaacggtatttttatttttacaatacaggtttgcagaaccagcgagtattatatgtacaggattccttagagggggaggccagagtgttcctggaccccaacatactgtctgacgatggcacagtggcactccgaggttatgcgttcagcgaagatggtgaatattttgcctatggtctgagtgccagtggctcagactgggtgacaatcaagttcatgaaagttgatggtgccaaagagcttccagatgtgcttgaaagagtcaagttcagctgtatggcctggacccatgatgggaagggaatgttctacaactcataccctcaacaggatggaaaaagtgatggcacagagacatctaccaatctccaccaaaagctctactaccatgtcttgggaaccgatcagtcagaagatattttgtgtgctgagtttcctgatgaacctaaatggatgggtggagctgagttatctgatgatggccgctatgtcttgttatcaataagggaaggatgtgatccagtaaaccgactctggtactgtgacctacagcaggaatccagtggcatcgcgggaatcctgaagtgggtaaaactgattgacaactttgaaggggaatatgactacgtgaccaatgaggggacggtgttcacattcaagacgaatcgccagtctcccaactatcgcgtgatcaacattgacttctgggatcctgaagagtctaagtggaaagtacttgttcctgagcatgagaaagatgtcttagaatggatagcttgtgtcaggtccaacttcttggtcttatgctacctccatgacgtcaagaacattctgcagctccatgacctgactactggtgctctccttaagaccttcccgctcgatgtcggcagcattgtagggtacagcggtcagaagaaggacactgaaatcttctatcagtttacttcctttttatctccaggtatcatttatcactgtgatcttaccaaagaggagctggagccaagagttttccgagaggtgaccgtaaaaggaattgatgcttctgattaccagacagtccagattttctaccctagcaaggatggtacgaagattccaatgttcattgtgcataaaaaaggcataaaattggatggctctcatccagctttcttatatggctatggcggcttcaacatatccatcacacccaactacagtgtttccaggcttatttttgtgagacacatgggtggtatcctggcagtggccaacatcagaggaggtggcgaatatggagagacgtggcataaaggtggtatcttggccaacaaacaaaactgctttgatgactttcagtgtgctgctgagtatctgatcaaggaaggttacacatctcccaagaggctgactattaatggaggttcaaatggaggcctcttagtggctgcttgtgcaaatcagagacctgacctctttggttgtgttattgcccaagttggagtaatggacatgctgaagtttcataaatataccatcggccatgcttggaccactgattatgggtgctcggacagcaaacaacactttgaatggcttgtcaaatactctccattgcataatgtgaagttaccagaagcagatgacatccagtacccgtccatgctgctcctcactgctgaccatgatgaccgcgtggtcccgcttcactccctgaagttcattgccacccttcagtacatcgtgggccgcagcaggaagcaaagcaaccccctgcttatccacgtggacaccaaggcgggccacggggcggggaagcccacagccaaagtgatagaggaagtctcagacatgtttgcgttcatcgcgcggtgcctgaatgtcgactggattccataaacagttttcgtgcttcctcctgacagcgacagaaaacctcaagggctttcccacgttgacaccaagaaaccactgggcataatgcttccccacgggaacattattcctgcactcacaggctacagttgaacagaactgccgtgggaattttatcttttttaggcttctcctttttagcaaggccttggtgtttctttttccaccctgtctaggcacatgtggttttttggtgttttttttaagggcatgttgggataaatagctaaatggcaacaaacacattgtgaatattagattgctgaattaaggatcatagtcgggcatacttatttatatccataacctctatatctttaaataaatgtgagaactgttctcatggagaagacttctttgcaacaataataaatgttatttaagaatgaaaaa

SEQ ID NO: 62101 - DNA, 1100 bp, Homo Sapiens; identical to SEQ ID NO: 31855

SEQ ID NO: 62102 - DNA, 5253 bp, Homo Sapiens
gtcgccgccagcgtctgtgccgcgtcccttgctctgtgaaggacaggcctcgcgccaggaccccggtggacttctgaggtgccaggatggtgggagaactccgctacagggaattcagggtgcccctggggcccggcttacatgcctatcctgatgagctgatccgccagcgcgtgggccatgatgggcatcctgagtaccagatccgttggctcatcctgcggcgtggcgatgagggggacgggggctctggccaagtggactgcaaggctgagcacatcctgctgtggatgtccaaggatgagatctatgccaactgccacaagatgctgggcgaggatggccaggtcatcgggccctcccaggagtctgcaggggaggttggggccctggacaaatctgtgctggaggagatggaaaccgatgtgaagtccctcattcagagagcccttcggcagctggaggagtgtgtgggcactatccctcctgctcctctacttcacactgtccacgtgctcagcgcctatgccagcattgagcccctcactggagtattcaaggacccaagggtcctggacttgctcatgcacatgttgagtagtcctgattatcagattcgctggagtgcaggccggatgatacaagccctgtcctcccatgacgctgggacccggactcagatccttctgtcactgagccaacaagaagccattgagaaacacctggattttgacagccgctgtgctctgctagcactgtttgcacaggccacgctctctgaacaccccatgtctttcgagggcattcagctaccacaggtcccaggaagggtgctcttctccctggtgaagcggtatttgcatgtcacctcgctcctggatcagctgaacgacagtgctgcggagccaggagcccagaacacctctgctcctgaggagttgagtggggagaggggtcaactggagctggagttcagtatggccatgggcaccctgatctcggagctggtgcaagccatgcgctgggaccaggcctcagacagaccaaggagctcagcacggtcccccggttccatcttccagcctcagctggcagatgtgagcccagggctccccgctgcccaggctcagccctccttcaggaggtcaagacgttttcgccctcgttctgagttcgcaagtggcaatacctatgctttgtatgtgcgggacacactgcagccggggatgcgagtgcggatgctggatgattatgaggagatcagtgccggggatgagggcgagtttcggcagagcaacaacggtgtgcctcctgtgcaggtattttgggagtcaacaggccgcacctattgggtgcactggcacatgctggagatcttgggctttgaggaagacattgaggacatggttgaggctgatgagtaccaaggggcagtggccagtagagtcctgggtagagccctgcctgcctggcgctggaggcccatgacagaactctatgctgtgccttatgtgctgcctgaggatgaggacactgaggagtgtgaacacctgaccctggctgagtggtgggaactcctcttcttcatcaagaagctggatggacctgaccatcaggaggttctccagatcctccaggagaacctagatggggagattctggatgatgagatcctagctgaactggccgtgcccatagaattggcccaggacttgctgctgactctgccacagcgactcaatgacagtgccctcagggacctgatcaactgccatgtctacaagaagtatgggcctgaagccctagcagggaaccaagcctacccatcccttctagaagcccaagaagatgtcctcctgctagacgcgcaggcccaggctaaggactcagaagatgcagccaaagtggaagcaaaagaacccccatctcagagtcccaacactcccctgcagcgtctggtggagggttatggtccagctgggaaaatcctcctggatctagagcaagccctcagctcagaggggacccaggagaacaaggtcaagccactcctgctgcagctgcagcggcagccgcagcccttcctggcactgatgcagagcctggacactccggagactaacaggaccctgcacctgactgtgctgagaatcctgaagcagctggtggacttccccgaggcactgctgctcccctggcacgaggccgtggatgcctgcatggcctgcctgcggtccccaaacactgatcgagaggtgctccaggaactgattttcttcctgcaccgcctgacctcagtgagcagggactatgccgtggtgctgaatcagctgggagcaagagacgctatctccaaggccctggaaaagcacctgggaaagctggagctggctcaggagctgcgggacatggtgttcaagtgtgagaagcatgcccacctctaccgcaaactcatcaccaacatcctgggaggctgcatccagatggtgctgggccagatcgaagaccacagacgaacccaccggcccatcaacatccctttctttgatgtgttcctcagatacctgtgccagggctccagtgtggaagtgaaggaggacaagtgctgggagaaggtggaggtgtcctccaacccgcaccgggccagcaagctgacggaccacaaccccaagacctattgggagtccaacggcagcgccggctcccactacatcaccctgcacatgcgccggggcatcctcatcaggcaactgactctgcttgtggctagtgaggactcgagttacatgccggcccgagtggtggtgtgcgggggtgatagcactagctctcttcacacggaactcaactcggtgaatgtgatgccctctgccagccgggtgatcctcctggagaacctgacccgcttctggcccatcatccagatccgcataaagcgctgccagcagggtggcattgatacgcgcattcgggggttagagatcctaggccccaagcccacgttctggccagtgttccgggagcagctctgtcgtcacacacgcctcttctacatggttcgggcacaggcctggagccaggacatggcagaggaccgcaggagcctcctgcacctgagttctagactcaacggtgctctgcgccaggagcagaattttgctgaccgcttcctccctgatgacgaggctgcccaagctctgggcaagacctgctgggaggccctggtcagccccgtggtgcagaacatcacctcccctgatgaggatggcattagccccctgggttggctgctggaccagtacctggagtgtcaggaagctgtcttcaacccccagagccgcggcccagctttcttctcgcgggtgcgccgtctcactcacctgctggtgcatgtcgagccctgtgaggcaccccctcctgtggtggccactcctcggcccaaaggcagaaacagaagccacgactggagctccttggctacccggggccttccaagcagcatcatgagaaacctgacgcgctgttggcgggccgtggtggagaagcaggtgaacaattttctgacctcatcctggcgggatgatgactttgtgccacgctactgtgagcactttaatattctgcagaactcaagctctgaactgtttgggcctcgggcagccttcttgctggcgctgcaaaatggctgtgcgggagccttgctgaagctcccttttctcaaagctgcccacgtgagtgagcagttcgcccggcacattgaccagcagatccagggcagccggatcggtggagcccaggaaatggagaggctggcacagctgcagcaatgcctgcaagctgtcctgattttctccggcttggagatagccaccacttttgagcattattaccagcactacatggcggaccgtctcctgggcgtggtctcgagctggctggagggggccgtgctggagcagatcggtccctgcttccccaaccgcctcccccagcagatgttgcagagcctgagcacctctaaggagctgcagcgccagttccacgtctaccagctccagcagctggatcaggaactcctaaagctggaggatacagagaagaaaatacaggtgggccttggggccagtggcaaggagcacaagagcgagaaggaagaggaagctggggcagcagcagtggtggatgtggcggagggagaggaggaagaggaggagaatgaggacctctactatgaaggggcaatgccagaagtgtctgtgcttgtcctgtcccgacactcctggcctgttgcctcaatctgccacacactgaaccccagaacctgcctgccctcctacctgaggggcactttgaacagatactccaacttctacaacaagagtcagagccaccctgcccttgagcgaggctcacagaggcgactgcagtggacgtggctgggctgggctgagctgcagtttgggaaccagaccctgcatgtgtccaccgtgcagatgtggctactgctgtatctcaacgacctgaaggcggtctctgtggagagtctgctggcgttctcagggctctccgcagacatgctcaatcaggcgattgggcccctcacctcttcaagaggccccctggaccttcacgagcaaaaggatataccaggaggggtcctcaagattcgagatggcagcaaggaacccaggtcgagatgggacattgtgcggctcatcccacctcagacgtacctgcaagctgagggtgaagacggccagaacttggagaagagacggaatcttctgaactgcctcatcgtccgaatcctcaaggcccatggagatgaggggctgcacattgaccagcttgtctgtctggtgctggaggcttggcagaagggcccgtgtcctcccaggggtttggtcagcagccttggtaaggggtctgcatgcagcagcactgacgtcctctcctgcatcctacacctcctgggcaagggcacgctgagacgccatgacgaccggccccaggtgctgtcctatgcagtccctgtgactgtcatggagcctcacactgagtccctgaacccaggctcctcaggccccaacccacccctcaccttccataccctacagattcgctcccggggtgtgccctatgcctcctgcactgccacccagagcttctctaccttccggtagccctagacttggggtcaggggaaggtagagctggagcttttacagaaattaaacccaagagtttgattat

SEQ ID NO: 62103 - DNA, 1324 bp, Homo Sapiens
cttgagaggctctggctcttgcttcttaggcggcccgaggacgccatggccgagtgcccgacactcggggaggcagtcaccgaccacccggaccgcctgtgggcctgggagaagttcgtgtatttggacgagaagcagcacgcctggctgcccttaaccatcgagataaaggataggttacagttacgggtgctcttgcgtcgggaagacgtcgtcctggggaggcctatgacccccacccagataggcccaagcctgctgcctatcatgtggcagctctaccctgatggacgataccgatcctcagactccagtttctggcgcttagtgtaccacatcaagattgacggcgtggaggacatgcttctcgagctgctgccagatgactgatgtatggtcttggcagcacctgtctcctttcaccccagggcctgagcctggccagcctacaatggggatgttgtgtttctgttcaccttcgtttactatgcctgtgtcttctccaccacgctggggtctgggaggaatggacagacagaggatgagctctacccagggcctgcaggacctgcctgtagcccactctgctcgccttagcactaccactcctgccaaggaggattccatttggcagagcttcttccaggtgcccagctatacctgtgcctcggcttttctcagctggatgatggtcttcagcctctttctgtcccttctgtccctcacagcactagtatttcatgttgcacacccactcagctccgtgaacttgtgagaacacagccgattcacctgagcaggacctctgaaaccctggaccagtggtctcacatggtgctacgcctgcatgtaaacacgcctgcaaacgctgcctgccggtaaacacgcctgcaaacgctgcctgcccgtaaacacgcctgcaaacgctgcctgcccacacaggttcacgtgcagctcaaggaaaggcctgaaaggagcccttatctgtgctcaggactcagaagcctctgggtcagtggtccacatcccgggacgcagcaggaggccaggccggcgagccctgtggatgagccctcagaacccttggcttgcccacgtggaaaagggatagaggttgggtttcccccctttatagatggtcacgcacctgggtgttacaaagttgtatgtggcatgaatactttttgtaatgattgattaaatgcaagatagtttatctaacttcgtgcgcaatcagcttctatccttgacttagattctggtggagagaagtgagaataggcagcccccaaataaaaaatattcatggaaaaaaaaaaaaaaa

SEQ ID NO: 62104 - DNA, 2444 bp, Homo Sapiens
tggatagagcgaggagaggtcaaccgtcgtagcgccaataacttctactccatgatccagtcggccaacagccatgtccgcctgcctggtgaacgagaaagctgcccatgagaaagatatggaagaagcaaaggagaagttcaagcaggccctttctggaattctcattcaatttgagcagatagtggctgtgtaccattccgcctccaagcagaaggcatgggaccacttcacaaaagcccagcgaagaacatcagcgtgtggtgcaaacaagctgaggaaattcgcaacattcataatgatgaattaatgggaatcaggcgagaagaagaaatggaaatgtctgatgatgaaatagaagaaatgacagaaacaaaagaaactgaggaatcagccttagtatcacaggcagaagctctgaaggaagaaaatgacagcctccgttggcagctcgatgcctaccggaatgaagtagaactgctcaagcaagaacaaggcaaagtccacagagaagatgaccctaacaaagaacagcagctgaaactcctgcaacaagccctgcaaggaatgcaacagcatctactcaaagtccaagaggaatacaaaaagaaagaagctgaacttgaaaaactcaaagatgacaagttacaggtggaaaaaatgttggaaaatcttaaagaaaaggaaagctgtgcttctaggctgtgtgcctcaaaccaggatagcgaataccctcttgagaagaccatgaacagcagtcctatcaaatctgaacgtgaagcactgctagtggggattatctccacattccttcatgttcacccatttggagcaagcattgaatacatctgttcctacttgcaccgtcttgataataagatctgcaccagcgatgtggagtgtctcatgggtagactccagcataccttcaagcaggaaatgactggagttggagccagcctggaaaagagatggaaattctgtggcttcgagggcttgaagctgacctaaatctctttgcctaacaacttgggactcctgaagataaatatgtgttggacaagcatagaaagtgatttatatttttaatggttttcaagtggaagttcctttgaatttgtcagttcattcctggaaaatcttttgagttaaaataaggatcctaggacagcacctcgaactacaggccctaaagagaaattgcctcaaaccacaagtgctgtaacttcctcccctttctgtcaattggttgtctttaaatattgcaaaagtcctgatgctaaacagtatttggagtgttttcagtgtctgtactactgttgtagaccttggtatttttttaaacactgttaactgaaatgttttgatgatttgtatgtgatttgtgtttctaaacttctctttacattaatgttgttactggtgaaaggcatgagagcagcactaagtcctctgtgtaactgccattgtctttccaatccccagtagaccagtaaataaataacacatcagtgtcttctagaaggtgcctgaccaggttcaccttttaaacgacaaagcatggtttgtggctttttgcaaaattactatgaaccaaaagttgacaaatgttccaaagttattttctctaacatatcacattaaagatctgtttcagaattgtaaaaagtacatctagatgtgtttacagaaagcaagtatccagtatgactggcatgtgttcatgctattcagaatcacttgtaaatagtctgcttttaaaggagggcatgttcagttttctgtgaattaaaatatgctcatgtgtgggcacacacgcacaaacacacacacgcacgcacacagtggcagaaggatttatattaatattctttcccctctggccttcttacagtctgttggtccctttgcttctgttgtcagtgtgttgaattgcaaaccgagtactgctgtaaatactatgtttacttcatgctgaatgtttgcaaagacttgatataagtattaatagtaatgaatcaatgaataaataatgagctagggtttgtgaggctttctacaaataggtcagctccacctggagtgcgaattgccagagacaccttggtagtgcccatcggcaaatcgcaatggcagcatgtgagtggacccattcagaaactttctgcttggtggaaagtaaacagagaggatggaggtttggggcgaatgtcctgaggcagagatggtctttattgtgtgtggtggtggttgtggtatttataataatgcaagcataccctcccttgagtctcaattgaagataaaagaatgtactgagcaagcaaagccaatggagagtatttcacaaaaatactttgtaaatgagatgccagtagtgttcaaagttgtatttttaaaagataaatattcctttttatacctcaaaaaaaaaaaaaaaaaaa

SEQ ID NO: 62105 - DNA, 1806 bp, Homo Sapiens
agcctcgccagagaagacaagggcagaaagcaccatgagtgggggcccaatgggaggaaggcccgggggccgaggagcaccagcggttcagcagaacataccctccaccctcctccaggaccacgagaaccagcgactctttgagatgcttggacgaaaatgcttgacgctggccactgcagttgttcagctgtacctggcgctgccccctggagctgagcactggaccaaggagcattgtggggctgtgtgcttcgtgaaggataacccccagaagtcctacttcatccgcctttacggccttcaggctggtcggctgctctgggaacaggagctgtactcacagcttgtctactccacccccacccccttcttccacaccttcgctggagatgactgccaagcggggctgaactttgcagacgaggacgaggcccaggccttccgggccctcgtgcaggagaagatacaaaaaaggaatcagaggcaaagtggagacagacgccagctacccccaccaccaacaccagccaatgaagagagaagaggagggctcccacccctgcccctgcatccaggtggagaccaaggaggccctccagtgggtccgctctccctggggctggcgacagtggacatccagaaccctgacatcacgagttcacgataccgtgggctcccagcacctggacctagcccagctgataagaaacgctcagggaagaagaagatcagcaaagctgatattggtgcacccagtggattcaagcatgtcagccacgtggggtgggacccccagaatggatttgacgtgaacaacctcgacccagatctgcggagtctgttctccagggcaggaatcagcgaggcccagctcaccgacgccgagacctctaaacttatctacgacttcattgaggaccagggtgggctggaggctgtgcggcaggagatgaggcgccaggagccacttccgccgcccccaccgccatctcgaggagggaaccagctcccccggccccctattgtggggggtaacaagggtcgttctggtccactgccccctgtacctttggggattgccccacccccaccaacaccccggggacccccacccccaggccgagggggccctccaccaccaccccctccagctactggacgttctggaccactgccccctccaccccctggagctggtgggccacccatgccaccaccaccgccaccaccgccaccgccgcccagctccgggaatggaccagcccctcccccactccctcctgctctggtgcctgccgggggcctggcccctggtgggggtcggggagcgcttttggatcaaatccggcagggaattcagctgaacaagacccctggggccccagagagctcagcgctgcagccaccacctcagagctcagagggactggtgggggccctgatgcacgtgatgcagaagagaagcagagccatccactcctccgacgaaggggaggaccaggctggcgatgaagatgaagatgatgaatgggatgactgagtggctgagttacttgctgccctgtgctcctccccgcaggacatggctccccctccacctgctctgtgcccaccctccactctcctcttccagggcccccaaccccccatttcttccccaccaacccctccaatgctgttatccctgcctggtcctcacactcacccaacaatcccaaggccctttttatacaaaaattctcagttctcttcactcaaggatttttaaagaaaaataaaagaattgtctttctgtctctctat

SEQ ID NO: 62106 - DNA, 2355 bp, Homo Sapiens
ccgttgcctcaacgtccaacccttctgcagggctgcagtccggccaccccaagaccttgctgcagggtgcttcggatcctgatcgtgagtcgcggggtccactccccgcccttagccagtgcccagggggcaacagcggcgatcgcaacctctagtttgagtcaaggtccagtttgaatgaccgctctcagctggtgaagacatgaccaccctggactccaacaacaacacaggtggcgtcatcacctacattggctccagtggctcctccccaagccgcaccagccctgaatccctctatagtgacaactccaatggcagcttccagtccctgacccaaggctgtcccacctacttcccaccatcccccactggctccctcacccaagacccggctcgctcctttgggagcattccacccagcctgagtgatgacggctccccttcttcctcatcttcctcgtcgtcatcctcctcctccttctataatgggagcccccctgggagtctacaagtggccatggaggacagcagccgagtgtcccccagcaagagcaccagcaacatcaccaagctgaatggcatggtgttactgtgtaaagtgtgtggggacgttgcctcgggcttccactacggtgtgctcgcctgcgagggctgcaagggctttttccgtcggagcatccagcagaacatccagtacaaaaggtgtctgaagaatgagaattgctccatcgtccgcatcaatcgcaaccgctgccagcaatgtcgcttcaagaagtgtctctctgtgggcatgtctcgagacgctgtgcgttttgggcgcatccccaaacgagagaagcagcggatgcttgctgagatgcagagtgccatgaacctggccaacaaccagttgagcagccagtgcccgctggagacttcacccacccagcaccccaccccaggccccatgggcccctcgccaccccctgctccggtcccctcacccctggtgggcttctcccagtttccacaacagctgacgcctcccagatccccaagccctgagcccacagtggaggatgtgatatcccaggtggcccgggcccatcgagagatcttcacctacgcccatgacaagctgggcagctcacctggcaacttcaatgccaaccatgcatcaggtagccctccagccaccaccccacatcgctgggaaaatcagggctgcccacctgcccccaatgacaacaacaccttggctgcccagcgtcataacgaggccctaaatggtctgcgccaggctccctcctcctaccctcccacctggcctcctggccctgcacaccacagctgccaccagtccaacagcaacgggcaccgtctatgccccacccacgtgtatgcagccccagaaggcaaggcacctgccaacagtccccggcagggcaactcaaagaatgttctgctggcatgtcctatgaacatgtacccgcatggacgcagtgggcgaacggtgcaggagatctgggaggatttctccatgagcttcacgcccgctgtgcgggaggtggtagagtttgccaaacacatcccgggcttccgtgacctttctcagcatgaccaagtcaccctgcttaaggctggcacctttgaggtgctgatggtgcgctttgcttcgttgttcaacgtgaaggaccagacagtgatgttcctaagccggaccacctacagcctgcaggagcttggtgccatgggcatgggagacctgctcagtgccatgttcgacttcagcgagaagctcaactccctggcgcttaccgaggaggagctgggcctcttcaccgcggtggtgcttgtctctgcagaccgctcgggcatggagaattccgcttcggtggagcagctccaggagacgctgctgcgggctcttcgggctctggtgctgaagaaccggcccttggagacttcccgcttcaccaagctgctgctcaagctgccggacctgcggaccctgaacaacatgcattccgagaagctgctgtccttccgggtggacgcccagtgacccgcccggccggccttctgccgctgcccccttgtacagaatcgaactctgcacttctctctcctttacgagacgaaaaggaaaagcaaaccagaatcttatttatattgttataaaatattccaagatgagcctctggccccctgagccttcttgtaaatacctgcctccctcccccatcaccgaacttcccctcctcccctatttaaaccactctgtctcccccacaaccctcccctggccctctgatttgttctgttcctgtctcaaatccaatagttcacagctaaaaaaaaaaaaaaaaaaag

SEQ ID NO: 62107 - DNA, 701 bp, Homo Sapiens
cggacaatggggacccgggacgacgagtacgactacctattcaaagtggtgctcatcggggactcaggcgtgggcaagagcaacctgctgtcgcgcttcacccgcaacgagttcaacctggagagcaagagcaccatcggcgtggagttcgccacccgcagcatccaggtggacggcaagaccatcaaggcgcagatctgggacaccgctggccaggagcgctaccgccgcatcacctccgcgtactaccgtggtgcagtgggcgccctgctggtgtacgacatcgccaagcacctgacctatgagaacgtggagcgctggctgaaggagctgcgggaccacgcagacagcaacatcgtcatcatgctggtgggcaacaagagtgacctgcgccacctgcgggctgtgccaactgacgaggcccgcgccttcgcagaaaagaacaacttgtccttcatcgagacctcagccttggattccactaacgtagaggaagcattcaagaacatcctcacagagatctaccgcatcgtgtcacagaaacagatcgcagaccgcgctgcccacgacgagtccccggggaacaacgtggtggacatcagcgtgccgcccaccacggacggacagaagcccaacaagctgcagtgctgccagaacctgtgacccctgcgtcctccacccagcgtgcgtgcacgtcctcc

SEQ ID NO: 62108 - DNA, 555 bp, Homo Sapiens
  misc_feature (403)..(403): n is a, c, g, or t
  misc_feature (420)..(420): n is a, c, g, or t
  misc_feature (443)..(443): n is a, c, g, or t
  misc_feature (473)..(473): n is a, c, g, or t
  misc_feature (499)..(499): n is a, c, g, or t
  misc_feature (518)..(518): n is a, c, g, or t
  misc_feature (543)..(543): n is a, c, g, or t
ttttttttcgtttatgccaacaactttattgagcaccaattagggcaagggactaccaccttcacagttctcttgggcttattaacgtcgtggcccactcatttatttcacaaatgaggaaaccgaggaccctgctgggagagtttggggcccaaccagggctcccactgagtctggggcaccctcagctcctgcaccacaaagcttcggttgacttgtttcaatgtaaagaacgttacttaaacaggtctgagtgctaggcaaactcacaagacctagctcaaagtttgagcacattgggtatggaaaaaaaggaaaaaaggagaattcaggcaccttgtgatatttaaggcaggggcatttgggcatttagccaaccaaggcccaggaaagtcgggcaaanttctttaggcctgaggnattccccaggaacacctgaggantaggttcctggcagtttgaggggtttaaantcgtggcacccgcatttggcaccacntcccttttgaggttttgtntgacagccctttttcgggtttttgnagtttcgggggt

SEQ ID NO: 62109 - DNA, 487 bp, Homo Sapiens
  misc_feature (404)..(404): n is a, c, g, or t
  misc_feature (413)..(413): n is a, c, g, or t
  misc_feature (430)..(430): n is a, c, g, or t
  misc_feature (440)..(440): n is a, c, g, or t
  misc_feature (446)..(446): n is a, c, g, or t
  misc_feature (462)..(462): n is a, c, g, or t
  misc_feature (486)..(486): n is a, c, g, or t
ttttttttttttagagaacagagaagtttattttacactatccgtccaagaaaacaatcgccataaaccagtgcaaaatgtgcaacagaatcaataagtgtgtcttagctctgagagcccaaattggtgatttcttctcctgttcctcagttgggcacgtgcccatccgttaatgctggttcgcaccacagacagaaacattcaaccaatttgtagcaggttatttttacaaattcataccagaatgtgtacaagggacagggaaaaccataccgaatgaatgataagtgatcagtgcttaaagtaaatacaagggacaggcacgggcaagaatccacagttttcaattaaattacaagtggaacaaggctgggtgtgttctccaactggggtggggatttagntctggcatnattaatttcaggcttcnttacaaattnttggcnggggttgtttggggcngttgtttgggcaaaaacgtttcant

SEQ ID NO: 62110 - DNA, 514 bp, Homo Sapiens
  misc_feature (38)..(38): n is a, c, g, or t
  misc_feature (58)..(58): n is a, c, g, or t
  misc_feature (126)..(126): n is a, c, g, or t
  misc_feature (306)..(306): n is a, c, g, or t
  misc_feature (384)..(384): n is a, c, g, or t
  misc_feature (394)..(394): n is a, c, g, or t
  misc_feature (438)..(438): n is a, c, g, or t
  misc_feature (463)..(463): n is a, c, g, or t
  misc_feature (472)..(472): n is a, c, g, or t
  misc_feature (479)..(479): n is a, c, g, or t
  misc_feature (488)..(488): n is a, c, g, or t
  misc_feature (493)..(493): n is a, c, g, or t
  misc_feature (501)..(501): n is a, c, g, or t
  misc_feature (506)..(506): n is a, c, g, or t
  misc_feature (512)..(512): n is a, c, g, or t
gctgagactcattcccagtttccagggcccggtatttngacactagttgccaagtctngggcctggggattttagggaccagcggttgtgaccatctttcctgagcaccaagggcttccccttttnttgccaaaaaggtagttctcgcgcttgctaggctggcctctcttgcctccccttggccggggcaacaccagttactgtgagcatcaccctggtgtggtgagtcacctctagtcggccctcttgctgctgccaaccaaatcagtattagctttgagcactgcactgtttctccctcccttnggacgacacaaagactagcatgaggcactcttttgtgggggggcagccctattcctggggtttcagcatgggacaaanggggttagcntgggggtttattagagaaacagttgggtttcccctaaccttttnccgggggaagaacccaagatttggnctttagttnaaggaantgggagatnacaanattttggnttttncaattncc

SEQ ID NO: 62111 - DNA, 552 bp, Homo Sapiens
  misc_feature (15)..(15): n is a, c, g, or t
  misc_feature (400)..(400): n is a, c, g, or t
  misc_feature (446)..(446): n is a, c, g, or t
  misc_feature (529)..(529): n is a, c, g, or t
caaacctgtacccangcccctccagccctgcgtgttccattctgccttctcagagtgcccttgctgcacccagaccaccggccaggagagaccttctctcccactccagcccctctcactgcccttcaactagagctttcacctttttacatttcccttctgaaggacacaaatctgcttttctgcccatacactggcccaagggctcacctaacttgggagggaaggggctgttggtacaaggatgattttctgttagactgccattttgcacggtctcccccttcccatctgatgtgtcctgccccttcagctctttggccttatctgtgttcacttgttcactttaggcaaaaatgacaggcgggccatttgttattcaggcctctgggtgggttgnttgtggaggtggggattttagcggggaacaggtgggatttggggangatggggcagggaggggagttggtagttggcagttttttggagctatctgattaaggccattccgttagttcagttgttgccngggagaagggggacagagtcagt

SEQ ID NO: 62112 - DNA, 2279 bp, Homo Sapiens; identical to SEQ ID NO: 31896

SEQ ID NO: 62113 - DNA, 1641 bp, Homo Sapiens
gattcccctcaccctctgcatcctcaaccccatccagtacctcgaagtcctcgagcggtgggaccccggcgggtgaggaggaagaggaggaggaagaggaggaagaggatgacctgagtgagctgccaccgctggaggacatgggacaacccccggcggaggaggctgagcagcctggggccctggcccgagagttccttgctgccatggagcccgagcccgccccagccccggccccagaagagtggctggacattctggggaacgggctgttgaggaagaagacgctggtcccagggccgccaggttcgagccgcccggtcaagggccaggtggtcaccgtacatctgcagacgtcgctggagaatggcacacgggtgcaggaggagccggagctggtgttcactctgggtgactgtgacgtcatccaggccctggatctcagtgtcccactcatggacgtgggggagacggccatggtcactgctgactccaagtactgctacggcccccaaggcaggagcccatacatccccccgcacgcggccctgtgcctggaggtgaccctgaagacggctgtggacgggcctgacctggagatgctcacggggcaggagcgcgtggccctggccaaccggaagcgggagtgcggcaacgcccactaccagcgggcggacttcgtcctggccgccaactcctacgacctcgccatcaaggctatcacctccagcgccaaagtggacatgacgttcgaggaggaggcacagctcctgcagttgaaggtgaagtgtctgaacaacctggcggcctcgcagctgaagctcgaccactaccgcgcagccctgcgctcctgcagccttgtgctggagcaccagccagacaacatcaaggctctcttccgcaagggcaaggtgctggcccagcagggggagtacagtgaggccatccccatcctgagggcagccctgaagctggaaccttccaacaagacgatccacgcagagctctcaaagctggtgaagaagcatgcggcgcagcggagcacggagaccgccttgtaccggaaaatgctgggcaaccccagccggctgcctgctaagtgccctggcaagggtgcctggtccatcccatggaagtggctgtttggggcgactgctgttgccttggggggtgtggcactctctgtggtcatcgctgccaggaactgaccacctaggtggctgccaccccctctgcacaccatggaccctgccctgcgctccccaactcccccaggctccctgtccactgccctccctggtctggccccctcctccgggttaggggagcaaggattgggggtcgtgcagcccagccagcaggagggactgaggccctctaggaggaaagcccagagggagggggccctcattccttcagacccagttttcccccaccctccttaccccgctgggctaggtctccgccagggctggcctcagtttctcctcaacaggcctgggggcagcccttcccctgcctagtccccgcctgagtgccagccccccaccccgcctgccgccccctgtccaggttccctccccgccacagtgaaataaagcatcccaccctgcaaaaaaaaaaaaaaaaaaaaaggaattc

SEQ ID NO: 62114 - DNA, 2980 bp, Homo Sapiens
gtccaacttggccggaagctgcggagaggctcagccaccggaagtcagtggagggttcggccggacgctctagaatcccggaggaccgggatctctgtggttggccgtgacgggcaccctctaccggggatgacacattcccagagctcctgggaccaagcaaatggcggacacaattccctgggcggaaggggacttcgggagccagtagccaagacaccatggccgagcctctgaaggaggaagacggcgaggacggctctgcggagccccccgggcccgtgaaggtcgaacccgcccacaccgctgcctctgtagcggccaagaacctggccctgcttaaagcccgctccttcgatgtgacctttgacgtgggcgacgagtacgagatcatcgagaccataggcaacggggcctatggagtggtgtcctccgcccgccgccgcctcaccggccagcaggtggccatcaagaagatccctaatgctttcgatgtggtgaccaatgccaagcggaccctcagggagctgaagatcctcaagcactttaaacacgacaacatcatcgccatcaaggacatcctgaggcccaccgtgccctatggcgaattcaaatctgtctacgtggtcctggacctgatggaaagcgacctgcaccagatcatccactcctcacagcccctcacactggaacacgtgcgctacttcctgtaccaactgctgcggggcctgaagtacatgcactcggctcaggtcatccaccgtgacctgaagccctccaacctattggtgaatgagaactgtgagctcaagattggtgactttggtatggctcgtggcctgtgcacctcgcccgctgaacatcagtacttcatgactgagtatgtggccacgcgctggtaccgtgcgcccgagctcatgctctctttgcatgagtatacacaggctattgacctctggtctgtgggctgcatctttggtgagatgctggcccggcgccagctcttcccaggcaaaaactatgtacaccagctacagctcatcatgatggtgctgggtaccccatcaccagccgtgattcaggctgtgggggctgagagggtgcgggcctatatccagagcttgccaccacgccagcctgtgccctgggagacagtgtacccaggtgccgaccgccaggccctatcactgctgggtcgcatgctgcgttttgagcccagcgctcgcatctcagcagctgctgcccttcgccaccctttcctggccaagtaccatgatcctgatgatgagcctgactgtgccccgccctttgactttgcctttgaccgcgaagccctcactcgggagcgcattaaggaggccattgtggctgaaattgaggacttccatgcaaggcgtgagggcatccgccaacagatccgcttccagccttctctacagcctgtggctagtgagcctggctgtccagatgttgaaatgcccagtccctgggctcccagtggggactgtgccatggagtctccaccaccagccccgccaccatgccccggccctgcacctgacaccattgatctgaccctgcagccacctccaccagtcagtgagcctgccccaccaaagaaagatggtgccatctcagacaatactaaggctgcccttaaagctgccctgctcaagtctttgaggagccggctcagagatggccccagcgcacccctggaggctcctgagcctcggaagccggtgacagcccaggagcgccagcgggagcgggaggagaagcggcggaggcggcaagaacgagccaaggagcgggagaaacggcggcaggagcgggagcgaaaggaacggggggctggggcctctgggggcccctccactgaccccttggctggactagtgctcagtgacaatgacagaagcctgttggaacgctggactcgaatggcccggcccgcagccccagccctcacctctgtgccggcccctgccccagcgccaacgccaaccccaaccccagtccaacctaccagtcctcctcctggccctgtagcccagcccactggcccgcaaccacaatctgcgggctctacctctggccctgtaccccagcctgcctgcccaccccctggccctgcaccccaccccactggccctcctgggcccatccctgtccccgcgccaccccagattgccacctccaccagcctcctggctgcccagtcacttgtgccaccccctgggctgcctggctccagcaccccaggagttttgccttacttcccacctggcctgccgcccccagacgccgggggagcccctcagtcttccatgtcagagtcacctgatgtcaaccttgtgacccagcagctatctaagtcacaggtggaggaccccctgccccctgtgttctcaggcacaccaaagggcagtggggctggctacggtgttggctttgacctggaggaattcttaaaccagtctttcgacatgggcgtggctgatgggccacaggatggccaggcagattcagcctctctctcagcctccctgcttgctgactggctcgaaggccatggcatgaaccctgccgatattgagtccctgcagcgtgagatccagatggactccccaatgctgctggctgacctgcctgacctccaggacccctgaggcccccagcctgtgccttgctgccacagtagacctagttccaggatccatgggagcattctcaaaggctttagccctggacccagcaggtgaggctcggcttggattattctgcaggttcatctcagacccacctttcagccttaagcagccacctgagccaccaccgagccatggcaggatcgggagaccccaactccccctgaacaatccttttcagtattatatttttattattattatgttattattacactgtctttttgccatcaaaatgaggcctgtgaaatacaaggttcccttctgca

SEQ ID NO: 62115 - DNA, 4463 bp, Homo Sapiens; identical to SEQ ID NO: 29900

SEQ ID NO: 62116 - DNA, 3552 bp, Homo Sapiens; identical to SEQ ID NO: 31928

SEQ ID NO: 62117 - DNA, 604 bp, Homo Sapiens
  misc_feature (508)..(508): n is a, c, g, or t
  misc_feature (524)..(524): n is a, c, g, or t
  misc_feature (532)..(532): n is a, c, g, or t
  misc_feature (585)..(585): n is a, c, g, or t
tttcatgaagaccagtttattttacatgcttgctttcacattctttactgggaatttaaggccttttttcagccttaacttgtataccaacctcaaggattttgtttgatacagaaaaggatagggctgggcttctgccaaggactgataacctgcctgccaaaaggaagagggaatgaaagccttttgtccttctaggccccttacagtacctcaaaatctaaaggccttaaaggggaaaaaaaccgtatctgttctttctccttatctcctacccttctctttaagcatattgaagatggacttttttccaaatgtttatttgtaggaagaggtgatgagtgcaggccagcagctggagaactttacagctttgatgcaccaggaactgtattcaagctgagggcaaaagcctcctagggagggagccaggtccaccaaggccagagacagacaggcgagactgtggaaggccagggagatgctgcctggtaagtgctccgctggnctactgggcaagtccnccgggggntctagagctgataggaagaaggagtccattttgaagtcctgcctggagacttngacctagctgaactaaggt

SEQ ID NO: 62118 - DNA, 6662 bp, Homo Sapiens
ggcggttaagtcctgtacctaggaaagagggcgagctctggggcgctctccggtgtcatgaggagcttcaaaagagtcaactttgggactctgctaagcagccagaaggaggctgaagagttgctgcccgacttgaaggtgggggtgctgcctggctcgggatacacctggctttccaaactgagctgttttgtgtttgccttttgaagagatggataagagttcctgtccaaccctccagctggttttcccagcagccgatctgatgctgagaggagacaagcttgtgatgccatcctgagggcttgcaaccagcagctgactgctaagctagcttgccctaggcatctggggagcctgctggagctggcagagctggcctgtgatggctacttagtgtctaccccacagcgtcctcccctctacctggaacgaattctctttgtcttactgcggaatgctgctgcacaaggaagcccagaggccacactccgccttgctcagcccctccatgcctgcttggtgcagtgctctcgcgaggctgctccccaggactatgaggccgtggctcggggcagcttttctctgctttggaagggggcagaagccctgttggaacggcgagctgcatttgcagctcggctgaaggccttgagcttcctagtactcttggaggatgaaagtaccccttgtgaggttcctcactttgcttctccaacagcctgtcgagcggtagctgcccatcagctatttgatgccagtggccatggtctaaatgaagcagatgctgatttcctagatgacctgctctccaggcacgtgatcagagccttggtgggtgagagagggagctcttctgggcttctttctccccagagggccctctgcctcttggagctcaccttggaacactgccgtcgcttttgctggagccgccaccatgacaaagccatcagcgcagtggagaaggctcacagttacctaaggaacaccaatctagcccctagccttcagctatgtcagctgggggttaagctgctgcaggtcggggaggaaggacctcaggcagtggccaagcttctgatcaaggcatcagctgtcctgagcaagagtatggaggcaccatcacccccacttcgggcattgtatgagagctgccagttcttcctttcaggcctggaacgaggcaccaagaggcgctatagacttgatgccattctgagcctctttgcttttcttggagggtactgctctcttctgcagcagctgcgggatgatggtgtgtatgggggctcctccaagcaacagcagtcttttcttcagatgtactttcagggacttcacctctacactgtggtggtttatgactttgcccaaggctgtcagatagttgatttggctgacctgacccaactagtggacagttgtaaatctaccgttgtctggatgctggaggccttagagggcctgtcgggccaagagctgacggaccacatggggatgaccgcttcttacaccagtaatttggcctacagcttctatagtcacaagctctatgccgaggcctgtgccatctctgagccgctctgtcagcacctgggtttggtgaagccaggcacttatcccgaggtgcctcctgagaagttgcacaggtgcttccggctacaagtagagagtttgaagaaactgggtaaacaggcccagggctgcaagatggtgattttgtggctggcagccctgcaaccctgtagccctgaacacatggctgagccagtcactttctgggttcgggtcaagatggatgcggccagggctggagacaaggagctacagctaaagactctgcgagacagcctcagtggctgggacccggagaccctggccctcctgctgagggaggagctgcaggcctacaaggcggtgcgggccgacactggacaggaacgcttcaacatcatctgtgacctcctggagctgagccccgaggagacaccagccggggcctgggcacgagccacccacctggtagaactggctcaggtgctctgctaccacgactttacgcagcagaccaactgctctgctctggatgctatccgggaagccctgcagcttctggactctgtgaggcctgaggcccaggccagagatcagcttctggacgataaagcacaggccttgctgtggctttacatctgtactctggaagccaaaatacaggaaggtatcgagcgggatcggagagcccaggcccctggtaacttggaggaatttgaagtcaatgacctgaactatgaagataaactccaggaagatcgtttcctatacagtaacattgccttcaacctggctgcagatgctgctcagtccaaatgcctggaccaagccctggccctgtggaaggagctgcttacaaaggggcaggccccagctgtacggtgtctccagcagacagcagcctcactgcagatcctagcagccctctaccagctggtggcaaagcccatgcaggctctggaggtcctcctgctgctacggattgtctctgagagactgaaggaccactcgaaggcagctggctcctcctgccacatcacccagctcctcctgaccctcggctgtcccagctatgcccagttacacctggaagaggcagcatcgagcctgaagcatctcgatcagactactgacacatacctgctcctttccctgacctgtgatctgcttcgaagtcaactctactggactcaccagaaggtgaccaagggtgtctctctgctgctgtctgtgcttcgggatcctgccctccagaagtcctccaaggcttggtacttgctgcgtgtccaggtcctgcagctggtggcagcttaccttagcctcccgtcaaacaacctctcacactccctgtgggagcagctctgtgcccaaggctggcagacacctgagatagctctcatagactcccataagctcctccgaagcatcatcctcctgctgatgggcagtgacattctctcaactcagaaagcagctgtggagacatcgtttttggactatggtgaaaatctggtacaaaaatggcaggttctttcagaggtgctgagctgctcagagaagctggtctgccacctgggccgcctgggtagtgtgagtgaagccaaggccttttgcttggaggccctaaaacttacaacaaagctgcagataccacgccagtgtgccctgttcctggtgctgaagggcgagctggagctggcccgcaatgacattgatctctgtcagtcggacctgcagcaggttctgttcttgcttgagtcttgcacagagtttggtggggtgactcagcacctggactctgtgaagaaggtccacctgcagaaggggaagcagcaggcccaggtcccctgtcctccacagctcccagaggaggagctcttcctaagaggccctgctctagagctggtggccactgtggccaaggagcctggccccatagcaccttctacaaactcctccccagtcttgaaaaccaagccccagcccatacccaacttcctgtcccattcacccacctgtgactgctcgctctgcgccagccctgtcctcacagcagtctgtctgcgctgggtattggtcacggcaggggtgaggctggccatgggccaccaagcccagggtctggatctgctgcaggtcgtgctgaagggctgtcctgaagccgctgagcgcctcacccaagctctccaagcttccctgaatcataaaacacccccctccttggttccaagcctcttggatgagatcttggctcaagcatacacactgttggcactggagggcctgaaccagccatcaaacgagagcctgcagaaggttctacagtcagggctgaagtttgtagcagcacggataccccacctagagccctggcgagccagcctgctcttgatttgggccctcacaaaactaggtggcctcagctgctgtactacccaactttttgcaagctcctggggctggcagccaccattaataaaaagtgtccctggctcagagccctctaagactcagggccaaaaacgttctggacgagggcgccaaaagttagcctctgctcccctgagcctcaataatacctctcagaaaggtctggaaggtagaggactgccctgcacacctaaacccccagaccggatcaggcaagctggccctcatgtccccttcacggtgtttgaggaagtctgccctacagagagcaagcctgaagtaccccaggcccccagggtacaacagagagtccagacgcgcctcaaggtgaacttcagtgatgacagtgacttggaagaccctgtctcagctgaggcctggctggcagaggagcctaagagacggggcactgcttcccggggccgggggcgagcaaggaagggcctgagcctaaagacggatgccgtggttgccccaggtagtgcccctgggaaccctggcctgaatggcaggagccggagggccaagaaggtggcatcaagacattgtgaggagcggcgtccccagagggccagtgaccaggccaggcctggccctgagatcatgaggaccatccctgaggaagaactgactgacaactggagaaaaatgagctttgagatcctcaggggctctgacggggaagactcagcctcaggtgggaagactccagctccgggccctgaggcagcttctggagaatgggagctgctgaggctggattccagcaagaagaagctgcccagcccatgcccagacaaggagagtgacaaggaccttggtcctcggctccagctcccctcagcccccgtagccactggtctttctaccctggactccatctgtgactccctgagtgttgctttccggggcattagtcactgtcctcctagtgggctctatgcccacctctgccgcttcctggccttgtgcctgggccaccgggatccttatgccactgctttccttgtcaccgagtctgtctccatcacctgtcgccaccagctgctcacccacctccacagacagctcagcaaggcccagaagcaccgaggatcacttgaaatagcagaccagctgcaggggctgagccttcaggagatgcctggagatgtccccctggcccgcatccagcgcctcttttccttcagggctttggaatctggccacttcccccagcctgaaaaggagagtttccaggagcgcctggctctgatccccagtggggtgactgtgtgtgtgttggccctggccaccctccagcccggaaccgtgggcaacaccctcctgctgacccggctggaaaaggacagtcccccagtcagtgtgcagattcccactggccagaacaagcttcatctgcgttcagtcctgaatgagtttgatgccatccagaaggcacagaaagagaacagcagctgtactgacaagcgagaatggtggacagggcggctggcactggaccacaggatggaggttctcatcgcttccctagagaagtctgtgctgggctgctggaaggggctgctgctgccgtccagtgaggagcccggccctgcccaggaggcctcccgcctacaggagctgctacaggactgtggctggaaatatcctgaccgcactctgctgaaaatcatgctcagtggtgccggtgccctcacccctcaggacattcaggccctggcctacgggctgtgcccaacccagccagagcgagcccaggagctcctgaatgaggcagtaggacgtctacagggcctgacagtaccaagcaatagccaccttgtcttggtcctagacaaggacttgcagaagctgccgtgggaaagcatgcccagcctccaagcactgcctgtcacccggctgccctccttccgcttcctactcagctactccatcatcaaagagtatggggcctcgccagtgctgagtcaaggggtggatccacgaagtaccttctatgtcctgaaccctcacaataacctgtcaagcacagaggagcaatttcgagccaatttcagcagtgaagctggctggagaggagtggttggggaggtgccaagacctgaacaggtgcaggaagccctgacaaagcatgatttgtatatctatgcagggcatggggctggtgcccgcttccttgatgggcaggctgtcctgcggctgagctgtcgggcagtggccctgctgtttggctgtagcagtgcggccctggctgtgcatggaaacctggagggggctggcatcgtgctcaagtacatcatggctggttgccccttgtttctgggtaatctctgggatgtgactgaccgcgacattgaccgctacacggaagctctgctgcaaggctggcttggagcaggcccaggggccccccttctctactatgtaaaccaggcccgccaagctccccgactcaagtatcttattggggctgcacctatagcctatggcttgcctgtctctctgcggtaaccccatggagctgtcttattgatgctagaagcctcataactgttctacctccaaggttagatttaatccttaggataactcttttaaagtgattttccccagtgttttatatgaaacatttccttttgatttaacctcagtataataaagatacatcattt

SEQ ID NO: 62119 - DNA, 2657 bp, Homo Sapiens
gaattccgggccatgagctgccccgtgcccgcctgctgcgcgctgctgctagtcctggggctctgccgggcgcgtccccggaacgcactgctgctcctcgcggatgacggaggctttgagagtggcgcgtacaacaacagcgccatcgccaccccgcacctggacgccttggcccgccgcagcctcctctttcgcaatgccttcacctcggtcagcagctgctctcccagccgcgccagcctcctcactggcctgccccagcatcagaatgggatgtacgggctgcaccaggacgtgcaccacttcaactccttcgacaaggtgcggagcctgccgctgctgctcagccaagctggtgtgcgcacaggcatcatcgggaagaagcacgtggggccggagaccgtgtacccgtttgactttgcgtacacggaggagaatggctccgtcctccaggtggggcggaacatcactagaattaagctgctcgtccggaaattcctgcagactcaggatgaccggcctttcttcctctacgtcgccttccacgacccccaccgctgtgggcactcccagccccagtacggaaccttctgtgagaagtttggcaacggagagagcggcatgggtcgtatcccagactggaccccccaggcctacgacccactggacgtgctggtgccttacttcgtccccaacaccccggcagcccgagccgacctggccgctcagtacaccaccgtcggccgcatggaccaaggagttggactggtgctccaggagctgcgtgacgccggtgtcctgaacgacacactggtgatcttcacgtccgacaacgggatccccttccccagcggcaggaccaacctgtactggccgggcactgctgaacccttactggtgtcatccccggagcacccaaaacgctggggccaagtcagcgaggcctacgtgagcctcctagacctcacgcccaccatcttggattggttctcgatcccgtaccccagctacgccatctttggctcgaagaccatccacctcactggccggtccctcctgccggcgctggaggccgagcccctctgggccaccgtctttggcagccagagccaccacgaggtcaccatgtcctaccccatgcgctccgtgcagcaccggcacttccgcctcgtgcacaacctcaacttcaagatgccctttcccatcgaccaggacttctacgtctcacccaccttccaggacctcctgaaccgcaccacagctggtcagcccacgggctggtacaaggacctccgtcattactactaccgggcgcgctgggagctctacgaccggagccgggacccccacgagacccagaacctggccaccgacccgcgctttgctcagcttctggagatgcttcgggaccagctggccaagtggcagtgggagacccacgacccctgggtgtgcgcccccgacggcgtcctggaggagaagctctctccccagtgccagcccctccacaatgagctgtgaccatcccaggaggcctgtgcacacatcccaggcatgtcccagacacatcccacacgtgtccgtgtggccggccagcctggggagtagtggcaacagcccttccgtccacactcccatccaaggagggttcttccttcctgtggggtcactcttgccattgcctggagggggaccagagcatgtgaccagagcatgtgcccagcccctccaccaccaggggcactgccgtcatggcaggggacacagttgtccttgtgtctgaaccatgtcccagcacgggaattctagacatacgtggtctgcggacagggcagcgcccccagcccatgacaagggagtcttgttttctggcttggtttggggacctgcaaatgggaggcctgaggccctcttcaggctttggcagccacagatacttctgaacccttcacagagagcaggcaggggcttcggtgccgcgtgggcagtacgcaggtcccaccgacactcacctgggagcacggcgcctggctcttaccagcgtctggcctagaggaagcctttgagcgacctttgggcaggtttctgcttcttctgttttgcccatggtcaagtccctgttccccaggcaggtttcagctgattggcagcaggctccctgagtgatgagcttgaacctgtggtgtttctgggcagaagcttatcttttttgagagtgtccgaagatgaaggcatggcgatgcccgtcctctggcttgggttaattcttcggtgacactggcattgctgggtggtgatgcccgtcctctggcttgggttaattcttcggtgacactggcgttgctgggtggcaatgcccgtcctctggcttgggttaattcttcggtgacactggcgttgctgggtggcgatgcccgtcctctggcttgggttaattcttggatgacgtcggcgttgctgggagaatgtgccgttcctgccctgcctccacccacctcgggagcagaagcccggcctggacacccctcggcctggacacccctcgaaggagagggcgcttccttgagtaggtgggctccccttgcccttccctccctatcactccatactggggtgggctggaggaggccacaggccagctattgtaaaagcttttt

SEQ ID NO: 62120 - DNA, 516 bp, Homo Sapiens
atccctcttcccatcaatatcctaaatgttttgggagggccagagaatggcacccaagagcctgcggggatgccatcccacacaccccacccagctgttctaaccctgctatccacagccctggaggaactggggctcctggaaggaggaggaggctctccactgtccaccctaacacataccctcccacccaccttccagacccccttggttggcaccctctcctccggttccctctcaccccatggctgtgaatgacaggacaggtcacacgtgtgttttccattgggtttaatttaatggacgtgcagtttcatttgtaaattgtgcattagccacctccttcagtggcaggatgtgagtggctacctggctcaactggaggggacccttgggccctctggggcttccctccccacctggttggggtagagcaaaggatggtcactcttccgrggtctccctgaaatgaatgtatttctccccaaaagggctgatatttaatgtttaataagg

SEQ ID NO: 62121 - DNA, 680 bp, Homo Sapiens
  misc_feature (468)..(468): n is a, c, g, or t
  misc_feature (590)..(590): n is a, c, g, or t
  misc_feature (638)..(638): n is a, c, g, or t
  misc_feature (647)..(647): n is a, c, g, or t
  misc_feature (654)..(654): n is a, c, g, or t
  misc_feature (671)..(671): n is a, c, g, or t
  misc_feature (680)..(680): n is a, c, g, or t
tttcataggatggagttttattgggaggacattctggacgggctcccagcaagagtctggcaatggagcatgaaaatgaatgagcctggaatgagggagggtgcggcctcggctacacaaagttcacccgcccccaactgcctcccagcgtgttagctcctgtggcaactccccacttctctctctgtttttcaacccaaatcctagagcagagggctcttcgctcctcacaccatctccaccaggctgcagggggagtcactaagcccactcaagagctctctcctgttggtccctgattcgcaggggcacgtcattccttctttggtaactcattctctttaacagcccgacacagggtctccaggaaaaggacaggagctcacacagtcatgaacagagatgcatctggagcaggaataaggatgctgacaacatctgtgtctggccctccactcttgtaagggncagtaaggtagtacccagtccctgggggtaaggggggggtggtggtgggaatgagggcatctcttctttcaggggccaaatctggcacaaggatgtctgcttaaggaactccactggctggnaggtctctccctaggaaacaccaaaccttttttaattcctaagcttangtgtgaaantgatcanctcttccaggaagccanaacagaatn

SEQ ID NO: 62122 - DNA, 472 bp, Homo Sapiens
  misc_feature (451)..(451): n is a, c, g, or t
gtatgagtctgtgatgtatcaagtgctccaactactcaaggtagcgcagaagggaaaacaggcacaggccggcggggttttgggtgattacacaaatgggcttggctccttaccccactgcaaactgctgaggcgcaagggagctcccagccctcagcctggaccctgggacagtgccacctgagcccgaggtctggaagcactgcgtgatgacagttcccacctgcaactcagcagccagggaatgaatgagagttaggggtggcaggggcccggcatcaagtggggcctgcgctgccgcctccgctgcactgcctggcgcagagctccagcagctgctcctggttgttgcagacattgtaatgtgtcaggtgcagcagttgtccacgtcctcctggctgtaggtcaccttcgtgtagtggtagggagagtccgatgaagacaggttcanctccccagctgccgcctccta

SEQ ID NO: 62123 - DNA, 5245 bp, Homo Sapiens
gccgctactgccggtgcagccgccaaaccggtgcctcggtgacgaccgtgtccctgccgtcttcctcgagctccccggggcttgacccccggggccctcggcaggcatcggtgaggagcctgcggagcgaacctgtgctcctattcttgcccttcaggaccccatatcgcgactccgaggaggggaagcgagaggggctgtcgcgactccgcgccgtgtgtcgccgggcggggccgcggggccggggctccttcagcccccgggatgcgcgcgcgagccctcgcctccacttccttgttgctgctgtcacgactggagccgcctctcgccgacagcggggagcgcgagtgcgccagccatccccctcgtccagccgccgggccaagcgcctccgggaatgtgagcggcgcagcttgcacgctcctccggccatggacgcatcatatgatggtactgaggtaactgtcgtgatggaggaaattgaggaagcctattgttacacctctcctgggccacccaagaagaagaaaaagtataaaatacatggagaaaagacaaagaaacccaggtctgcttaccttctgtactattacgacatctacctgaaagtgcagcaggagctcccccacctccctcagtctgagatcaataagaagattagtgagagttggaggcttctcagcgtggccgagaggagttactacttggagaaagccaaactagagaaggaaggtttggatcctaactctaagctctctgcactgactgctgtggttccggacatcccaggtttccgcaagatcctcccacgctcagattatatcatcatccccaagagcagcctgcaggaggaccggagctgccctcagctagagctatgtgtggctcagaaccagatgtccccgaaaggacctcctcttgtgtccaacactgccccggagacagtgcccagccatgcaggcatggcagagcagtgcctggctgtggaggccctggctgaggaggtgggagcccttacccagtcaggtgctgtacaggagattgccacctcagagatcctcagccaggatgtgctcctagaggacgcttccctagaagtaggggagagccaccaaccttaccagacaagcctggtaattgaagagaccttggtgaatggctcaccagacctccccactggaagcctggctgtgccccacccccaggttggggagagtgtatcagtggtaacagtcatgagggattccagtgagagtagctcctctgcaccagccacacagttcatcatgttgcctctgcctgcctactcggttgtggagaaccccacctccatcaaactgaccactacatatacccgccggggccatgggacatgcaccagcccagggtgctcctttacatatgtcaccaggcacaagccacctaagtgccctacctgtggtaacttcctaggagggaagtggatcccaaaggaaaagccagccaaagtaaaagtggaattggcttctggcgtctcttccaaaggctctgtggtgaaaagaaatcagcaacctgtcaccactgagcaaaattcctctaaggaaaatgcctccaaactgactctggagaattcggaagctgtaagccagctcctgaacgtagctcctcccagagaagtaggtgaggagagtgagtgggaggaagtgatcatctccgatgcccatgttttggttaaggaagctcccgggaattgtggtacagcagtcactaagacgccagtcgtcaaaagtggtgtgcagcctgaggtcactctggggacaactgacaatgacagtcctggagcagacgtaccaacaccatccgaggggacaagtacctccagtccactccctgctcctaaaaaacctacaggagttgacctgcttacccctgggtccagagctccagagcttaaaggcagagcacggggcaagccctcattactggctgcagcaagacccatgagagcaattttgccagccccagttaacgtggggcgaggcagcagcatgggactgcccagggccaggcaggccttttccctgagtgataagactccctctgtgaggacttgtggtctgaagccaagcacactgaagcagctgggccagcccattcaacagccatctggccctggtgaggtgaagctaccaagtggcccatccaacaggacttctcaggtgaaagttgtggaggtcaagcccgatatgtttcctccatataagtacagctgcactgtcacattggatttgggcctggctacatcaagaggccggggaaagtgcaagaatccctcttgtagctatgtctacaccaacaggcacaaacctcgaatttgtcccagctgtggtgttaaccttgccaaagaccggactgagaaaaccaccaaggctatcgaggtgagctcaccactcccagatgtactgaatgccacagagcccctgagcacagcccagagggagatccagcgccagtccacactgcagctgctgcgcaaagtcctgcagattcctgagaatgagtcagagctggctgaggtcttcgccttgattcatgaactcaacagctctcgacttatcttgtccaacgtgagtgaggagacagtcaccatcgagcaaacctcttggtcgaattattatgagtctccgtccacgcagtgccttctctgtagcagcccattattcaaagggggacaaaactccctggctgggccccaggagtgctggctgctgacagccagccgtctgcagacagtgactgcccaggtgaagatgtgtctgaacccccattgtctggccctgcacagcttcatagacatctacacaggtctctttaatgtggggaacaagctgctggtaagcctggacttgctttttgcaatcagaaatcagatcaagctcggagaggaccccagagtgtccatcaatgttgttctgaagtcggtgcaggagcagacagagaagactctgacctcggaggagctgagccagctgcaggagctgctgtgcaatggctattgggcctttgagtgcctcactgtccgagactacaatgacatgatctgtggcatctgtggtgtggcccccaaagtggaaatggctcagaggagtgaggagaatgtgctagcactgaagagcgtggagttcacctggcctgaattcctgggctctaatgaggtaaatgtggaggacttttgggccacgatggagacagaggtgattgagcaggtggcatttcctgccagcatccctatcaccaaatttgatgcgtctgttattgcccccttcttcccaccactcatgagaggagctgtggtcgtcaacactgagaaagacaaaaacctggatgtgcagccagtacctggcagtggcagtgccttggtgaggctgctccaggagggcacctgcaagcttgatgagattggctcctacagtgaagagaagctgcagcacctgctaaggcagtgtggaatcccctttggggcagaagactccaaggaccagctctgcttctccttgttggccctctacgaatctgtacagaatggagctagagctatacggcccccacgtcacttcacaggtggtaaaatctacaaggtgtgcccccatcaggtggtctgcggctccaagtatcttgtgcgaggtgagagtgcccgtgaccatgtggacctgcttgcctcttcccgccactggccgcctgtctatgtggtagatatggccacgtcagtggccctgtgtgctgacctctgctacccagagctgactaaccagatgtgggggaggaaccagggctgtttctctagccccacagagccacctgtgagtgtgtcctgcccagagctcttggaccagcattatactgtggacatgacagaaactgagcactctatccagcacccagtcaccaagactgccacgcggcgcatcgtccatgcaggcctacagcccaatcctggtgaccccagtgctgggcaccactccttggccctgtgccctgaattggcaccttacgcaaccatcctggcctccatcgtggacagcaaaccaaacggtgtccgccagcggcccattgccttcgacaatgccactcactattacctctacaaccgcctcatggacttcctcaccagccgcgaaattgtcaatcgtcagatccatgacattgtacagagctgccagcctggtgaggtggtcattcgtgacaccctctaccgccttggggttgctcagatcaagacagagacagaggaggagggtgaggaagaggaggtggccgcagtggcagaataagccaggctgttgtacagggactacaccatctctcaagccatagtaaggcccttgcctgaggcagagctatccaggggacctgcagaagtggtctcctgtggggagggcctctgactgctgggactgaccaaagagcttccattccctgagcatggtgggacccagggtcctcagttctcaaccctccaggggtcaggagtggtaccaggaaacctcttctggccccgagagagcacttgggggacacggtatgtttaatggaggggaggctgagggaaaggctggtagctggtgggttccgtggggcctgcggtgtgggtcagggtggaggtcctgggtgggctaaggcgtgagccccagcactaggtgggaaggctgctgaggtctctcccacccctgaggagccctggtttcagccccctcagtctgatgaattgcttagcctgttgcctttgactaggggcctgggtggcctcattaactctaggggtccctttgggctcttgattctccctgaaggagggatgcatttctctcttgctcttcctgtacccacatttgggggaagctgaggagggaggaacagtcagccacagctctcttccagcactgtcctctccaccccaagctttgaggaagagcatccccttcctcctttccctggccactgctgctgcagccaatatcctctctgggcctgggaccctctccacagaggggatgtggtccctggtcatgacataacctagcagcagtaggaaaaactcccttctatgaaggggaagcagactgggccataaggaaacagcaggactggctcaagtgcccaaggtttgtttagggcctgggaattggccatgtgttaatttattgagtggagtaggtggctttttttccctccctcttcccccaacaagaataaagtttattaaatt

SEQ ID NO: 62124 - DNA, 527 bp, Homo Sapiens
  misc_feature (445)..(445): n is a, c, g, or t
cctctgccacaaaagacctttaatggcctcctatttattgttcttttgttcatttgttagagttgaatgaactataataacttgtctgacataataagaatgccacaggtataacagataaacctggcaggtggtccaggaatgagagtgtcacaaaataatcactcaacacaagggccacagacctggagattcttcccagccatccctcactcctgccccaggacacaacccatgcaggcccccattccataggaagaggcaggtcccacagtgtctgtggctagaccttaacactgagcagagatgcccgggaagatggcacttcctatgctcgttcccaagtgctctgctcatctgccatgcaggtcaggaccataccccgagtttgtgaggcacccacctctcatactcaccacctcatatgaccacctatcatacccanctctcctatgacccttgcaattgtcccagtgaagtgggaagagctggactagcccattttgcacacagggaactaaggacac

SEQ ID NO: 62125 - DNA, 1883 bp, Homo Sapiens
ccgggccggggtgccagcgcccgccttcccgtttcctcccgttccgcagcgcgcccacggcctgtgaccccggcgaccgctccccagtgacgagagagcggggccgggcgctgctccggcctgacctgcgaagggacctcggtccagtcccctgttgcgccgcgcccccgtccgtccgtgcgcgggccagtcaggggccagtgtctcgagcggtcgaggtcgcagacctagaggcgccccacaggccggcccggggcgctgggagcgccggccgcgggccgggtggggatgcctctgcacgtgaagtggccgttccccgcggtgccgccgctcacctggaccctggccagcagcgtcgtcatgggcttggtgggcacctacagctgcttctggaccaagtacatgaaccacctgaccgtgcacaacagggaggtgctgtacgagctcatcgagaagcgaggcccggccacgcccctcatcaccgtgtccaatcaccagtcctgcatggacgaccctcatctctgggggatcctgaaactccgccacatctggaacctgaagttgatgcgttggacccctgcagctgcagacatctgcttcaccaaggagctacactcccacttcttcagcttgggcaagtgtgtgcctgtgtgccgaggagcagaatttttccaagcagagaatgaggggaaaggtgttctagacacaggcaggcacatgccaggtgctggaaaaagaagagagaaaggagatggcgtctaccagaaggggatggacttcattttggagaagctcaaccatggggactgggtgcatatcttcccagaagggaaagtgaacatgagttccgaattcctgcgtttcaagtggggaatcgggcgcctgattgctgagtgtcatctcaaccccatcatcctgcccctgtggcatgtcggaatgaatgacgtccttcctaacagtccgccctacttcccccgctttggacagaaaatcactgtgctgatcgggaagcccttcagtgccctgcctgtactcgagcggctccgggcggagaacaagtcggctgtggagatgcggaaagccctgacggacttcattcaagaggaattccagcatctgaagactcaggcagagcagctccacaaccacctccagcctgggagataggccttgcttgctgccttctggattcttggcccgcacagagctggggctgagggatggactgatgcttttagctcaaacgtggcttttagacagatttgttcatagaccctctcaagtgccctctccgagctggtaggcattccagctcctccgtgcttcctcagttacacaaaggacctcagctgcttctcccacttggccaagcagggaggaagaagcttaggcagggctctctttccttcttgccttcagatgttctctcccaggggctggcttcaggagggagcatagaaggcaggtgagcaaccagttggctaggggagcagggggcccaccagagctgtggagaggggaccctaagactcctcggcctggctcctacccaccgcccttgccgaaccaggagctgctcactacctcctcagggatggccgttggccacgtcttccttctgcctgagcttcccccccaccacaggccctttcctcaggcaaggtctggcctcaggtgggccgcaggcgggaaaagcagcccttggccagaagtcaagcccagccacgtggagcctagagtgagggcctgaggtctggctgcttgcccccatgctggcgccaacaacttctccatcctttctgcctctcaacatcacttgaatcctagggcctgggttttcatgtttttgaaacagaaccataaagcatatgtgttggcttgtt

SEQ ID NO: 62126 - DNA, 533 bp, Homo Sapiens
  misc_feature (421)..(421): n is a, c, g, or t
  misc_feature (441)..(441): n is a, c, g, or t
  misc_feature (449)..(449): n is a, c, g, or t
  misc_feature (529)..(529): n is a, c, g, or t
cccgctgccacctcgcccagccatcaagccctccgataccttcggctaaaatatctttcatatttttagaatttgtcctcggaaacctttttcgcttggggtggtctctctcactctgccccctcctcacgcagctcttggcagtcaacagacgctggcggctggggctgccatgccatcccagctccaagcttcccactccgggacttgtgtttgggtggggagacctgacctgggcatgttcctgtttcttcatcgttgagcttttctggcccggtctgaagctcaagtgaggagggggaagctgggtttttatcacttttaatgaatttggtgtgatttgttgtagatttttaaaatttccccttttggagaagaaaaaaccaaaaaaacttggcccactgggtaaaacatggggtcntgggtcccaagccctggttnagcccctnccaagttttttaagcctgaatgaaaggttggggtctctgggaacctggccctcaatgccagaagcatcctgtggttgtanaagt

SEQ ID NO: 62127 - DNA, 678 bp, Homo Sapiens
  misc_feature (4)..(5): n is a, c, g, or t
  misc_feature (27)..(28): n is a, c, g, or t
  misc_feature (33)..(33): n is a, c, g, or t
  misc_feature (40)..(40): n is a, c, g, or t
  misc_feature (42)..(43): n is a, c, g, or t
  misc_feature (82)..(82): n is a, c, g, or t
  misc_feature (104)..(104): n is a, c, g, or t
  misc_feature (110)..(110): n is a, c, g, or t
  misc_feature (123)..(123): n is a, c, g, or t
  misc_feature (176)..(176): n is a, c, g, or t
  misc_feature (194)..(194): n is a, c, g, or t
  misc_feature (200)..(200): n is a, c, g, or t
  misc_feature (202)..(202): n is a, c, g, or t
  misc_feature (231)..(231): n is a, c, g, or t
  misc_feature (233)..(233): n is a, c, g, or t
  misc_feature (323)..(323): n is a, c, g, or t
  misc_feature (328)..(328): n is a, c, g, or t
  misc_feature (432)..(432): n is a, c, g, or t
  misc_feature (435)..(435): n is a, c, g, or t
  misc_feature (474)..(474): n is a, c, g, or t
  misc_feature (525)..(525): n is a, c, g, or t
  misc_feature (541)..(541): n is a, c, g, or t
  misc_feature (544)..(544): n is a, c, g, or t
  misc_feature (558)..(558): n is a, c, g, or t
  misc_feature (560)..(560): n is a, c, g, or t
  misc_feature (570)..(570): n is a, c, g, or t
  misc_feature (575)..(576): n is a, c, g, or t
  misc_feature (590)..(590): n is a, c, g, or t
  misc_feature (614)..(614): n is a, c, g, or t
  misc_feature (619)..(620): n is a, c, g, or t
  misc_feature (624)..(624): n is a, c, g, or t
  misc_feature (627)..(636): n is a, c, g, or t
  misc_feature (638)..(639): n is a, c, g, or t
  misc_feature (642)..(657): n is a, c, g, or t
  misc_feature (660)..(660): n is a, c, g, or t
  misc_feature (664)..(664): n is a, c, g, or t
  misc_feature (670)..(670): n is a, c, g, or t
  misc_feature (675)..(675): n is a, c, g, or t
tttnnagggcccctcaataggggtacnnggatntcagttngnncggtctttataaatgtagagcaagatgtgggtttcctgnccccatttcacctcaaggcatnttcagnaaccccacatggnttccctctgtgcgcatgaaataacttgaggccagggtctctcagctttaaagncttggaatcctatgcatngtttgntngtgtgtagatgtgcagtttgaggggtagntnctctaaggtgtcaaactccacaaaagttcagaatcatgtcactggatcctgagtccatctccacagaccagggtgccgatcaggtcagtngctgnggtaactgcagcagatggtcccttaagcgatggagtccaaggacatcatggtcaagaccagagtttttatcaacttgaggaaagtgaagaccagccagagaggntgnagtttagggaaggcagaggttctcccccaccacgatgcnagcaaggctttccccagggtgacggaaagaagcactggattcagaaggttntccaattgatcaagtnttnttggtcccagcagngnggtagggggngtcanngccgcttaacaccnttttggaacctctccccgggatcntgtcnnacanaannnnnnnnnntnnttnnnnnnnnnnnnnnnnacnaatnaaaaantacanggg

SEQ ID NO: 62128 - DNA, 803 bp, Homo Sapiens
  misc_feature (4)..(5): n is a, c, g, or t
  misc_feature (11)..(11): n is a, c, g, or t
  misc_feature (19)..(20): n is a, c, g, or t
  misc_feature (39)..(39): n is a, c, g, or t
  misc_feature (245)..(246): n is a, c, g, or t
  misc_feature (310)..(310): n is a, c, g, or t
  misc_feature (312)..(312): n is a, c, g, or t
  misc_feature (340)..(340): n is a, c, g, or t
  misc_feature (403)..(403): n is a, c, g, or t
  misc_feature (435)..(435): n is a, c, g, or t
  misc_feature (442)..(442): n is a, c, g, or t
  misc_feature (448)..(448): n is a, c, g, or t
  misc_feature (466)..(466): n is a, c, g, or t
  misc_feature (469)..(481): n is a, c, g, or t
  misc_feature (485)..(488): n is a, c, g, or t
  misc_feature (490)..(492): n is a, c, g, or t
  misc_feature (496)..(496): n is a, c, g, or t
  misc_feature (502)..(523): n is a, c, g, or t
  misc_feature (527)..(527): n is a, c, g, or t
  misc_feature (529)..(529): n is a, c, g, or t
  misc_feature (534)..(556): n is a, c, g, or t
  misc_feature (558)..(561): n is a, c, g, or t
  misc_feature (563)..(587): n is a, c, g, or t
  misc_feature (589)..(595): n is a, c, g, or t
  misc_feature (597)..(604): n is a, c, g, or t
  misc_feature (606)..(645): n is a, c, g, or t
  misc_feature (647)..(657): n is a, c, g, or t
  misc_feature (659)..(668): n is a, c, g, or t
  misc_feature (670)..(692): n is a, c, g, or t
  misc_feature (694)..(706): n is a, c, g, or t
  misc_feature (708)..(721): n is a, c, g, or t
  misc_feature (723)..(730): n is a, c, g, or t
  misc_feature (732)..(740): n is a, c, g, or t
  misc_feature (743)..(752): n is a, c, g, or t
  misc_feature (754)..(774): n is a, c, g, or t
  misc_feature (776)..(802): n is a, c, g, or t
gggnntggctnctccatgnncatgctcagctggcagagnaatgaagaagaaggtagtggtggcggaggcagtgaagaggatcccccctgcagacaccaaagctgtgaacagaaagactgcctggccagcaaaccttgggacatcagcctggcccagcctgaaagcatccgcagtgacctagagagttctgatgcacagtcagacgatgtgccagacatcacctcagatgagtgtggctccccccnntcccatactgcagcctgcccctcgacccccagagcccaaggtgcaccgagcccaagtgcccatntnaacctctctgccctagacgagggacaanctgtcttgaagccagaaggtggagaagccagagtatgaagtgggaatgaatgctcctgttctnagaagcacacttggtttctgcatcttttgggnattcaanttgggncttacccgtttatttttnaannnnnnnnnnnnntttnnnncnnntttncttttnnnnnnnnnnnnnnnnnnnnnntttntnttttnnnnnnnnnnnnnnnnnnnnnnntnnnntnnnnnnnnnnnnnnnnnnnnnnnnntnnnnnnntnnnnnnnntnnnnnnnnnnnnnnnnnnnnnnnnnnnnnnnnnnnnnnnntnnnnnnnnnnntnnnnnnnnnntnnnnnnnnnnnnnnnnnnnnnnntnnnnnnnnnnnnntnnnnnnnnnnnnnntnnnnnnnntnnnnnnnnnttnnnnnnnnnntnnnnnnnnnnnnnnnnnnnnntnnnnnnnnnnnnnnnnnnnnnnnnnnnt

SEQ ID NO: 62129 - DNA, 550 bp, Homo Sapiens
  misc_feature (99)..(99): n is a, c, g, or t
  misc_feature (450)..(450): n is a, c, g, or t
  misc_feature (550)..(550): n is a, c, g, or t
ttttttttcccagcattgactatatttgaaagagctacacttgagaaggtaccatatcttcacatccacactgcatcagagaaccccagaatggtgacntaaaaataaacacccctccccaaaaaacgcactcaggcatgcacacacatccacacgcatcctctcagttcatcagtgcactataactgagcttcaggggtgagagccagagctcagatgctggaagtaaacctttggcaaaaaaaaaaaaaaagaaaagaaaaccagagaccttccaactcctcttcccttccagagagaaggtgatgaagacaggagcagaggtgaggagacacagggccaccacactgcccaatcccagggaccccactcccactggaatagatgtgaatgatggcccttcaagttgtgcaatcaaagctgcccacctgtaagctgcagccctgagangggtttccaggagtagctcctaacagaaaaggaaattcggcttccatgctccaccagtttgccctggactattgaggggtgtttgtgggcaaatttaaan

SEQ ID NO: 62130 - DNA, 598 bp, Homo Sapiens
  misc_feature (72)..(72): n is a, c, g, or t
  misc_feature (515)..(515): n is a, c, g, or t
  misc_feature (572)..(572): n is a, c, g, or t
  misc_feature (583)..(583): n is a, c, g, or t
  misc_feature (598)..(598): n is a, c, g, or t
ctaagaatacaaaaaattagccgggcatggtggcagacgccgtaattccagctactcatgaggctggggcgnacgaatcgcttgaacctgggaggcagatgttgcagtgagtggagattgtgccacttcactccagcctgggtgacaaggctgatgaattcatccgagcaaatgccaccaacaagctgacagtcatagctgagcaaatccaacatttgcaagaacaagccaggaaggtactggaagatgctcacagagatgccaacctgcaccatgtagcttgtaatatagtgaaaaaacctggcaacatttactatctctataaaccgggagagttggtcagcagtatttttccatcatttctccaaaggaattgggggacaagtttgtccacattgacttccttggtgcctacaaactacagcatgacttgtcctggactccgtatgaggacattgagaagcaagatgctaaaaatcagcatgatgggacacgttgctaagccagtcagtggncctgcctccgtgcactgaacccacttccagggactgactcactgagagtgggctttnacaaaaaaggnttttcacaggacttn

SEQ ID NO: 62131 - DNA, 568 bp, Homo Sapiens
  misc_feature (107)..(107): n is a, c, g, or t
  misc_feature (237)..(237): n is a, c, g, or t
  misc_feature (388)..(388): n is a, c, g, or t
  misc_feature (420)..(420): n is a, c, g, or t
  misc_feature (444)..(444): n is a, c, g, or t
  misc_feature (497)..(497): n is a, c, g, or t
  misc_feature (536)..(536): n is a, c, g, or t
  misc_feature (545)..(545): n is a, c, g, or t
  misc_feature (556)..(556): n is a, c, g, or t
ttttttttggcagttgaggttgtctgtttattggtgaggaaactcctcgagagttaatacagtgtaatcttttcccagaggtgtgtagagggaagggggcctagagnatcccagagatagcttatagcaacagtgctttgaccaagagctgctgggcacatttcctgcagaaaaggtggcggtccccatcactcctcctctcccatagccatcccagagggtcgagtagccatcagncttcggtgggagggagtcagggaaagaacagacaacagagcagacagaccagtgatgaccatgggcgggacgaagcctcttccctggaccggggtggcagaggaaagcctaagtgaggggtcagactataaacgttaaggaacccgagatnagcacctgcttcaagtgcacccttcctacctnacaaccagggaccagaactgcaanctttggggacagcacttgggagcagctaacagagcactcacctgccccaaganggccgtcgcagccctggtcctggcaagggaagctccctnttgagtaangggagaccaanggaacccctcct

SEQ ID NO: 62132 - DNA, 1593 bp, Homo Sapiens
  misc_feature (96)..(96): n is a, c, g, or t
  misc_feature (106)..(106): n is a, c, g, or t
  misc_feature (197)..(197): n is a, c, g, or t
  misc_feature (216)..(216): n is a, c, g, or t
  misc_feature (220)..(220): n is a, c, g, or t
  misc_feature (229)..(229): n is a, c, g, or t
  misc_feature (234)..(234): n is a, c, g, or t
  misc_feature (1141)..(1141): n is a, c, g, or t
  misc_feature (1224)..(1224): n is a, c, g, or t
  misc_feature (1257)..(1257): n is a, c, g, or t
  misc_feature (1275)..(1275): n is a, c, g, or t
  misc_feature (1380)..(1380): n is a, c, g, or t
tttttttttttttttttttttggtttcttcaaaattttattaacaaaacccagggagaggaggcaaggatgagtggactccgcagccccaccaggnactgaacatntcgacggggacagtccctctgataaaggcagatgggcggtcaaccggtggatgggcacagggagaaccggagaaacagatgagtggaggancggacacacgggcaccggncggntcccccatntggantgcagggtttaaggggtccgggccaggaggctcagcggtcggcactggagcgcaggtcggtagtgaggggatcgtgctggatcgtctggtgcagcatcaaggccagcaatcccgcgcagttttgcatggctgtgcgcacattgcgctcctgctcaaacagctcgtccagcttgtaccacacacgcacgcgctccaagtccacttccgcacgccgcagcttctcccagcagtaatggcgattgcactggcgcttgggcaggcggcagaagtcacccgtgagctcaaagacatcacgtacaagggggcacccgcatacctcgtcagctggcactttggggtcccgtgagtgctcggggcacagcacctggagccgcttacagtatgttttgctctgaggattatacacatcacagaagagtcgtgtggccccttcaatgcgtgtggggtacatggacccaaaggacgtctggctctcatacttggcgtagagcgctccatgtggcgcaaggcaacacgtgggttgatggggtgcssacaggaaacacagaagatctgcaggtctgtgtcatcactgtcaccctcgttgctctcctcatcctcgcgcacagcctgctgcttggcacgtagaatgatggcctcaagctcatggaatcggcgttccatttcctgaaggcgggtgcgggcactctgctgctctcggcgaatgcgttcgagcagcttcttgccgtgctcttcagcaatgcaagggctctgctgccactgctggatgcgctgggggaggatctcgtagatgcggttggctgccagcttcatgccacagtcatctgagcaatacttggagctgggctgggcggggcgcacacagccggcccaggcactggggcagtgacgcagggtccttggcaanaaaccctctctgggtgtttccaattaaccttgtgcttcctgcttctgccgaagccgcttgtaacgctcctccttcttcttctnaagacttcttctcccgaacgcttcacatgcttnactttcactgccctcctntccagcgcggggtcccaggaatggggactcttctgtgtcgctcatcccagggcaggccatggtcatcaaaggcccctgcacagaagtcctgatacaggtcagganccagaggtaggtcctcatctgagagtggctcaggtgtggctgtacctcaggaggctccttgactgttgatgacgccactgccccctcatcttcacggatgcgccctaacttctgtgatggctgtggctgctgttgggtgggcagtggtcgcggggccttggcagggactctgagggcgtcactggtgagagcgaggaagggaagtacttgtac

SEQ ID NO: 62133 - DNA, 588 bp, Homo Sapiens
  misc_feature (15)..(15): n is a, c, g, or t
  misc_feature (468)..(468): n is a, c, g, or t
  misc_feature (474)..(474): n is a, c, g, or t
  misc_feature (535)..(535): n is a, c, g, or t
  misc_feature (556)..(556): n is a, c, g, or t
  misc_feature (561)..(561): n is a, c, g, or t
ttttgagctgcaganactcgagctttatttacaaacttccacagaatccctcaccctccaccccagggtcctccctctctggaactcaggcagcagacaagcttgggtccacccacctgcccaacctaggacagctgggcctgagctgggcgggcaggggattccatctcctgggtgcgcctgccagaggggagaggctggatgcggcgggaatgctgttctcccccaggagtcagtcctcagggcttctgcccgtgggacgtggggccgagggacctggggcactgaccaggtcggggtcgggggcagcatctgcatttggtgaggccgggttgaaaagggctgctggttgccggacagcttctggtgctgggcctcaacgggagacagaggaccagaggtccaagggttcctgggggctgagcttttctcagactttcggaagaaaaatgtcccaacccagcaggnatttcnggggcaaggccagttttttcagaagcgtaaaactctttcgccggttgaatgttgtacccgntgcggggctccaagatttganaagcnggattttcacccttgcgcaagggggga

SEQ ID NO: 62134 - DNA, 1340 bp, Homo Sapiens
ctagaattcagcggccgctgaattctagctagaattcagcggccgctgaattctagaacccaggtgcaactgacatgggtgaaccccagggatccatgcggattctagtgacagggggctctgggctggtaggcaaagccatccagaaggtggtagcagatggagctggacttcctggagaggactgggtgtttgtctcctctaaagacgccgatctcacggatacagcacagacccgcgccctgtttgagaaggtccaacccacacacgtcatccatcttgctgcaatggtggggggcctgttccggaatatcaaatacaatttggacttctggaggaaaaacgtgcacatgaacgacaacgtcctgcactcggcctttgaggtgggggcccgcaaggtggtgtcctgcctgtccacctgtatcttccctgacaagacgacctacccgatagatgagaccatgatccacaatgggcctccccacaacagcaattttgggtactcgtatgccaagaggatgatcgacgtgcagaacagggcctacttccagcagtacggctgcaccttcaccgctgtcatccccaccaacgttttcgggccccacgacaacttcaacatcgaggatggccacgtgctgcctggcctcatccacaaggtgcacctggccaagagcagcggctcggccctgacggtgtggggtacagggaatccgcggaggcagttcatatactcgctggacctggcccagctctttatctgggtcctgcgggagtacaatgaagtggagcccatcatcctctccgtgggcgaggaagatgaggtctccatcaaggaggcagccgaggcggtggtggaggccatggacttccatggggaagtcacctttgatacaaccaagtcggatgggcagtttaagaagacagccagtaacagcaagctgaggacctacctgcccgacttccggttcacacccttcaagcaggcggtgaaggagacctgtgcttggttcactgacaactacgagcaggcccggaagtgaagctggaagacaggatcaggtgccagcggaccatcggctggcagagcccagcggccaccacccgtcaaccctgccaggagctgagggcaccacccagcaacctgggcctgcattccatccgctctgcagccccaagcatctttccagtggggcccccattcacgttggtcctcagggaaaccagggtccggggcaggcccggcgctttgctccccacaccagccccctgcgcgtgtccactctgatcctgcatcccactccctgggagccaataaagtgcattttcacagaaaaaaaaaa

SEQ ID NO: 62135 - DNA, 586 bp, Homo Sapiens
  misc_feature (397)..(397): n is a, c, g, or t
  misc_feature (447)..(447): n is a, c, g, or t
  misc_feature (507)..(507): n is a, c, g, or t
gttggtgccattttcagcaattacggctttgacagtgccacctctttgatgccaaatcagcaaccattgttgttatgatctgcagtcttcctggtgacactggaatctctctctctgccgcctcagtttgtctgctggtctcttggggggccaggcctgcacgtctctcctacccggcctcaaatggtgctgctgcccatgatggtaccacaccagggcctcagcctggcccctcaccacataccctttgccttttagaactcagtgccatcctgggtgcccagggcagagcaggctttgttcgcacctcatctgctgcagaaccacatcctgaggagtctcagcttatcctggaagggaattggggaacagtgtcactgggaagtgaaaggcctanccctgtgggcttccaccagtctcctcctgcagtgccacgtggtggaattntctcggcctcacaccaaagaaagcaggcaagttggaaaattttcaggattacaaaggcanattaaacacccccataaggagaatgaattaatggttttttaggaagcaaagagcaaaaattattgaaaacctctaggag

SEQ ID NO: 62136 - DNA, 139887 bp, Homo Sapiens
  misc_feature (39791)..(39791): n is a, c, g, or t
  misc_feature (39999)..(39999): n is a, c, g, or t
  misc_feature (77875)..(77875): n is a, c, g, or t
  misc_feature (77956)..(77956): n is a, c, g, or t
  misc_feature (77990)..(77990): n is a, c, g, or t
  misc_feature (78009)..(78058): n is a, c, g, or t
  misc_feature (136325)..(136325): n is a, c, g, or t
  misc_feature (136332)..(136332): n is a, c, g, or t
gcccaaataaaccctccgctcatgttaatgttgcttcagcttctttcttttaggtcaacgttcagtacgcgtctgtcatttccatttgactgttaaacaaactggagactatagaggccaagggaaaacttgccctctgccctcaggagattcacggaaaatcaactgacaaagtaagagaaaaggcatacagatttattcatgcacacagggagaaccagagtgatgaccccaacctcccaatggggttcggaagcttatataccatcttgaggttacagaaagaacatgggctcaaagtatggccacagtttatggtggaaaatcaggtgaccagtggcaagaccggttacaggagggagagcagaggaggcctggctagcaaaggtggccttgttctacagatgaaacctcacaggtagcagccctgagagagaacagatggtgaatgttcccttcaggcctttaaaggcgtcagactgttactcttcccagatcaggcaaggagggcctcagaggaggcctggccgcatcagtgtagattctctccacagatgcaaatctcccccacaaaagacagcttttcagctattcttctatttccagtccttctgagtaactgtcttgaaccgtgtcaaggaaatatttttgttgttgttgtttgtttgttttgaggcagagtctcactccgtcacccaggctggagtgcagtggtgcaatctcagctcactgcaacctccacctactgggttcaagtgattctcctgcttcagcctccctgggattacaggcatgcaccaccatgcctggctaatttttgtatttttagtagagacggggtctcgccatgttggccagcctggtctcaaactcctgacctcaggtgatctgcccacctcggcctcacgaagtgctgggattacaggcgtgagtcaccatgcccagccatggaaatacattttggggcgaaatattttggtttccttcagtccccactttgagactttcagaaagttgcccatataaaaagaaagttgatagctttgaagagatttgagttagaggttgttagataagagacaggcagaggcgggcaaaaagaaattgggataagcagaaaaagacaaatttaaatgtcatcctggcagggcacagtggctcatggctgtaaatctcagcactttgggaagctgaggcaggaggagcacttgagcccaggtgttcagaccagcccgggcatcacagggagactctattgctacaaaaaataaaaaattagccaggcatggtagtttgtgtctgtggtcccagctacctgggaggctgatgcagcaggatgacctgagcctgggaagtcaagtctgcagagagctgtgatcacaccactttgtgggtgagtgagtgagaccctgtctctgaaaaatagatatgtatcatgccatattttcttgaatccgtctcttagtcctgagactagatcagctcagttaaacagctgtatcctattccaagaagtggcattgcagatgggctgggacctcgtatataattcacacaaacagatctttaacaagatacaattctatggaaacagaagaaaaaaaacggtgaatgtctggtgtcatccatagactagcttttctagctctcctcaatctgaggcatctggagcatcttcagattgcaatggcaatttgacagatttttctggattgtagttctaattgggtgttcaagtgaactttctgaatagtccatatatcaacaggcacaaaggctatttatacataagtcgctgtgatgatttctcctgaagattataagtaatttagcttcagttgcagggcttcaagaaaagccattttaatttccagtgattttaaatcagaaaaatgggagaaaaactggaaagcattagtttagagacttggagctaggaaagaatgcaggattcagttcaaactataggcaaatgataacaactcaaaaacaagtcagtccggactctcgtaacaggtgtcaacagtcagtccggactctaataacaggtgtcaacagtcagtccggactctaataacaggtgtcaacagtcagtccggactctaataacaggtgtcaacagtcagtccggactctcctcacggcaggtgtcaacagtcagtccggactctaatgacaggtgtcaacagtcagtccggactcttgtgacaggtgtcaacagtcagtccggactctcgtgacaggtgtcaacagtcagtccggactctaataacaggtgtcaacagtcagtctggactctaataacaggtatactatagttttcttctaaaacatattttttctctctccagtctcccttttccacaaaagacaaatcagagtaagaacaactgatttacaaaataagttttagtcttattataattggcctgattatttgcataaagtacagtaataatagtgactggccattcaacctcttttaaagttggctttgccagaactttttcataaggaatctcagattagacttttaaaagcatcttgaggccgggcatggtggctcacgcctgtaatcccagcactttgggaggccgaggcgggcggatcgtgggctcaggagatcaagactatcctggctaacacagtgaaaccccatctctactaaaaatacaaagaaaatcagccacgtgtggtggcgggcgcctgtagtaccagctactcaggaggctaaggcaggagaatggcatgaacccgggagacggagcttgcagtgagccaagaccgcgccactacactccagcctgggcgacagagcgagatcggtctcaaaaaaaaaaaaccaaaaaccaaaaaaaaaaaaaaaaaaaaaaagtacttgtctgggtactttacatgagtttccttgaggaagaagcaagtcttgaactgtagctaattataagctgctttttaaaaagaatcaaagtaaaacagtaattgactgtggatgacagatgacttagactaatgatggttacagatgcaattcacaaggagatttgtttttttgtgtgacatacaacaatttaacataataattataattttgagccaggcgtggtggctcatacctgtaatccctgcactttgggagaccaaggcaggagggctgcttgagctcaggagttcgagatgagcctgggtggcacagcaagatcctgtctccaaaataataaataaataaataaagacagcatgaggcaaactctctactcctcctttttttttgtgagacagagtctcactcttgttgcccaggctggagtgcagtggcacaatctcagctcactgcaacctccgcctcccgggttcaagcgattctcctgcctcggcctcctgagtagctgggactacaggcaggcgccaccacgcctggctaatttttgtatttttagtagagatggggtttcaccatcttggccaggctagtctcaaacgcctgacctcaggtgatccacccacctcggcctcccaaagtgctgggattacaggtgtgaaccaccgtaccgggcctactcctccttttcttgtagtttactcaaaaggtaaacaaaaatcttttactgtctcttattaatactacatgaaaatcttactcaaaaatgaaaactaaattctacctttacattagcatattattaatactaaagctaattttaataaaaacttaaaaacagatccattcaatctcaatcagctttgaccacataagatttccataaacctttaataacctcttaaaatttgttccattctttgtttctcaaactttctatatatattcagttttatctatcatttttttattcctttaatttaaaacaacctttaaaaacatcaaaactagacaaaattacttttcctttaacaaaaacctcattctcatgccttctttataaccttccttaccaaaaacacatcctactttcttataaactttgcatacagaagtgtttctcttatatctagtagttttaaatacatatattaattacaatgttaactcttaggaagcctaattttcagtgaaaaacatgggaagtaagcaattttaattgttattaaagatgcaaagcccaggacaaaggacagagctttaaagactgatatggtttggctgtgtccccacccaaatctcatcttgaactgtagttcccaaaatccacaggtgttgtgggagggacccagtgggaggtgattagatgaagggggcggttcccccacgctgtttttgtgctagtgagttctcacgaggtctcatggtttcatgaggtgcttccccactcttcgctctgcacacctccttcctgacctcatgtgaagaacgtgtttgcttcctcttccgccatgattgtaagtttcctgaggcttcccagccacgctgaactgtgagtcaattaaacctctttcctttacaaatcacccagtctcaggtatgtctttattagcagtgtgagaatgggctactacaaagacaatgcctggaggactcaacccctcccagcatgaccggggggcacagctgggccagggaggacaatgctcgggcactgcagacacacagcatgaccggggggcacagctgggcaagagaggacaatgctcgggcactgcagacacacagcatggctggggcgcacagctgggctagggaggacggggctcaggcactgcagacacacagtatggccggggggcacagctgggctagggaggacggggctcgggcactgcagacaaacagcatgaccggggggtacagctgggccagggaggatggggcttaggtactgcggacacacagatgtctccaggccacatcatgtccacttgtcttgaccccagaatgtagaggctcaaagccaaagacctaagttcacagacaaattaagcaagtatcagaaatatgacagaagcaaattttatgaccttaaagcatctaacagagactgtctgaacctgtccgaccaatgggcccaagcaaagatgtctcaattatatttaagactgacgactttgaagatattctaattttagcatcatttttttttttgagatggagtctcactctgtcacccaggctagagtgcagtagtgcagtctcggctcactgcaacctctacctcccaggttcaagtgattctcctgcctcagcctcctgagtagctaggactacaggcgcatgccaccacgcctggctaatttttgtatttttagtagagacggggtttcaccatgttggccaggatggtctcgatctcttgacctcgtgatttgcccgcctcagcctcccaaagtgctgggattacaggtgtgagccactgcacccagcagcaacaattttaaaactaagtttatttgccaaagattactagtcacatgaactagaaaagcatctgggtttagttacatcattcatgagcacttatttatttatacgtcaatttgctactatgtacataatatacaaacaggcatgtacacataaaaatacagacacaaatcaagattttatagctttagttttaagattttagccacgaatcgggtaaaaatcactagtttaaaaggatacttaaaattgtgcctctgtaaatggaacaaggtaaaatttatctgtctcacacggccaaagcccttaccaagttttagagaaaacaaggcaacaaatttacatcttgaagcacagagaaaaaaaaattatttttatttactgaattttttcaagacggagtcttgctctgtcgcccaggttggagtgcaacggcacgatcttgactcactgcaacctctgcctccttggttcaagcaattccacagggagaaagtttaagctttgatttagtatgttaaaggaagattttaaatggatgctgaggtaacaaaaagtcatagaaattcaccacaggattttataaggacaacaatgttatttaaatatgtggctattaatttattctccatttttgaactagaccactgggctcaggacagagctcattaatgaacatggccaaaaaagcatttgcagtttggaggacctaatatttaaatatgtgaaaaacaggtgcagctggaaggcagagcatctagatcttttaaaatcaaggatcccacatttacactgaatgctgagttccctctaaaaagagatatatatgagacaaagccatacagtgtttccacagtgtacctcactatgaagacattcccctgaggctggtgggagacccacagcaatcagcccacggagtctcagcctttgacgccaagtgcttccatagtctccaagtgttcagattgtgcctttctcatctaaacatgcagagaaacaagcagccactgcaggaacaaccattcactacaactgctttcagccacctccaaaactgtgaggcagccctcgccagtgacctgccggccatcacacacactcaggtcatgcactgtctcacagtgcaacgtaatccctggtacccccaaagccaaagagatccagtgacacagtgccaaagacagccaagctttagacccgagaggaagctacccacgactcctcaggccccataaggaagacaaaagcggggcgcgtggcacctttctttgcgttccccaaggggtctctaagtcatcagaagtcccttgtagatcccttcattaggtaccaaagatggcaaaggggatggaggagcacggaggggtagaagtaaatgggactgcaatccttagaggagccaatttggaaaaatgttaaggttctaaaaggccaatacaattttacatttttctcatcaaaattataccaacaaaggaaccaaacagaaggaccaaacacacaatttaaaggggtttcagtcacctgaaaaaaaaattcccagaaacagggtccaaaagcagaaaaggctgtagatacatggcttgaagatcagctcacctgtttttaattaagccaacttctgaccacagagctcttttttaaaatcctttcaaatatcttattatcagattttagctgagaccaacagctgatagccatggctttgagacctttttttttaaaaccaaaggtacctcccaagtgactcaccaaaaccaataagccttaactaaagctatggacttaaccaaggacacataagccatctccaaagaggcgcaaagcagtcctgatgacatccagagccaccccaaagagctcaaagaaaggaaatcaaaagctgccagtggagggggaaagggtcaacaacaaatgagttccgcacaaagtcaaaagttggctgggtgcgtggctcacgctggtaatcccagcactttgggaggccgaggcagccggatcacaaggtcaggagttcgagaccagcctggccaacacggtgaaaccccatgtctactaaaaatacaaaaaaaaaaaagaaaaaaaaagaaaattagctgggcgtggtggctcacacctgtaatcccagcactctgggaggccaaggcgggaggatcacgaggtcaggagttcgagaccagcctggccaacatggtgaaaccccatctctactaaaaatacacacacacaaaaaaatcagccgggcgtggtggctcacacctgtaatcccagctactccagaggctgaggcaggagaattgcttaaacccaggaggcagagggtgcagtgagccaagatcatgccactgcactccagcctgggcgacagagcaagactccgtctccaaaaaaaaaacaaaagaaagaattcaaaagtcacacaaatatcaaaccaaaagggactggttcctctattgggaattgaacccaggccatggtagtgaaagtacagaattttaagtagtttccaagatgcagcagtcttcattgtgaatcctgcagggatccaaagcaatggtttgcgcgcacaaaggattttaacttgttacaggtcagatttttgctctttaattttgtgaagaggatttctaaggctagccacaacattattatgtgtctttcctttaatctccccacaaatacaaataaggcaattgtttagaatgagagacctctaaaatctttttttttttttaatttagggatctttctaatgtaaaggattcatcttttggctattgacaatcagaatttccaatgatgtatttattccaatagcaactcaatccaagaagccccttcatggaaagcccaaaagattattttccaggtttagagagggcatagaagaggaggttccaatgatgcccccaaaattcactcccaggaataggcaaagacagcaaaagactcttgttcccagagacagttaaggaacgtgtttgtacatacagtgcctccagtaacacacaatctgtcaggggctgccagtcacagacccattaacctgtaacacagggtaggcctgttgggattgggctttctgaggactgaccaggcaacaaacattgggatgacaaaagccccttatggatgggcctgaggagagcaaaaaccacctggcgaccatcaaacatcaaacaggccctccgaggcaaaactccttatctggggaaaatcagaagtaactaaacctccctattatctaaagcaggcatctggttccagatttcttcccccaaaaaacgtgtaagtaactataatttctatgtgtctccagaataccatgacgaaactcactgtacaaccgtcgctgacattaaggcaccaaaattactataaatgtaatcatttatcatgacttacgtggctaatatggtccaaattactgttaagcctccactttaaggcctataaatgcccttaaggagaaatccacccggcgtactcagtcctcttgctgaggcacctcattgcactcttctgcagcattctaataaactttctttcttttctttttttttcttttttttttttttgagatggagtttcactcttgttgcccaggctggagtgcaatggtatgatctcagctcaccacaacctccatctcccaggttcaagcgattctcctgcctcagcctcccaagtagctgggaatacaggctcccgacaccatgcccagctaattttttgtatttttagtagagatggggtttcatcatgttggccaggctggtcttgaactcctgccctcaggtgatccacctgcctcagcatcccaaagtgctgggattacaggcgtgagccaccgtgcccggcaaactttcttttttctttttttttttgagacagtcttgctctgtctcagctcactgcaacctccgcctcccaggttcaagcaattctcctgcctcagccttccaagtagctgggattacagccacgcaccaccacacctggctaagttttatactttcagtagagacagggtttctccatgttggccaggctggtctcaaactcctgacctcaggtgatccacccaccttggacttccaaagtgctgagagtacaagcatgagccactatgcccggccaaactttcctttttcaaacctattgtcggtaaactctttttaccaacccgcaagttgaccaccactcccagtgccggggctctgacagctcgcctggcagggacttcttaagacaaactaaaagcttgacacattcagaacaaaaacggtgctgcttaaaatattaaatgtcttgggttcccaaccattttcagactgaccacaaaatgtgacctgcgagtcactacctcggattggcagaggccaagagagtgctcctgaggtaggaggtgggacttagttgacccagttgaggattggctaaaacagggttggggcaatagcagctttcagtcagatatgcccgccactgtgccatgtcagtttaccattgccatggcaacacccaggagttgccacccctttccatggcaatgacccaatgatgactactccttccctagaaacttctgcataaaccatcctttaatctacatgcaatcaaaagtgcgtataaatgtgactgcaaaactgccctgagctgctactctcagcctacggggtggccctgctctgcaggagcagtcacagagctctaacgccacctgttcaataaagctgttttcttctacctctggcttgtctttgaattctttcctgggcaaagccaaaaccctcactggctaagctccactctggggtctgcctggcctgcatcattcccactcgctcacaactcaagctttcaaggacatcaaaagagaggagaatctcatccagttttcagttcagggacccacagcaaagtctgtctaactagacgcatccgatcagagctgcaaaactgactagcctgcaggacggccccaagacggggtttacaggggttttaggcctgtgttctaccctctttatgacagaaaaacacagaaagacaagaatgaaagacgactatttctggggaaaaaaagcaatcaaacaatatgaatacaaaactaatcacataaatacatttctctcattaaaactttgaagaggaaaacaaggtaaacagacatttttaccgtcggcttgacaagattccagagaggccgggagcctggctgctaagaccttcttacccttctttctgccagcttgtcggctcctgggttcccctgacggaggctcccaggagagtgactttagttatcctaccgactgcaccaaaactgtaggagcctagagaaaaacttttctgcattctgagttcacagaaaatcaactgacaaaagccaggttagtaagaaaaaaggcatacagatttattcatgcacacagggagaaccagagtgatgaccccaacctcccaatggggttcggaagcttatataccatcttgaggttacagaaagaacatgggctcaaagtatggccacagtttatggtggaaaatcaggtgaccagtggcaagaccggttacaggagggagagcagaggaggcctggctagcaaaggtggccttgttctacagatgaaacctcacaggtagcagccctgagagagaacagatggtgaatgttcccttcaggcctttaaaggcgtcagactgttactcttcccagatcaggcaaggagggcctcagaggaggcctggccgcatcagtgtagattctctccacagatgcaaatctcccccacaaaagacagcttttcagctattcttctatttccagtccttctgagtaactgtcttgaaccgtgtcaaggaaatatatttggaggtgacatattgtgttttccttcaagatcaaaaaggttaagtccaaggctgcccaacgagggagcgaggacccaatcacgttgtcctcagatgagtttttccccagcagcgtaaccctgcaacaggccagactggaccccagacacacattccacaccacaccacgcctccaccaccacacgcacacaacagacacaccctaaacaccagacacacacacacacctcaaccaccgcaaacacacatacgccacacctctaacaccacacacacccaccacacacatacgtgcctcaaacactacacacacctcaaccaccatacacctcaaccacacacacccctcaaacaccaaacacacccctcaaccacacacacacacccctcaaacaccacacacccacctcaaacaccacacacacatatccctcaaacactacaaaaacacacacacacacctcaaacaccacacatgcacacacacctgaaacaccacacacctgcctcaaacactccacacacaccacacacagacacgtacacagccccccgcacccagccacagcttacacgcacacagacacgcgtacgcaggagaaagggtgtcaaagcttttgctagtcgtgaaggaagagcccgcagtccatggggctgcacggttttccctgccatttgctcattcaccgggtgcccataacgctccgcgctcaggtctcttacaggagggcccgagtctcccagtaccggaggtctgggggcgcacgagccgctcctcctctggagaagctccggaccgagaggacaccggacactgcgcagcgccgagccccgcgcgcagcccgggacgcctcagccagggccgaccgcgcagaggaagctcccagagcccgtttcaagaccgcagccaacagcctcaggcgcacacggcggcctcggagcgagcacgcgcagcaacgcccctcgccccggcccgcccccggccccgcccccggccccgcccccggccccgccccgcaagggtcacaggtcacggggcggggccgaggcggaagcgcccgcagcccggtaccggctcctcctgggctccctctagcgccttccccccggcccgactccgctggtcagcgccaagtgacttacgcccccgaccctgagcccggaccgctaggcgaggaggatcagatctccgctcgagaatctgaaggtgccctggtcctggaggagttccgtcccagcccgcggtctcccggtactgtcgggccccggccctctggagcttcaggaggcggccgtcagggtcggggagtatttgggtccggggtctcagggaagggcggcgcctgggtctgcggtatcggaaagagcctgctggagccaagtagccctccctctcttgggacagacccctcggtcccatgtccatgggggcaccgcggtccctcctcctggccctggctgctggcctggccgttgcccgtccgcccaacatcgtgctgatctttgccgacgacctcggctatggggacctgggctgctatgggcaccccagctctaccactcccaacctggaccagctggcggcgggagggctgcggttcacagacttctacgtgcctgtgtctctgtgcacaccctctaggtaaagagggggccgcgcctcttccccgccccgaccctccatccctttcctcccaatggattgcaggggggcgggaaaaacgtctgtctctctctctagggaaggccacatttctgtctgtctcagggactctgtgacttgtcccgcagggccgccctcctgaccggccggctcccggttcggatgggcatgtaccctggcgtcctggtgcccagctcccgggggggcctgcccctggaggaggtgaccgtggccgaagtcctggctgcccgaggctacctcacaggaatggccggcaagtggcaccttggggtggggcctgagggggccttcctgcccccccatcagggcttccatcgatttctaggcatcccgtactcccacgaccaggtaggaaccacccgggccctcagccaccctcccacctcccaaagtcccccagcccttgatgctcccgcagccccacctgccagcccagccctcacggcagctgcccgcctcagggcccctgccagaacctgacctgcttcccgccggccactccttgcgacggtggctgtgaccagggcctggtccccatcccactgttggccaacctgtccgtggaggcgcagcccccctggctgcccggactagaggcccgctacatggctttcgcccatgacctcatggccgacgcccagcgccaggatcgccccttcttcctgtactatgcctctcacgtaagtgatcttggcccaaccccctggctgcccgtgacccctacccagtgctaactccagtctttgcccccagcacacccactaccctcagttcagtgggcagagctttgcagagcgttcaggccgcgggccatttggggactccctgatggagctggatgcagctgtggggaccctgatgacagccataggggacctggggctgcttgaagagacgctggtcatcttcactgcagacaatgggtatgccagcagggcagctgggtgctccggccctgtcacgggccagggccctggaggccttgcagttcagctgcttgccaagaacatagtgggtgagggggtgccaggagatgctggccacgttgcaggggcccaaggtgtagtcaggagacacagtgcacagagagctggtcttggtaggcctgggaggtgccgggctcatgctgggcacctccgggcaagctttgtgacttagaggtgtggggccactggtcaccctcggtggctcagaggctgtggctccatggctcatgagcgcctcctgtgtcccagacctgagaccatgcgtatgtcccgaggcggctgctccggtctcttgcggtgtggaaagggaacgacctacgagggcggtgtccgagagcctgccttggccttctggccaggtcatatcgctcccggtcagtccgcaggccctctccttggaaccctggccccaccaccccaaccttgatggcgaactgagtgactgaccagcctcctgcccccaggcgtgacccacgagctggccagctccctggacctgctgcctaccctggcagccctggctggggccccactgcccaatgtcaccttggatggctttgacctcagccccctgctgctgggcacaggcaaggtagggccggtgacccctgatcccagatccttggcccctgtcctggccttcccctggggtgagtgtgggcagtgcctgagagtctgtgcctcagtgcctcctgcactgagtggcatccaagtggcgccacctctcaggttcctgggtgggcaagaagcggtgcacgtccagggcctcccaccagggctggcagccccaggtatgtgcagtgcttggggcctgccccgccccgtgacccctgactctgcccccagagccctcggcagtctctcttcttctacccgtcctacccagacgaggtccgtggggtttttgctgtgcggactggaaagtacaaggctcacttcttcacccagggtaacccctccccgtggatccctccccccgacctgctgacccctccccggagccctagatccctggcccctcctctcgcccttgccctgtgcacagaattggccccctccccaggctctgcccacagtgataccactgcagaccctgcctgccacgcctccagctctctgactgctcatgagcccccgctgctctatgacctgtccaaggaccctggtgagaactacaacctgctggggggtgtggccggggccaccccagaggtgctgcaagccctgaaacagcttcagctgctcaaggcccagttagacgcagctgtgaccttcggccccagccaggtggcccggggcgaggaccccgccctgcagatctgctgtcatcctggctgcaccccccgcccagcttgctgccattgcccagatccccatgcctgagggcccctcggctggcctgggcatgtgatggctcctcactgggagcctgtgggggaggctcaggtgtctggagggggtttgtgcctgataacgtaataacaccagtggagacttgcagatgtgacaattcgtccaatcctggggtaatgctgtgtgctggtgccggtcccctgtggtacgaatgaggaaactgaggtgcagagaggttcaggacttgtacaagatcacccagccagaaagaggttgggctgggatttgaaccctggtgtcgtggctctggaagctgccctggcgccttggtgatctgcgtgggtcagtgcacacaggcacacgtcagcctcaaggacatgggcacatctgttcacaggagcagcgccacgtgcctttgagtgccaggaacggggtgggagggtgggagggtgtgagggccagaagactcagaagatgcaaagtgcctgagagagacgggatattcccccagaagaagcattcttagagacacaggcactggacctccttggttcttataagaaacctgtctgaagctgggtgatgagttgcacactccaggtggggctaaggggcctggagcccctgctggctcctaggaaggcacagcagcaggccctgagacggctcctctggggcccctccaccctcccaggcctctgcatttcacctgtgcccacacttctgtctcctgccttcaccttttgacccactactaacgattctccacccagcagacaaagtgatctcttaaaaatatctgttggctgggcacggtggctcacgcctgtaatcccagcactttaggaagccgaggcgggtggatcacctgaggtcgggagttcgagaccagcctgaccaacatggagaaaccccatctctactaaaaatacaaaattagccaggtgtagtggtgcatccctgtaatcccagctacttgggagtctgaggctggagaatcacttgaacctgggaggcggtggttgcagtgagccgagatcgcaccattgcactccagcctgggcaacaagagaaaaactctgtctcaaaaaacaaaaaatctgttaggctgcacacggcgattcactcctgtattcccagtgctttgggaggctgaggtgagaggatgcctgaggccaggaattcagaccagcctgggcaacatagtgagaccccagctctaaagatttgtttttgttttttttttttttttttttttttttttttttttttttttgagacggagtctcgctctgtcgcccaggctagagtgcagtggtaccatctccgctcactgcaacctccgcctcccgggttccagggattctcctgcctcagcctccctagtagctggaactacaggtgtgtgctgccatgcccagctaatttttttttatttaatagagacaagatttcaccatgttggccaggctggtctcaaactcctgacctcaggtgatccacccgcctcagcctcccaaagtgctgggattacaggtgtgaaccaccacacctggccaacaatatttgttttaattagccaggcgtggtagcatttgtcctagcaatttgggaggttgaggtgggagaatcacttcagcccactaggtcgaggctgtagtgagctataattgtaccactgcactccagcctcggggacagagtgagaccctgtctgcaaataaacaaataaaacatcaggctgggcttgagcatctattcctgctcaaaatttcgcaggcttctcagaagaaaatccaaaccccttacagtgacccagtttgcccttgaggcctccacccacacccccttccccccagtcttagggggtggcctggctgttcccttcaacggcaacgctctgcctccattgttggcctcctctgcagggagggactgtctgagcacctgcccgtgtctgtgcagcatggcacactgacgtcaggcccacgtgcatgcccaggtggccagtcacacgccaggtgctccctcagtgttggccaagtgagaggagcacaccttccgggcgttcagacacctccccgtggcagacaccgttcgttgctaccaaacagccacctccttcctaatgggctcccatttttcagtgctgggcaaaggtcccttgatcttggagttgcagcctctttctctccaaggagggcggtgaccagcctgagccagtcaatccagtgattggttcaggagtagcctgtgaccaggagtcctggtagtgaacgactggggcagccctgggggtgaggaccttgcgcagccgtcacaggccctgattggacactgggcagctgctaacccagtgtctccagctgcctacctggagagctccaagcgtaagaaaataaaccctgcctgttgaagccactgctagtgagggttctgttatttgcagccaaaagccttgctggaatgtggcctatgaatggttgtgtggcgggcacatgtgcctgcgtgagcctgtggtgtcagacagtgtgctgaggactctccacgcaaccgtttcatcccttttcatctggtttgagggctgcattgaccacaccccaaatcctgctgtgtttggaatcacccccataaggtggtggtttccttggggtgcccagcagcccctgatgctggcataaggggggcccttgtgcacttgtggtccgagtggaggtgctggccccaggtggcgctgtagaaagtgaagcagaggttcctcttcagactttcctccccatctaggagtaaatagtaacttctcttaaaagcaaaatttattcaaagacctgtactaacattcttaaataactgctagccgaataaagaactcaatgtcctttatgttcttagctcccacaatttagcctaaatatctgccctggcatgcttaaactggcccaagcaagcattacgtcacagcctgttcctcttccttatttgaaggtgtttttacctttctcatcattccacaagttacttcctccttcctttgttctcctctctcttttcctcttttaaaaagtgctaagttgctagccaatcgggacaaatacagaacgtgaggtcccgttccagccgatggaaaccggacacggcagtaaggtggacgcatcaggttacaaatgaccctgtccccttttgttcggtgtactctcacggcaaaactgctggcgagtgtaccctttctgcagaaagtataaaagaaaattaaatttatgttcaagtgctgtttctttacggcaccgaggaacaagcatttcaaacagcgctgtggttcaagatgagggcagagaggaactgaactggaggcatgattccagtatcacacgaaagaccaaaccctctagcaagaactaaatgaatactaacacccaaccacagtcttcaggcacctcctccagctctgctgctccacttcctctcacttgggtagtgtgcataactgagttaatcccacccgtgtttatgcatcagcaccgtgcagtgctgggcatggggttgtcagaggagacccactctgcactcaccgggcttacagtctagcaaaggagatgagcttaatcccgggatgtcagatgcacctgaaattttcagtgtgattgaagtcactgcctctggtagggtggggtgtgtggagttgcctgaccagggacaccagagaacctgtgggtgctacaaatcttccaaatcttaaggggtcataacatgatgcatgcatatgtataaagcgatcaacccacactcgcaagctgtgcacactttatgacgtcattgcgtattttctatttcagtaacaatctaaccataataaacgctacaaacgaagggtacctggtcttacaagaacataaccaagaggtgggggtggaaagataaatgagctctgaggagggtgttcaaatgcactctgcacccaaggatttttccactcccccattccgcttttggttttgctctgatttgtttgtgttcagaaatgcttttcaccagttagctgtttgagccggatgcaccctcctcacacaggcatgtacacgtatgcgtatgtgcacatgtgtatgcatacagaaatacgcacgcatgcacactcacattcacgtgcacggaggcacatacacatgcatccggggatacgtgccccccggggacgtgcgcacgtgaacacacaaggactcacccgtgcacacaagcatgcatatacgtgcatatttgcagtgacatacacactgttactgttgatttacaaaacagcccctttcctgtgagcctaagataatctattcaccaggctggcagccatccattcccacagagcagcttcctcagggagctcagtgtcctctcgaaggggctaagagtgttttgaaatggacagaacaaacaaacaagttgattctgtggtttcccctcaggtgcgttaggaaggaagaggggatatccggcgcccaagtgattgcgtgaacgacagggtaagagggggctcctgcagggaaactcccctcccctccctgtggcccctccttggctgtgtgctcgtctgtcccccaagtgaccagaagggggagcccagggaacgtttcaatggaacaatgtttaaattcacctctgaattttttttttttttttttgagacggagtttcgctcttgttgcccaggctgcagtgcaatggcgcgatctcagctcaccgcaacctccgcctcccaggttcaagtgattctcctgcctcagcctcccgagcagctgggatgacaggcatgtgccgccacacccggctaattttgtattttttagtggagacggggtttctccatgttggtcaggctgatctcaaactcccgacctcaggtgatccgcctgcctcggcctcccaaagtgctgcgattacaggcgtgagccactgtgcctggcacctctgaatatttttaattacgaaagtaatgcatattcattagagaaactcaagtaatgcccgctcatctcagtcccaggtagccaatgctatcagtttagggtttggggggcgggcacacaccacattgttctccacattcatgcaaattatgtattttggccccaggcgttgattcaactctaacctcaccccctgctgcaccctggacactgcctctcagctgtctgatgtgtcccctcccttttgcagccctgagcctggtgcagggggtcagtagtaatgaaggggggagtgcatttatttatgccccctccagcctccttggctcctttgtgtgaaggccgagagccttccttgtggatgcagcaacatggtgaaacccagtctctactggaatacaaaaaattggccaagtgtggtggtgtgcgcctgtaatgccaggtactcaggaggctaagacaggagagtcacttgaaccctggaggcggaggttgcagtgagccacgattgtgccactgcactccagcctgggcgacagagcaagactctgtctcaaaaaaaaagaaagaaaagaaaaaaagaaaaacaaagaaagaaactgtggcagccttattgctgtttaaggagaaagtttaagtggtctgcatagaagatcaaacaagccaaaacatttccttaacccaaagtctaatccagagcaaggccctaattccctctgattctgtgaaagctgggagagatgagaaagctgcaggagaaaagctggaaggtagcagaggttggttcatatggtttaaggaaagaagctgtctccatgatgtaaaagtgcaaggtggggcagcaagtgctgatggagaagctgcagcaagctctccagaagatccagctaaggtaagtgatgagggtggctacagtaaacaatagatcttcagtgtacgcaattttttttttttttttggagacggagttttgctcttgttgcccaggctggagtgcagtggcgcaatctcggctcactgcaacctccgcctcccgggttcaagtgattctcctgtctcagcctcctgagtagctaggattacaggcatgcgccaccaggcctggctaattttgtattttttgtagagatggggtttcaccatgttggccaggcaggacttgaactcctgacctcaggtgatctgcctgcctcggcctctcaaagtgctgggattacaggtgtgagccaccgcactcggcaccatctgtgactttcatagctagagagaagtcaatgcctggttttaaagcttcaaaggacagtctgactctcttgttaggggctaatgcagctggtggctttaagttgaatgctcatttaccattctgaaaatcccagggcccttaagaaagatgctaggctgggcatggtggctcacgcctataatcccagcacttggggaggccgaggcgggtggatcacgagggcaggagatggagaccatcctggctaacacggtgaaaccccatctctactaaaattacaaaaaatcagctgggcgcggtggcgggcacctgtagtcccagctactcgggaggctgaggcaggagaatggcgtgaacctgggaggcggagcttgcagtgagccgagatcgcgccactgcaccccagtctgggcaaccgagtgagactctgtctcaaaaaaaaaaaaaaaaagaatactcatgattcacaggaagaggtcaaaatatcatcatcattaacagggcttgaaagaagttgattccaactctcatggatgactttgaggtgacaagtccagtggaggaagtaactgcaaatgtgttgaaagtatcataatagcaagagaattagagttaaacgtgggcctgaagatgtgactgaattgctgccatctcacgataaaacttgaacagatgaagaattgattcttatggacaaagaaagttttttttaaattttcttgtttatttatttatttatttatttaggtagagatgggggtctcaccatgttgcacaggctggtcttgaactcctgggctcaagtgattctcctgccttggcctcccaaattgctgggattacaggcatgagccaccgtgcctggctgaaagtggtttcttgagatagaatctactcttggtgaagatgctacggacattgttgaaatgacaacaagggattagaatattgcacaggaccgagtgtagtagctcaggcctgtaatcccaacactttgggaggctgaagtgggaggatcgcttgagaccaggaatttgagacctgcctggacaacatagtgagacctcatctctccaaaaaaacgttggctaggcaccgtggcacttgctttaggtcctggctacccgggaggctaaggtgggaggatcacttgaacccaggatatcgaggctgcagtgagccattattgtaccactgcactccagcctaagtgacagaacaagaccctgtctcttaaaaaaaaaaaaaaagaatattacataaacttagttgataaagcagcagcagtgtttgagagggttgacttcaattttgaaagaagttctactatgaataaaatgctatcaaacagtgtcacatgctatagagaaatatttcatgaaagagtcagtgtggcaaacttcattgtcttaataaattgccacagctgctccaaccttcagcaacgaccaccccgatcagtcaacagccatcaacactgacgcagtaccttctaccggcagaaagattatgactcactgaaggtggagatgatcactggcatttttttagcaataaggtgttttctttttttttcaaaacagagtctcgctctgatgcccaggctggagtgcagtggcatgatcttggctcactgcagcctccgcctcccgggttcaagcgattctcctgccttagcctccagagtaggtgggactacaggtgcgtgccaccacgcctggctaatttttttttttttaagacggagtcttgctctgtcacccagactggagtgcagtggcgtgatctcggctccccaagtagctgggactacaggtgcccgccaccaggcccggctcattttttgtatttttagtagagacggggtttgaccgtgttagccaggatggtctcgatctcctgacctcatgatccgcctgcctcagcctcccaaagtgctgggattacaggtgtgagccactgagcctggccacgcctggctaattttttatatttttagtacagatggagcttcatcatgttggccaggatggtctcaatctcctgacctcatgatccgcctgcctcagcctcccaaagtgctgggattacaggtgtgagccactgagcctggccacgcctggctaattttttatatttttagtacagatggagcttcatcatgttggccaggatggtctcaatctcctgacctcgtgatccccccgccttggcttcccaaagtgctgggatcacaggcatgagccaccaagcccggccctattttattttatttcttttgagatggagttttgctctttttgcccaggctggggtgcaatggcgcaatctcggctcactgcaacctctgtctcccgggttcaagcaattctcctgcctcagcctcccaagtagctgggattacaggcgcctgccaccacatctggctatttttttttttttttgtatttttagtagagatggggtttcaccatgttggccaggctggtctcaaactcctgacttcaggtgatccacccacctcggcctcccaaagcgctgggattacagttgtgagtcatcgtgcccaggctcaataaggtattttcaaattaaggtatatactttaaaagctattgcacattcaatagactacagtatagtggaaacataactttttttttttttttgagacaagttctcactctgtcatccacactggagtgcagtggtgtaattacagctcactgcagcctcaacctcccaagctcaagcaattctctcacctcagcttcctgaatagctggggctacaggcacatgccaccacacccagctaatatatatatatatatataaaatatgcatgtatttatatatattatatacatgtatatctatatactacatacgtgtatatctataaaatatacaggtatacaatatatatacagaccgggtttttttatgttgtccctgctagtcttaaactcctgggctcaagcgatctgcttgcgttggcctcccaaagtgctgagattacaggcatgagccaccattcctggccaacataacttttatatacgctggaaaacagaaaatttgtgtggctcacgttgttgcaatcttagtgtggtggtctagaaccaaacctgcaaaatctccaaggtatgcctgcagcgacctctgctattttgcttttatcttttgccttaaattcttcttgattcccctaacctccctctgccttcaaccctcaagtagaagggagactggaaaaaatacaccaaaatattagaaacagttatctctgggccataaaaatacagttgattttagcctttcttctatcatctgcagtctccaaaatgtctatgatatgtgttactctttatagggaacgtaatttttttttttttcttttagacagagtctcactctgtctcccaggctggagtgcagtggtgcggtctccactcactgcaagctccgcctcccgggttcacgccactctcctgcctcagcttcccgtagccgggaccacaggtgcccaccactatgcccagcgaattttgtttttgtatttttagtagagacggggtttcaccgtgttagccaggatggtctcgatctcctgacctggtgatccacccgcctcgtcctcccaaagtgctgggattacaggtgcaagccatcacgcccagccagggaaagtaatatttttaaaaatagggaaatcctacttttatagtgtttataaaaataataacttactcaagcactacccttggcctgtctgactggcagattcatttaagccttatgataaccttatggggtggtatttttattgtagccaaaataacttttttgtttgagtttgattaatttatcttaacttttttatctttagtttttctgtggatatttccatttgcacttggaggtctctaataagtagcaaataatacttcaaaaaattaagacatatttgctgcaggaaaaaaaggaagagaaacaccctcagctcaacttcagcaaaaatgaggtggttttttttttttttttttttttttttttttttttttttgagacggagtcttgctctgtctcccaggctggagtgcagtggcgcgatcttggctcactgcaagctccgcctcccaggttcatgccattctcctgcctcagcctcccgagtagctggaactacaagcgcctgccaccacacccggctaattttttgtatttttagtagagatggggtttgaccgtgttagccaggatggtctcgatctcctgacctcatgatccgcctgcctcagcctcccaaagtgttgggattacaggcatgagccactgcgcccggccaaaaatgacttttaacattttttgtgtttcagcatttttcaacatatagtttctagaatgctacatatgaccctgcctattttctttctttctctttctttctttcatctctctctctctctctctctctctttctctctctctctctctcttcttttctttcattgtggttacagggtcttgctctttccagccagagtgtggtggcatgatcatggctcactgcagcctcaacctcctaggctcaagctatcctcctcccttacccacccaagtaactgggactacaggtgtgtgccaccacacctagataatttttgtatttttttttttttttttttgtagagatagaggtttcgctttgttgctcaggctggtctcgaactcccagactcaagggatctgcccaccttggcctcccaaattgctaagattacacagtagcatgagctgctgtgcccagaaatttatttccacttaatagcataacagaaattttctgtgtaattacaaacattggaactttttttcacatctacccaatatttcaattaggtaaatataccttaatcaattaaccctattggtcaatattcagattacttttatgcttacattatttcaaagaagaatgcaataaacacttttctgtagaacgcgttttatttagaacgccatccttgggctagattggcggaagttggaggcgtcatgcagcgcctcctgcctgggagccaggcgatccgccaggttctgggaggacctaaggtcaacagccacgcctgctctctgggctcacagtcagcagccgctaccaggagagcaagtcctcagaaggcccgagaccagggcccgggagcgcccacaaggacgggaggtcacccagtgacaaacagggaagggcagcaggtgcgcccaggaacccagaggctcccagagcagaagtgggatgcaggggtgggggcgggtcatgctgaggttcaacagggacctgcttcctggttcaacagggagctggccagagagagggatctgctgaggcttctgtttaaaaaccctggcctgggtgtgggtgcaagtggatttgcaggtgcagtgaggcagcggccggagcaggctgttgcacgaagacccaggaaagtcagggtggtttgatccaggcagaagagggggaaatggagcctggggcagacgtaaaggtgctggggtgaggataagggtgacaggagggaggagtctggggtgaccaaggcctgcagctcaggtgactgggaaaaaacataaaacagaacacagatgaatgcaggggtcgggacgaaggctcctgtgagtctgaagtgactgtgagtggcaccctctggccagccacagtggctctcacagctcattctgcagagcaccggcccagtgatgagccgaggaagtgcccctggaggtcagctggatctgcccagtggtctgcacagggggcggctgccaggggcctgagcacagggaaaccctcgaaactgtgggagggatgaagccagagaggtagaccccagaaccgaccaagcccagcatggggcgtggagggcggccaagctcaagaagaccatgagattggagaaggagctgcagagaggtggaaggcagacaggcgaaggactcacgagcacgtccaacagccgtcctaagggccggctggagggaaagagacctgaagacacgttggggggcggggccgggcaggggcggggccaggccgggcaggggcgggacgggggcgccggagggcagggcttggagaattctcacctgagtggaagagcagagggaggaggtgggtgggtggcagcggtttccaggcagcagctacaggggactgagggccacaccccgaatgccctagcccagggggcacaagtttcaaacgtacacacccagtggggctatctgcctctttacagctttatctcaattagtaggaaagttttctcataaacgttctgcgtttccgtcgtgccactggtctgcgtcctcggtctctctggggcctcaggtctgtgcgctgcacacgggctgaacctctggatcatgatgcacttcctaacactgggcagctatttctctgcttgttggctctgtgaagacgtgttttttacggacagcactttctaatgtttatgtagtaagtttgtgtatacttcccttagctcactaaggaaccttcaactgttgtcttcctggtgttgcacgaatcctgggctcagacagagggaccccggccatgctgacccctgcctgggaggcgggctcacccaggagggcctgggagggaacattgccgggcatctgcagtcacctaagcacatagtgaaaaagtcacctattttcttctggctttctctggagaattttttaaatatccattttaagatctaagtagattgtttttcttttcctttttctgagacggagtctccctctgtcgcccaggctggagtgcagtggtgcaatcttggctcactgcaacctccgcctcccaggttcaagcgattctcatgccttagcctcctgagtagctgggattacaggtgtgcgccaggacacctagctaatttttgtattttttgtggagatggggtttcaccatgttggccaagctggtctcaaactcctgacctcaggtgatacgccccggctcggcctcccaaagtgttgggattacaagcgtgagccaccgtgcccggccagattgttcttcaaggagttcatgcccccactacacactgacctgagccgtgctggcccccagtccgtgcacgtggaaaggacaccccattgcacagcctcggattcctctgtggccaatcgagtgtatctagggagaattcccaagggtgcttctagatacggcacctcagataaggccccagagcagcaccgcaggacccccggcacaatttcggaaagagctaaaagggtgagattgccacaacactcccgccactggggactctgtccctaccacaatgggcagcccctgggcacctggccccatgtcttagcaccctctagaaacagccaatgtcacaccaagcagagagtttattgaggccatgggcagggcccaggaacacagcacggggcgtgcgtggggtggatgcacgctggactgcaggggtgcgctagcagcggcaagcggaggggtattgggggcccaggagggccccccctcctagcagcgtctaggggcttcaggtgagcatcaagaaccactcctagcctccgcagggctcttttgggaacccctccctgcttccccctgagctccatgtggggtggggctggggcgagggggcccctcttgtccctgtggtcaaggatgggatgatcccttgagattcactataaaaattaaaattcccttataaatcgcaggggagtggcaggagggcatcacttggaagccgacattacctgtccctagagccgcacctcctccacacccccgaagttctgaccccaaagtgaagaatagaggataaggtttgcaggcacagagaggggcagagacaccaggagagagaaaagggagactgggaagggaaggaggaggacaacacagagaaagaacggatctgaggaaaagcaggggcacgggggctccactcccccgcagccccaacagctgcgccctggggaccgaggacgagagttcccagcccgcagacccccacaagcgtaaggtcccatgtccccccaatccagtccttgccaaagccatggtggcctcttgagacatcctcagccccagctgcgcctggagcagacggccaggagacagagcggtgggcaggctactccaggtagatgtcctccgtggggcaggcgtacgccaggtgctcttggtagtactccaggaaggcgcggctggggaaagacggtcctccaccagccactcagggccggtcctcaacccccaaactgccttccacagagcctctgagctctccctccttcctccctctgcagccatccataaccccccacccaggcatggccatgtcacccccaagtgtgaccctcagctctcctggcccagcaattctacccctgccagagtgcctgggccatgtgtctgtgcctgttcccaccccatgcccagcaccccaaactgtcacccaccactgccctctctacacagcacatctggttctccttccccagacctcccctgccaggctcctgcccccacctgctcacctccgctccccacctccgtaaccctgcacccattctgcacccacaccctggggccccactcaccccacactctgcgccaccggcctcatggactcctgggagacaaagacgtggcaggcgaagcggctcagcagggggtgtttggtgatgaagccgaaatagctgcgggcaagtcagtgtggagggcacgtcagagccctggcccagccttggccaccccacaaatgatgtagagagaagaggcaggaacaaagggcttggggagagggtaagggacaggagtgtgggggtcgcacaatttcaagatctgaagttgtctttttttggtttcagcccaagcacagggctgggcacctaccaagagttcacgctctgagttaattccatgatgaccaggggcgtccactctcccttctctgagccggtgctgctaccctctgtggccctattcagggcctgccccaggaccacagagcaaggcctctgcctggctactggagaccatatctcctgccaactcaggcctcctcctgcgggcctagcagactgacagccccttgcccagctccgaggtggggctggacgttacccctggtctgtaaaaccctcttccggtctacccctcgctcccactggaaagcagctccttgcggggcctcgctcatggagtcactgcccagctcctccacccagacattagcaaaaatcaaaaatcgtcgtccagagggagaggcaggcagagttctgcagcaggacgctgccccacccccacccctgaaactggccgacccgtccattcccccatggcttcggggctttgcgattccaccaaatgggaagccacatgatggtctgcttgccaggacagtgtgtgcacgctgtccacagacagagcacagggcccgcctcaaatgccgcgttcaagtcatgatggtaataagcgccgacccacagatctggcttcctgcattactcaggcaccatcctctgccctttccattaactcacagaagcctcacaacagccctctgaggtagggccctgatggagagctaggcacagaggttcaggagcttgcccaggacacacaggcaggatgggcagccctgggagaaaaggctacagtctgtgatcccaacaccagacatcctaatgccagatcccaacacagcacaccccacgctctcctgacctaccaccaccgccatgaagaaacgagttcatcgttcacctcacacggtttcgtccgtgcctcctcgtggcaagggaccggggacggggggtctggggtgacaaatattaggaaggtctgggccagggcagcagctcctccacctcctcccacacccctgccacatcttgactccaaaccccaaactcgactgaccaccttcctctcacgaaattctagctggggccctgtccagcctgagacctgagcttcacccagtttccttctgatgagaaatttgggtcattcttcctctcctggcagcgtccgctgtcccagtgaccccagagctgtccccactgtctggtctgcgccccgtccgctgtcccagtgaccccagagctggccccaccgtctggtctgcgccccgtccgctgtcccggtgaccccagagctggccccactgtctggtctgcgcccgtgcccactgtcccacctctccaccccagagctgtccctgctgtctggtctgcgcccctgcccgctgtcccacctctccaccccagagctgtccctgctgtctggtctgcgccccgttcgctgtcccggtgaccccagagctggccccactgtctggtctgcgcccctgcccactgtcccacctctccaccccagagctggccccgctgtctggtctgcgcccctgcccgctgtcccacctctccaccccagagctgtccctgctgtctggtctgcgccccgttcgctgtcctggtgaccccagagctggccccactgtctggtctgcgcccctgcccactgtcccacctttccaccccagagctggccccgctgtctggtctgcgcccctgcccgctgtcccacctctccaccccagagctggccccgcagtctggtctgcatcgctgcccgctgtcccacctctccaccccactgagcagcgtttccgcatggatcccatcagaccatctctgcactcggcggggacaacacaaaagggctccgcaccttccagcaggcagcaccctcactctcgaccacagggagagtccacaaggcccccaagatgcactgacgtctgtcccacgcctcagtcctggcagcaccgtgccctgctgtgtcttgcctgtctgtgagcctgcttcctccaactccccgcaagtcctttccagcctctggctggctctgcctctctggttcctcccagatctccttcctctagggtgctgggacacagagggcaggggcctgtgcctggagggaagctggcagccccccttggcctgctgctcctatgccagcacctcctcctcccctcctcccctcaccctgcctggccattcccctctcgtctcagtgatctacctgctctgacctggtatcttccctccaggtctccctcctaaactccagacccatgggaccaacggccacttcagtctcaccgtttgtgattgatcccgcatcccctctcggtgtgtgggctgcagtacaaccatcccccagggagacgtcaccctggtctcttccaggtcaccctctacagccggtcaacctaggtcctgcctgtactgcctcttcagtgcctcttgcatctgcacacttggtctcaggacatagcacctgtataacctcagcagcccccaggtcccctgtgtcacctccttccattaggagccttctatggcctcattaccagcaagattaagtacagctccttggcataatcaaaagggtccaggtcttccccggcatttctagctgctccccttacacgcgggccccagagcctatatagcccccgaccagtgcatcccacacccttggctcagctagaccccaccaggaagatccacttccccaccgctgtcacctgctgtgtttccaggctggccatcctgagccccaggcccactcaggcgtcctctgcacccacacaggcttctcacatccttcgcccgtgtgcctctctccacccagactggatgcaagcctgtctgacccacgcctcctgagtccagctcagagcaggcgccactgcaggctcagctcacagagctaagtgggtgcaggtggagctctcagggctgggcacgggcagccctcagggtctgtggggactcagggggcggttggactctcagggtttgtgggggcggttgggggactcggggacggtcagactctcaccagctgttgcggggatggcagccgcagaaggagatgttcttcatctggaagaaatggctgcagcgctggaactagagcagaggtgggcagaagtccctgtgtcaaaggaggcctggcgccacccctgcctcccacctactggacacccctgccagcctggccccgtcggactccgtggcctaaccctatcccccagtccccggtccccagtcccccacactcccacctcgggccctcctccgctcagactcagcttgaccccccgaagagagatctcgaggtcacaggaggcaggagggcgcaggtggacggtcagtttccgggcagtggcaatctacagaagaagttgggggagaagagggtcttgaggagcccacaagggcctttctttccccttggtgggactacgcctctgctccttttagcttatgtttgaggacacacatgctgaggaccctgagatgcaattctggaagacataaggggtgtggccttggccactcctcaggctcaggaggagcaatcgcctctctgcagtcagcttgcttcatcttccttctgctcctccaggcaggctgctgcgcttggctcaggagccaggaacagagacctcacccgccctgggctgctctgccctgctccctactgccccccagcctcagcctcagtactggtgcctgggcaggtgctcactaaacgtccactgagtgagtggatgagtagagggctcccagggaaggggctgtgagggctggtcttgattccagatgggaagaggaagggctgatggcagtcggggccacctggaagatctgtggcccagagacccagaggtgatgagggacagctgctgtgctctgccctagactcacctgctcaggcctctgaaccagggcctggggtacccaccccgagctccccctgcagcatcccccagaccctccctggaggaaatcagacctcagaccttggagcctcaagccctgtgccagcctgcagtgctggtgtggccgccaagcggaccctcagcctgcacttgcccggcctccacactgaccttctgcatggctgcacacaggatgccgttgccctggtggcagggcacctccacggagcccaggaactgcacgtcaaagcgctccacccagcaggggctccgcttactccctggggagcggggcacagagggcccaggtcaggcaggggcacaggggaggatctggggtgaaaagcctcccctcggggttgggacctcacccagcaggtccttggcagggccgggcaccgcatgggcgtagaaggcaggaaacacaccgcgctcccccgtgcgcatgttgaagccacggaaccagaagtcgtcctcctcggcctccaccaacacagggtcatccacatccagctccagctcgtctggatgccgcgggatgaacctgccgttgggggagaggtcactggggaggggggcgggattgacggtcgtgtccactggcgttccgtgatggcagggactgaggctggggccaccgccagcaaggagggaggccgtacctgaacacagcccggtgagtctgctctcgctcctcgccgttgaccagacaggagaaaaggccaaaggactcggtgcctgggagacccggcaggacagaggcgggggagacagggagacagagtcagagtagtgcttagaggcctggccttgggcagaggccaagtcccctccacagtccggtgtaggtgtcctacgagcgggaaggagctgaggcagagcaggccacctcatgccatgtcctgggtgggagagggcacccagccctgaccacagccagaccctcaggtggccctgggcactgtgggggaccctgggactggggccagggagtctgcaccttcctctgggccaccccccttttccccacctctcactcactggaggaccgagatgtgctgttgacgaagacattgaggaacttcttggagaaagtgaggtcagggctgtccggcgaggtgtcccccgagacctgaccgccgcctagcagcgccgcgcccgcctcctcctcgctggcctccccgccgctgtcctcttcgctgtcgtggcccagcccagcacagcgccgcaggctcaccagctccagctgcgtgtgctcatccaccaccagcgtgtacttgaccgcgtcgtacaccagcgacgcgtcccgcggcgccgaggggcccgtgcccctgcccccgggggaccccgcactgtcctcggcatcctcctcttcctcgtcgtcctcttcgtcctcctcctcggagcaggcggcggagcaggctcgtcccgggcgggcggcgcggccgggcgcggcccacagcggcgtgatggtgtcacgcgtggggttgctgaggaataggcagggcccgggctgcgcggggccgggtcgaggcgcggcgggcgcgggcggcggcggcgcgcacagcgtctccatgtccaccagctccacgccgccgggccccgcggccgcctcggggtcctgggagtcctgggcggccccgccggccggcgacacgggctccccgggcgggcgcggcgcaggagacaggcactggccggggcagcggatgggcgaggagccctcggagatcatgcggctcaccaggttgctgagcagccagggcgagtccgcgtcctcgctgaggtccggctccgactccgaccccgactcgtactcgctgttggtgtcgtcggggcccacgggcaggaaggcggggcggcgcgggggttcgcgcgggggctccggctccgaggcgggcgacgaggcctcctcgatggagttggtgaggtgcgaggagcggccgctgctgctgcttccgccatcgctgctcagctccagctccgtctccgagatggacgagatcatgcgccccaggcggcgccgcccgcgtcctccgagtcggagccgggcgaggacagctcctggctgctgcgacgtcccccgcggccgccgctcgagcggcttctcaggtcagcctcgatgccgggatctgaggagggcgaagtcccccctggcgcagggggttccgcagccggttcccttcgcagtcgcaacccgggcgcactggcgactgcgccccgccgggcccggtgtccgtggcagggagggggcccgggagctctgctgggcagggaggtggggtcaccctctctgcaccacccaggcctcttccagcagccagtccatcctccctgccctcctcccccgcttccccgcgccccgcgggcccaccacccctcacctctgagggcctccggggcgggtgagcatagcgctgtctcctgccaggaggccggacgcaccaggtcaaagcctccgttgttgtttagggagtcctggggtggagatacatgacggcggtcctgaggagggccagctcccagggggtgagcagggctggctgcagcccaggtgctatgaacccaggctcagctccagggagctgtgggtccgggcactcacctgggcccccagtgtggtcagacggagggtggtgggccggtgcttgtggggctcctccacggaaggggaggggataaggggcccgggggcaggtgcctctgagccagggtctcctccctcctggccttccccatctccctcctcctcctcctcctcctcttcctcgtcctcatcgtcctcctcttcattgtcatcgatcatctcaaactcctggaagtcatcctggaaggagcagatggggtgcggctgctccgagcgccccagggagaggctgtcctgcaggacggagggagatagcagggctgggccagagggcagcagtagcccaggggcccaggtgctaggagaagggaaatcggggagcatcagtcaaaggagagccccttccagctcactctgcccctctgtctacagggcgatgttttcaaaatctgcctaacacacattgggatcactccagttcttgggaagggcctaaactctacagctgaatgacagggattctcagagcagccccagccccactttcagactcatctaactgcagaaccccatcacatttgacaccagcactgtgttcccttcgcagcgttttaacacaacttacagttactggacatggtttttggtctgttgcaagccccaccagggcagggtcatgtccatgttatgcactgttgcacccgcccccaagaacaagacctggggctcagcggatgttcagtaaacatcaaacagatgcagaaatggagagacagcctctgcactctgaggattcaccaactttgcgccaaccccagggccattggcacagttattccccatgctggcacttcctctcctccattccctcctacctaccccatctgcctggctctgctaacctcagggcatggttgacatttcctctggaaattctccctgattccttcagtgtggattgggttcccttccccctcgtggaacttatgtccctgttggaatgcagcccttgacacgtgggcagccattgtcccttacaagtctttctcccctactaagttgcagctccagagagcagctgtcctgttccactcccagcacccagaagcccccagtacttgccacatggcagttgctcagaaatgttcttcaataaatgaaagcagaaatgtggagagacagggaggaggagaagcaagagatggacgagaaaagatttcagcagggggagacatgaaacagacagatgggagctgcagacgagggcacagggctgcagaggggacaaggttgtgatggcagctgccagggattagatctttctgggagtgatctgaggacagagggcacccaaagcaaaggagcacctccctgccccgggctggccaccgatggggtcggggagaatgctggggaaggccctgcgtggaggcctgcaatgtgttggaataagagagagttgataccaaggaaacctcaagggttaagtggggaggagccatcagaggagtccccggttcaaggctgagctcacacccaccctaaaaccccaagtgaacgctaagaagaacctaatgaggccctcccttgagctggatctgtgtccccaactcttctcccaccttctcacagtggtctgagtcgtagctgaggcccaggccacagtcatcagtgatctcagacagatcttcgtcgtcaaattcttccaggcttatgtcctggggaggcctggaaaggagaccagggtcagagagccaccaaccctggactccctgcctggcaactggccctgaggaggggcagagggaggcgtcagctcctacacccagtggtttccacagcccccagctctcggaacacatcctgccatcatcttgacccccaagctctgctcgcctgtggatcccctcccccatctgagccaggcctgcccggaggagccaaccctgcccccacccctcccaccccgcctccctggagagccagcagcctctcctccctccactcgcagctccaggcccctggggtcagggtcttgcagagcaggggagggggagctgcaacgcggcagcggcagatggggaggggtcgctcctgctctgggaagagagtctggcctgtttgtctccccctctccggcggagtgaggcctaaacccagaggcccagcgtcctcccaaccccagtcccttcccgcagggctccgggcttgatttccactctctcccggccgggccctatcggccaggtctggcgtccactgaaagaggccaaggccaccgggacacgccgcgccgggagggtgtgcccgcatcccgcccgcatcctcccccgcagagggtcggcccagggcctccacccttgacaggtcagccgtccaggccgggcgcggctcagaatcccggcggggcccgggggtcactgaggctggggacgcgcggtgaagatggagggagtgggagcggggtgggggtggggcgcccgagccgaggctcagggaccgcagggggccggggccgggtccgcgccggcggcggggctggggcggcggggacgggggtccgggccgggtcggggtcgggggggtgcgcagggagcggagggtccgcccggcccgggcgccgaggggggtacctgcagcccggcggcgacagcgagtggaaggtggagagagaaaacatctccgcgcgatccgccatcttctccgggagaggcccgcgactgcggcggggggtgcgggagcctcgccgcgccccgcgccggcgctcggcccgccccgctcacctcgtgacacgccctgcggcgtccgccccgcgcacctcgcccggactccgcggcggcgcggggagggcggcgggggangcgggggatggactcggccggggacgctggttggaggagaggcggcggcttcactgccgggcgctggttggggaagggccgggcgtgcgatgaggatttttcccggggaggggcgggagggaaggggcgggcgggtgggcgtcgggccccgccctggaggacccgcgcggggcgggaggccgaggaggcagcgccgggtccgcgggcntcggttcgccgtgggctgtttcctctgggcgagaggccggggcggccccgggagatgcgccgccgcgcccaggatccccccaggaaccctaacccgggtgcggcccggagcggggtggcgggcgaggcgggaggcgcgggaggagctgtccgccgtcgggtgctgatcggagctgtccccacggggtgctgaccggggctgcacggggacgtctgcacgagggtcgccgagcagggctggattcagaatcgagcacaaggtactcagaggatgctggctggggctaaaagtggactttgagcactcagtagagactgcacagccggacggacgtaccgacgggcactgggagaagttagcacccacggaggcgacatgcgtcccactggaaacactttttcttgggcaccgtgttgctgggccctgtgtagggaactgacccgctctggcttgggatggagccctgtggggagggccatggttgaagctgagctcgagacggtggctgtgggaggaggcgggagatcagggttgagggcgcagaactagggagagactgcaggacactttttttctttctaaaatagagaccggtggctgggcgcggtggctcacgcctgcaatcccaccactttgagaggccaaggcgggtggatcacgacgtcaagagatcgagaccagagaccatcctggccaacatggtgaaaccccgtctttactaaaaatacaaaaaaattagccgggcgtggtggcgggcgcctgtagtcccggcgacttgggaggctgagccaggagaatcatttgaacccgggaagcggaggttgcagtgagacgagattgcgccactgcactccagcctggcaagagcaagactccgtctcaaaaaaaaaaaaagagagagagagagaccggctctctctgtattgcccaggttggtctcaaactcctgggctcagctatcctctggcctcagcctcccaaagtgctgggattacaggtgtgaaccacagcacctggctaaatattggctaaagaaggaggctggcatttcaacaaaagcgcaatcccttttcccccttgatgaaagttatgtgccctaagatttctttatgtcttagttctgcggaaaattcttttttttttttttttttttttttttttttttttttttgagacagaacttgctctgttgcccaggctggagtgtagtggcacgatctcagctcactgtaacctccacctcccgggttcaaccgattctcgtgcctcagcctcccgagtagctgggattacaggcaatcaccaccatgtccggctaatttttgtgtttttagtagagatgggtttttgccatgttggccaggctggtcccaaactcctgacctcaggtgatctgccctccttggcctcccaaagtgctgggattacaggcgtgagccaccgcccctggcctggaaaattattccttaggaaaggacaaggcacttgagtgacaaacaccagaaacgacatggcagaaggagctcatgcaagtcgggaaggggggtatcaccattccagctcagagagaggcctgtggccagggcctgattgaacctgcactctttggtgtcccatcacaatttatattttatgccaattacagtatttttctaagaatggcatttacttggctgggcacagtgacttacacctgtaatcccagtactttgggaggccaaggtgggtgcgtcacttgagctcaagagtttgaaaccagcctggaaacatgtctctaccaaaaataaaaaaaattggccgagcccaggaggcaaaggttgcagtgagctgagatcacaccactgcatccaacctggggggcagagtgagatcccatctcaaaaaaaaaaaaaaagccatttactagtttatgcttgccttcttgacttgggttggctggagagaagagaggctgtcatctctctgtgaagccctaggctccaagcatggtgcctggcaaacagtaggtgcttagcagacatgtgaatgaatgaatgagagagcttatggtctctaacccagtctggggcatcaggtctttgccataacagtcttttcccttttagaagcactaagaacattccccatttctgagggagtctgggcctattaaccactccctgcctttcccaaaaaatccagatcccttcccagatttcacagagagtttgacctcaactttccagattggcttttgatcctgagtcttttcaccaaactggttcatctggacatccacataaatgacccatccaataccctggtcagtcagttccttgatttctgatctgtcaacagtctttaatactcaagtgtagtgacctctcccacaaagtgcctccaggatctaccttcatctggaattgcagcaagcttaaaatctttttttttttttttttttttgagacagggtctcactctgtcacccaggctggagtgcagtggtgtgtccctagctcactgtagcctcaaactcctgggctcaaggaatccccctgcctcagccttctgagtagctaggaccacaggtgcacactaccatacctggcattttgtttgtttttgtaaaaacagggtctcactatgttacccaggttggtcttaaactcctgggcccaagcccaggtgatggcctcccagagtgctgagatgacaggcatgagccacagcatccaatctgaagtcttatagtctcaaatttcatcttagatcctaatccccaaaaccttcctcaagcctctccccttccttccctccctcttaaaagatggtcactcccaggtcccatgagcgtaaagaccatgagatgggggataccgcccgcaattttatctgtggacctcccatcttgcccccagagcacagatggaagatcgtcggccttaaagtctgaaatacgggagccactcttcattttgcaccaacttgttgaacgtgggcaaattactcagttcctcgagatcttggtttcttcctctgagcaatggtgctgcgaggaccacatgtcgtggtgtaagccccagacacaggccctgttgtttgttggtgatcatttaaggctcacctttcccctgctcctcacaccggggacatgtcctcccagtcccccagggctgctctgtgcagctcagggatacattagtgaaaaggcagcaactctttcctgagggggtttatgctccttacatcatgcacattttatcaaatttgcaccttccttgtgtgctcctcagagcatcattgtatggatgaacaaatgggggtccacagggagctgaacatccctccttgaagttcctcctccagcctctgggccacaggcactgggttttccttcctgaccaccacccgttgtcagcgtccttccagactccttctccttcaatgacaaatcaagatgttgtgacgcgaccattttaacgctttcttccctctatggtgcacgaatggcatagacattacaaagcacaaaattgattggacttagaagggagagttggaatcgcaacagcttccacagtcctgaccacagcaattctaaaaagtcagagaacattttctgacaactttctgagagattagaaaacaaatgcaaactatcagtatttattgtactcatatttcacagaaatcacaaacacaaaataaatatgccaatggttaaaactgcaaacagacacatttaataaagatgaaaattaagagttctaccttcaccatggtgaagtcctaacgccaccatttcccgaatcttcatttttatgcagccaggtctctgatcactacctcctacttttcttggtctcttgctgcattactacaatacccacttttttttttttttgagacagggtcttgctctgtcacccaggcaggaatgtagtggtgcaatctcagctcactgtaacctctgcctcctaggttcaagcaattctcccacttcattcctcagagtagttggactatagatgtgtgccaccacacctggctaatgtttttattttttgtagagacagggtttcatcatgttgctcagcctggtctcaaactcctgagctcaagcaatccactcacctcagcctcccaaagtgctgggattacaggcgtgagccactgtgtcaagcctttttttttttttttaactccataagaaatgtgcttcaattactattactgtgtaacaaattatcctcaaatttagtggattaaaacaattaagttgttatttacaattgtttgttttgagggtggaaattcaggaaggactccaatgggaagttcttgcctgggtctcttttgaggtttggttgcagttggaggtaagcctggctcgaggtctgagatggttcattcagaaggttggcagtggatgctgagtgtgagctgggggctctgctgcggctgtcaccagcatatccactgggctctcctgcatcgtggtctcagggtagtttcttttcttttctttttttttttggagacaagagtctcgctctgtcacccaggttggagtgcagtggtgtgatcttggctcactgcaacctccacctcctgggttcaagtgattctcctacctcagcctcccgagtagctgggattataggtgcctgccagcacgcccagctcattttttttttgtatttttagtagaggcgggtcttcgccatgttggccaggctggtctggaactcctgacctcaggtgatccgcccacctcggcctcccaaaatgctaggactacaggcgtgagccaccgcacccagccaagggtagagtttctacatgatggctggttcccatcagagtaaggatccttggagggcatgcccttttctggtctaaccttgtaagtcctacagcatcactgctgctgtgactattggccaaagcagttgcaagcctacccagcttcaagaggggggtcacagaccctacccctccatgggaagagtgtcaaagaacttaggagctgtgtcataaaaccactgcaaatctgcagtccatgtgtcatgaaaccaccacaaacctccagtccatgtgtcataaaaccactgcaaatctccagtccacgtgtcatgaaaccaccacaaacctccagtccactgaacctcgctctttcctcaatgtccactcaagtttcttacctgacattaaccctctcaatcgtcaacttgtccttctcttctggatcatttccatcagcaaacaagcataacctatgttaaagaaaatggtaattctcacctgatggtacaggacatccaaaatcatggcatttacaacattgttatgccttaatgaaagtgacagtaggccgggcacggtggctcacccctgtaatcccagcactttgggaggccgaggcaggcggatcacaaggtcaggagatcaagcacaatggctaacacggtgaaaccccatctctactaaaaatacaaaaaattagccaggcgtggcggcaggcgcctgtagtcccagctactcgggaggctgaggcaggagaatggcatgaatctgggaggcggagcttgcagtgagccgagatcacgccactgcactccagcctgggcgacagagcaagactctgtctcaaaaaaaaaaaaaaatccttctggtttaagaaagaaatctcacacataattatacctttcagaaaacagatttctatcagtgcagaagatgattataacatgcatcagttgaagtttttaaatagattgctactatcaggaattttttttttttttttgagacacgattttgctctgtcgtccaggctggagtgcagtggtgcaatcatagttcactgcaacaaccacctcccaggcttaagccattctccctgcttcagccttccaagtagctgggactacaggtgtgtaccaccacacccaactcatttttgtattttagtagagatggggtctcaccatgttggccaggctggtctcgaactcctgaactcaagtgatccgcctgcctcggcctcccagagtgctgagattacaagcatgagccaccacgccttgccaggaaattttttaaatctctgaaatctgaatgtctcactagactccttcatagaacgtacatgcccaaagacacttttataataactgaaaaaacaacaggattatacactttcatgaaagtctttgcactgcagcagagtcatagccccaaggaggacagcactgcagcctcgacaaatctctctctgacatacaaattttggagagttttccatttactgcgatgagcacaaagggaacaggcccagcaaagcatgccaggagctatcaagctgcagaatgtctggtgagcgcttcccagatttccccagttcctcccaaagatgcactaaagttggtgatgacagggctctgcctgacagggagactccctgataggttgctggagaccctgaacagagatttaccaagccttttttggcggggggacggagtctcgctctgttgcccagaccggagtgcagtggcgcgatctcggctcactgcaagctccgcctcccgggttcacaccattctcctgcctcgtccttccaagtagctgggactacaggcgcccgccaccgcgcctggctaattttttgtattttttagtagagatggggtttcaccgtgttagccaggatggtctcgatctcctgaccttgtgatccgcccacctcggcctcccaaagtgctgggattacaggagtgagccaccgcgcccggccggctatcaggcctcttacacccacaaacttgtcatcttggaactcccagcataattacctaatttgattaacaaaaactgtcttttttttttttttttttttttttgagatagggtctcactctgtcacccaggctgaagtgcagggatgtgatcttggctcactgcaacctccgcctcctaagctcaagcaaacctctcacctcagtctcccaagtagctaggactacaggcacccgccaccatgcctggctaatttttggttttttttttttttttttttttttttgtagagacaaggtttcaccatgttttccaggctggtctccaactcctgggctcaagtgatccacccgcttcggcctcccaatgtgctgggattacaggcgtgagccaccatgtgcagcctcaaaagctgtcttcatcctctggatctaatagctaagttctaagtacaatcttgctacacgggccgcaggataagagaccgggcagctggcaggatggcacttcttccctcccctgcctcactttctcacccacccaccttatttcctgcagcttcaaacaaactccttgcatgtgaatcctcgttttagctacttcttctgaaggaatccaatctaaggcatcctgctaattgtgacactcacacttaaattatcaaatcgtaaagttaatcaatagttttacccttttcctgaacaatacaaggacccgagaagtatttaactctgtttactccagtcccaacttaaattttattattatgcattttaatattctttatttttccttttttttttttctggttttttagacagagtctcactgtcacgcaggctggagtgcagtggcatgatcttggctcactgcagcctcgacctcccgggctcaagcaatcctcctgcctcagcctcccaaagcactgggattataggtgtgagccactgtgcctggctattatttttcttttcaagacccataggaattgttattgttgctttaagccattgatgtttactagatttacccaaatgttacctctttctatatccttcattccttcttccttgtcagatcaccctgtgataccaattccttacaccttttaaatgtttctttaatgagaatcttccgtagtaaactcagtttgtccgaaaatgtcttcattttgtcctggttcctgaaagatatttttacaggatacagaattctgggtcattagtttccattatcacctcgaaggtctcgtccattgtcctcctctggctttccttgtcgctagaaaacatcatctctcagtcactcccttgaaggtcattttccatgcatctccagctgcatttaggacgcttttgtctttggtgttctgaagtttcaatgtggtctatctaggtgtgggtttattttgtatttttttctgcatgaggttctcaattatataaatttatatgaatttctcaattatgtgactttcattagtttagaaatttcatagccattatctcttcaaatatttcctctgctccattccatctcttctccttctggcactctaattaggctcatgttggattttcctattctagcctttatgtctcttaaccctttttccaggttttccaaatctatgtctttccaggcagcattctgtatactgtattcatatttatcttttagctcatgaagtctcgctttggttatttataatcttctgttaaacatgcatactaagtttttaatttagttgaaattaaaattcaactaaaatttgaactaaattaaaactttccttttagaacttccatttggttcttttcaaactgcttgactattctttatagttttgtgggttttgcacacattttctttctttttcttttctttagagacagggtctcactgtgttgcacaggctggagtgcagcggcatgatcacggctcactgtagcctcaacctcccatgctcacgtgattctctcacctcccaagcacctgggactacaggtgcataccaccgtttctggctaattttttatttttttgtagagacagggtctcactatttgcctaggctggtcttgaatgcctgggctcaagaattcttcagccttggcttcccaaagtgctgggattataggcatgagccaccatgcccagccttaagacatatgcagatgtaaaacataacaacaccaatacagaggatgggaggagaaatgaaaacatactgctgtaaggaggctcttacattatatgtagatgccataacatcatgtgagggtagactatgacaagttaaaaatgtatattataaatcctagagaaaacattttaaaaactacaacaagacacaattaataagctaagagtggtaataaaacagaatacgaaaacatacttgatcaatccatcagaaagcagaaaagaagtggaaatggaacaaaggtaagatgggacaaataaatagcaagatggtagatttaaacccaataatatcaatgattacattaaatagaaatgatctaaactcagattgaaaggcagagattatcagaatgtatttaaaaagtgagacacaaactataagctacctcaagaaatgaaatgttaaatataaacaccaagataggctaaaagtaatagactggaaagaaagaaaaataaaggagccaggtgtggtggctcatgcctgtaatcccagcagggaagccagggtgggaggatagcatgagcccaagagttcgagaccagccagggcaacacagtgggaccccatctacacacacacacacaaacacacacgctagccaggtggtggcacacacctgtagtcccagctactcaggaggctgaaggatcgcttgagcccaggaggtcaaggctgcagtaagctgtgatagtgtcactggactccagcctgggcaacagagtgagactctgtcagaaagaaagaaaagaaagaaaaagagagagaggaagaggaagaggaagagggagggacaaagaaagaaagaaagaaggaaaagaaagaaagaaagaaagaaagaaagaaagaaagaaagaaagaaagaaggaaaagaaagaaagaaagaaagaaggaaaagaaagaaagaaagaaagaaggaaaagaaagaaaagaaagaaagggaaaagtgaattagaaggaaagatcagaatcaatggaataaaaaatatatacacagttgagggtaatcaatgaaaccaaaagctggttctttaaaaaactcagtaagattgataaacctctagctagactaaccaagaaaaaagaagacataaataaccttatcaggaatgaaagcaaaaatatcattatagattcagcagatattaaaagaattataaaactatgaacaactttatgccaataaacttgaaaatgtaaattaaatgaacaaatttcttgaaagacacaaattaccaaagctggaacaaaaagaaaaagaaaaatctgaatggcctcataattactaaagacattgaattaccaattaaaaacctttccacaaagaaaactccagatccagattgccttactggtgaattctagcaaacatttaaggaagaaataatactaatcctacataaacatttcaggaaacaggaggcagaaaccttcccaactcatgttatgaagctagaatgtcactactgaaaatgtggagaaatcgtatcaccaaagaaactacaatctagtttgtcaaaccctctgacaattcagctcctaaagtaatccctacaaaagccaggaggcatttgatcccatagaagaaactacgcagcctccaagaaggttcctctccagtgtcctcctagatgtggacacgaagtctaacagacaaggagaaacattccagaaaactgagccggcgctgccaggaaaggggacttcactatttatgctcaataggatttggcaagtgccacagactagagatcgggtctaaatatggggtctttgtagtatttacccaattcttactcttttgttttgttttgttttgtttgagacggagtttcactctttttgcccaggctggagtgcaatggcgcgatctcagctcactgaaacctccgcccgctgggttcaagcgattctcctgcctcagcctcccgagtagctgggattacaggcatgcgccaccacgctggctaattttgtatttttagtagagacgaggtttctccatgtgggccaggctggtgtctaactcccaacctcaggtgatccgcccacctcagcctcccaaagtgcagggattataggcatgagccactgcgcccggcccttaatctttctttgtatgtttgggacacataaaatatgttttagtttatacgacattggattaaactagtgtacactgagtttgttggaggatgaatgacaaaccttttataagtcactggaccacaaggatctacctctggacctgaaggagcaaattgcatataagtcagagaacctaaattttgagctggatgctgcaactagttagaacttttacagtggtctcccttaaggataaggtgagtgagttttgtatacaggaagtagagagggcatggccaaaggggcagatggtgccctaatatcaattttccagttttcccataattttagaatccctagccagcacctacacctggcctttatccattcacctgccgacgcacactcaggttgcttcctaacttggctattgtgaataatgctgcaatgaataagctggtactgatatcctccaagatattgatttcatttcctctggatatacatccagaagtgggattgctggattgcatggtagttctgttttaattttttactgtattccataatggttgtaccaatctaccttttcaccaacagtatacaagggttctcttttctccacatcctcgccaatatttgttatctcttgcctttgttttttttttttatatagtagccaaactaagaggtgtgaggtggatcgcgttgttgtcatatctcgttgtggtgtttgcatctccctgattagtgatgttgggcccctttcatatacctgttggtcatttgcatgtcttctttggagaaatgtctattcaggtcctttacacattttaaattgggttatttggtgttttgctattgagttttgtaagttccttatacattttggatattaactccttatcagatacatgatttgcaaatactttctcccgttccatgggttgttgatcgtacccctttactatcttgaaaagaaatttataacctatttttttaaattacacaatggtctaatgaagggatagagagaggagagtggcagccaggtcatgtcacatacatcacaaatccactccacattctcatcttcccatcaatgtaaaccaccaaggagtccaggcttcattcagccacccaggcacggtcataactactcccaggccttgagccaaaatacggaatcaaagattctctttgaagtgcactcatgttgataaatttgcactaacctacaattcattcttggctttgtatcctcacagtccattcctgtatgtattcccctcgccttttttttttttttttttttttttttttgagatggagtttagctctgttgctcaggctggagtgcagtggcacaatctcggcacaggctcagggggccgccatggtgtcagagaaggcctggagcaggaagtgcaaagacacacagcagagatgcagctctgtgtccactgcagttaaaggtgggctgagggcatcagccaagacaccatctcctgcccctctcagatctagtcagctacaatattgagtctactctgtcacgattcttcaaagtaaaggctagttacaactcctatgaaagccttaatacaagaggcttagcagaacaaatacaatccccactgccacagcttctcccaagtaacagatattcagcagccacctcctccttggcctcaccctcaccagcattccagcttgtctccatggcttgcctggtgacgctgcccagaccttcaccctgaggcatctgagcccttaggggctatggctgctgaaaagaccttttcattgtcattacttggcatggaagcaccaagacagacctagatgaatcctctaagtgccagatcaatgcctgcttgccccgttacgcagcagccacgctacctcctcaccgtttatcaggatcaagtatcccctcctttgtggcctgctggtccaccagtatgaggagctgagagtaacctggtggtctttgcagattcaggctcagcagaggtatccttcctgcaaccagcaggagtgccctcgtggaagcgttcctacctgggaaacaggctctaatccagcagatcctaaggctgtggagacagaatgtacaaattctacgtgtaagcactgggaatgatggtgagaagtagctaatcccaacccttgggttcctggacctgtgtctttctgcttggatccacatgaagtatctactgggggcagagcaccatatattagactctgattcagtgtatatatcccaactcctcaggatactgtcctagaaccaggacctcagctaagcccttaagaagtcatcccatctttccagtagcctagctgcttttacgtaacgcaggatattagagaagcagtggatcccatggtcatccacacactaccatacctctttcgctataaaatggctttcttggcctgaggcgatgtgattcgtgatcccatgttggtacacggagcatgcctgaagctcctggatagtgatgctggcctgggaccctgtggatacagaagacaaacccttatccagagcaggtgtcaactccagcaaggatgaagggctgtcaccaacttgccactaagtaactagttggggtgctctagggatggtatctcagcaggggctcagcactgatcgctttcagcaggagtaatcatgagacaagccttgagaaagaaggcctgtgctggtggacgctaacctgtgctccttctgcatgacgccgccactcacagtccactgttcaagcacaggggtagccaggggcacagctgactgacatcccatccatcctgctgttcaccaactcctctgcagtattaacacaaggcagagagatgcacatattgtgtggccactcctgtaggtccatcttcccctcttgctcttttcaggtccctgaccagccagcaggacgtcacaacccagaagtccatatgcgtccctccctcaggccactactctgtccactgcctccatacaaagtggatatccacacgaactgctggaagctcagccccatggaggatttcctattgtcgtcctttagggtcaccttgaatgggactgtagtgtacctatggttcattttcagttcatatcaacacatcaaactgacctatatacgaaccagaccagaatgcttatctgctaagggagaaatatcagtgcaaagcagatgtggggccacactgccacctcttcctgtaaataactgttacccactagacacgcttgggtccaagcccaaggcttcctttttcattgtaccatcaattgctactgagcctctgacctactgacttggaggatctgacaacacctcgcttgggcagaccctgtcgcatggtcgctgatgtcccaccagcaggtgctcggtctctacctgggtctggtagtgtgcctgatactgctctcacttggcgagtagttctctgctgcagaaggcatggtcttgtccaagaactctaggacagtgtactgcaactcttccgttggagtttgccagagatgccatatagggtccttcctaccccaaataagccccccggtaacccattggatctatgcagcagggaagcccatctcccaatccaaatctttagcagagccctctttttctctgggccccactcaaagctggcagttttcccgttacccaataaaggggtcagagaggtatcctctagcgcggtgcatgctgactccaaaacacagaggtgcctcaatgctgtgcctctttcttccttgtaaggatgcaggatgcaataacttgtccctggcttgccctcaaacgctgcacccctgagaatgtcactgatatggcaggctccagaacttctgagggcttctcgctcatcctctgacatgcacggccttcttcaccatgtccaactagtatgacatcatcaatgttatatggaatatagatgataagctacctaaggactattgtgacagagaacaggagagttcagacagcaagaagcaagaccatttacagagctgtccttcccatataaatgtgaactgcttttaatcctctttaccactggcaattgaaaagaatgttcaccaagtcaataattgcattatcaagagccagaggtgcatttatcggttccagtaaagataccacacctagcacagctgtgtgatcggggacacgacttggctaagtttgtgcagggcatcatcatttacttgaatccaccaagatttagcaggagccattcaggttaattgaagggatgaaacggtaaccactgctttataagtctttgagggcgaaatacctctgcaattacacctggaatgcagcattgtttctgacttactatcttggaaaggtttcagtagggtgaggagtttcaaaggtttctactttgcgcttccttacatatggtaccaaaggcctgggatcaatgtatacgctccgccctctgctaggtaaaaacatcccaagtatgcattgagaccagagaagtaaccacaggactcgggttgggaattctgcttatcatctgatttccataagcctgcaccctaatgagagggccatgatgcttcagggctcctggaaacagtgtcagctcagatcctgtatcagcccttcaaagacctagacagtcccttttccgaagtaaactagtttttttggtgtgtttgttgttgctgttcagacagtcttgctgtgttgctcaggctggagtgcagtggcgtgaacacaggtcactgcagccttgacctcctgggcttaagtgattctctcacctcagcatccagagtagctggaaccacaggcacctgccaccacgcccagctaatcttttaatttttgtaaagacaggttcttgctatgttgcccaggctggtctcaaactcctgggctcaaacgatcctcctacttcggcttcccaaagtgcagggattaaaagcgtgacccactgcccccagccagaatcagttttcttttttttttttttttttttgagactgagtctgactctgtcgctcaggctggagtgcagtggctcgcggcaacaaggcctgggttcaagggattgtcacgcctcagcctcccgtgtagctgggattacaggcacaagccaccaaacccggctaatttttgtatttttagtagcgacggggtttcgctatgttggccagggtggtctcaaactcctgacctcaagtgatctgcccgcctcggcctcccaaaatgctgggagtacaggcgtgagccaccacgcccggaccagttactttttaaagtggctctaggtccctttagggaaggattggaggaatatttcttggtatatgctcagatgctggtattgtaagatccttcctgagaggaaccaagcctccttgtcaattaatgggctctaggtctcaaaactgactcagatttaaacagaatgatcatgattttccactgcagcaaaagtgacattagccttgtgatcaccaatttttgatttctttctggttatcaaacaatactctagtcagatgccccaaagaacaccatggttcgacagacattgccacagatctctgtgggtccagcgttcctggtcgccgctctagcctggggcagaagcagaaatgcaggaggcacgcgtttaaatcaggacgccctcaatgggaggtgcgcaggccgaggagggggctgcggcaagctgcgagtcttcactttcttcggctcttgggtttgactctgtaattggttctaggcctggaggagacgaggaggatagggggagaggggaatgaatgaagacgcgcatctcaagcggggcagcaaaagactcctcattcagaggtgcggctctaccggccagggagtccccgtgtagactgggcatttatgcaactggagtcatcggaactgtcccaagggtcacattccttcagcaaatgtttactgcgtacccaccgggtgcccgcatcccgcactctgcccgcgctgtgcggccctgcctagcgcgcgcgcctcctccaggcctcacccacgctcaggacggacgcgcgctggacggctcttccttgtcggagcgccccaggggtcggggaagagggcccggcaagggagccctcgcgccggagctgcagctgcagccgccgccccgccgccccgccggctcccacggggcagagacgcagctcctctccggtcttcccgtacgctaccgcgcccgggcagttcctcgcccgcgcacgcgccgctccgccaactgattggcctccggcgcctcggattggcccaggccgtccaacagcagccccgcccagagagagaccattggtccttgcccataggggcggggcccggcagagatctgcggaattcggccttcggaaagagcccccgggccggggcacggagagagccgagcgccgcagccgtgagccgaatagagccggagagacccgagtatgaccggagaagcccaggccggccggaagaggagccgagcgcggccggaaggaaccgagcccgtccgaagggagcggagcgcagcctggcctggggcccggtcgagcccgcgccatggcggccgaggcgacagctgtggccggaagcggggctgttgcggctgcctggccaaagacggcttgcagcagtctaagtgcccggacactaccccaaaacggcggcgcgcctcgtcgctgtcgcgtgacgccgagcgccgagcctaccaatggtgccgggagtacttgggcggggcctggcgccgagtgcagcccgaggagctgagggtttaccccgtgaggtgggaggtcaggggtcagcctctccggtgcgcggatcggggtcaggggtcagccgcggggccctcaggatgctccatgttttcgcccccctcttgcgcccgcgcctggggcggggcggggccggcctggccgggagggggccggggccgcggcaggtagggccggccgcgggctgagcgcgcctggtgtgggtctgcagcggaggcctcagcaacctgctcttccgctgctcgctcccggaccacctgcccagcgttggcgaggagccccgggaggtgcttctgcggctgtacggagccatcttgcaggtgaggggggtgtgagcgccgcagcaccagtggctttagggcctgtcgcttacgcgatgcgggtagtattgttcccgttgcgcagttgaggacaccgaggttcacggtctgagtaacacctcattacaccgaagcctgggcctgtattcccagagctttgggaggctgaggcgagaggatcacttgagcacaggagttcgagaccagcctggacaacatagtgagacccccatctctaaataaaaatagaccaacgctaaagcctgtgctccagagcctccaggcaattggatcagaagtcgcagctctggtgggaggaaggcgagccctcatgtgtgtccctgtgccactttgccttggcccctttgctgtccatcctttttcagggcgtggactccctggtgctagaaagcgtgatgttcgccatacttgcggagcggtcgctggggccccagctgtacggagtcttcccagagggccggctggaacagtacatcccagtacgggcccagtcctaccctctcctccccaaggcacctccaccccctaaccctaccccagtgcccaatgtctgcctccacatccctcaccccaagtagggaatttcccccaaaaccctgacttcccctcattgccccagcccttcccactcctgccccagccccatcaccaccctgatagcttcctgggtgcagagtcggccattgaaaactcaagagcttcgagagccagtgttgtcagcagccattgccacgaagatggcgcaatttcatggcatggagatgcctttcaccaaggagccccactggctgtttgggaccatggagcggtgagtcaggagcctcctcagggctcctgtactcctgagctgaacctccatgccagcggatgtgtcgggggctctatccagccctccacttgagtggatctgatgtcatgggctgtcacagaacaggcttttaaatgcttgccagaggccacatgcagtgcctcatgcctgtaatcccagaactttgggagccgaggtgggtgaggtgggaggatcacttgagcccaggaggcggaggttgcagtgagctgagctcatgccattgcacttcagcctgggtgagagcaagactctgtctcaaaacaccaaacaaaaaaagaaaaaagaaatgattgccaaggccaggcacggtggctcatgcctgtaatcctagcacttcgggaggctgaggtgagcagattgcctgagctcaggagttcaaaaccagcctggacaacacagtgaaaccctgtctctattaaaatacaaaaaaattagccaggcatggcagcatgcacctgtagtcccagctactcgggaggctgaggcaggagaattgcttgaacccgggaggcagaggttgcagtgagccaagatcgcgccactgcactccagcctgggtgacagagcaagactccatttcaaaagaaaaaaagaaatgattgccggacaagtcacacagtgataggagcaggggtgcagtagtctggcctgaggggtagataggcgaggggtgggaaagaatagcagagccagtgtatcctattctttgggcttcaggtacctaaaacagatccaggacctgcccccaactggcctccctgagatgaacctgctggagatgtacagcctgaaggatgagatgggcaacctcaggtgagggcaggcaggacaaggctaatggtaatggtgtccgcccttccagtagttgctgagggctggtgtcagggcctggcctgttagggtggctctgatcctcctctagtcactcctgctcaggacccatgctcccatacccctgtaggaagttactagagtctaccccatcgccagtcgtcttctgccacaatgacatccaggaaggtaggagaaggcatctgagtctcctaacccaagatggaagagccagagggctctggagtgagcagaacctcaccccattcccccagggaacatcttgctgctctcagagccagaaaatgctgacagcctcatgctggtggacttcgagtacagcagttataactataggtgaggctggaaagatggcttcccatagatctgttcccatagggctcttgaaaacaggccagctgcccagggcatttggggactgaatgtccaccttattctcccaggggctttgacattgggaaccatttttgtgagtgggtttatgattatactcacgaggaatggcctttctacaaagcaaggcccacagactaccccactcaagaacagcaggtatgtgggccagaggctggggagcaggacccatcctgtgaggaaggagggaggtggagtctggaaggaatggccggaaaggatgttacctgggaaatactccacagtctccccaattcctgactcttggccattgatcgtagttgcattttattcgtcattacctggcagaggcaaagaaaggtgagaccctctcccaagaggagcagagaaaactggaagaagatttgctggtagaagtcagtcggtgaggaaggaggggcagggtggggtagggcagagcagaggaaagagggattggggaagaggcagatttatcaagctgcagggaaggtggctgtggagagtggagttaggacagtgggggagaagttaaaactgtagggattggccaacctgggtgaggggatccaagcagtgctagacatgctcttgaatgcccctccttttcctgccctccccccaggtatgctctggcatcccatttcttctggggtctgtggtccatcctccaggcatccatgtccaccatagaatttggttacttggtaagtgaccctggggatgggaatgctagctggggggctggggagcagcagcagccacactcttccaggaggcctggggagtcccgggtggctgtgggcagcctgaggtggatgtagaatgctggtcccacgtcttctcaccactgtgtggggtgggtttccttccctaggactatgcccagtctcggttccagttctacttccagcagaaggggcagctgaccagtgtccactcctcatcctgactccaccctcccactccttggatttctcctggagcctccagggcaggaccttggagggaggaacaacgagcagaaggccctggcgactgggctgagcccccaagtgaaactgaggttcaggagaccggcctgttcctgagtttgagtaggtccccatggctggcaggccagagccccgtgctgtgtatgtaacacaataaacaagcttcttcttcccaccctgtcctggccctgctgagcagcagcagaaagtaccaaaccgagcagtacacacaaagggactcttcagtgctctgggattgaaagtggttagcgttcatgctgccagttggggtcccccatccctccccagtcccctggctgcagcttagaataataaatactaggacttggggaggaggagagtgatgggggtatgaagacgaccctgaggtggggatgccgcccggagcaccagcgatcccagaacaggcagcagctgacacatcggtgaccttttccctacatttggctatttttagctctaaagccaccatcctcacgagactctggggccccccaggctcccagacctttgagcaaccttcaccgcacagaaacccagccgcgccctgcaattcccaccgcggaaggtgggtgggttctggttctcgccccacgtttttccccgaccccgatttgggagtaggtgtcaggttcctggtgagggcggggcgggggtggctaggcctgaaggacgtggggacacgggccagagtggctggccccacgcacggacaggagtgaacccgagctgtgagtaggggccggcacagggcggcccgcgggggtctgggccctcagccctgcacaggggcgaggacggcgctggggcccgcgcgctcgggtggggaagggcgggctcccgaaccctgcctctgtccaggccggctccacttccaggggcgcctctctcccctgcccgcgccctcgctgacgccccccaactccaggctgcccttcgccgtccttggggctcctggagctttcaaggcccaaatcccctgcaccacagtggctgtgcccacccggaaggctggcgcgaggatttggcggcggttggcctggcggggggcgcgggccgggggcagccgctagtcgcggggtggggggcgcgaggggtcgcggactggctgggggcgtctcggcgcggctggcggcggggccggcctaagcgcgcccgcgcacccatctgcccccgtcctaggtgccgaccaacccccaggatggcggaagctcaccaggccgtggccttccagttcacggtgaccccagacggggtcgacttccggctcagtcgggaggccctgaaacacgtctacctgtctgggatcaactcctggaagaaacgcctgatccgcatcaaggtgcgcacaggtgcttctcccagagcgtaggcagaggccggctgtcagctgttaagcgctttgttagggtccctcactgcctccttggctggcacttctgcccggtacaggttgtggaagtacagacaccagaggggtgcacaggatgtggtcggacacagggagctgtgggtgtggcggaggaaggagcacagcagggcatcaggagagaaagccttccaggccaagaccaggagccagttcccaagacttcacaggcaggctaacctcccgccttccggctccataagggcgcctgtttctgcccacagaatggcatcctcaggggcgtgtaccctggcagccccaccagctggctggtcgtcatcatggcaacagtgggttcctccttctgcaacgtggacatctccttggggctggtcagttgcatccagagatgcctccctcaggggtaaggagtgaaactggaagggcacaggtgccaccagggagggctgggcccagctcccaaggctgaggttcctgagctgggcagatacaggacagcagccattggcagtcacggggcagccctcccctatgacaaccattgtcttagccctacatccgctcatttgatgcagtcagacatgagtgtgcccagggaggttcttccccttggtgtctcccctgagacagttcacagccacccgaggctggcctcaagaggaccccctgcagcccttgcccctctccaataggtgtggcccctaccagaccccgcagacccgggcacttctcagcatggccatcttctccacgggcgtctgggtgacgggcatcttcttcttccgccaaaccctgaagctgcttctctgctaccatgggtggatgtttgagatgcatggcaagaccagcaacttgaccaggatctgggctgtgagcagcagccagtggaggggttcaggcacctgggttgagactctttggactcctttggggttctgagctagacgggagaggcagacagggcactggtgcctggtgtgtggtttgtcctggaggggctgggatggctctgagggtctcagggagttgctggttggtttccattttttccactggctcccaccccagcactctgctctgtacccccagatgtgtatccgccttctatccagccggcaccctatgctctacagcttccagacatctctgcccaagcttcctgtgcccagggtgtcagccacaattcagcgggtgagggcctcgcttgggcatcccagtgggcaggggaggttggattcaggagatgtttccaaatataaggttctgtgcaaagagtggccttaagggcttgagaataatggggctgggtgaggagggagaggtgggaagaggattaagatagaggcagcccttgccatctggccccacggtgatgataactggctggacagtacctagagtctgtgcgccccttgttggatgatgaggaatattaccgcatggagttgctggccaaagaattccaggacaagactgcccccaggctgcagaaatacctggtgctcaagtcatggtgggcaagtaactatgtaagttcctgcccctgggctcactgtcacctgccatgtgtcctggctgcacccgccccagctctaaccttccacctccccacaggtgagtgactggtgggaagagtacatctaccttcgaggcaggagccctctcatggtgaacagcaactattatgtcatggtatgaactagagcccccaggtccccgcacgtgctcagctctgtcccagctccaaggcaagggatctggaggacagcccagagctctagtagcagcttccgtgggcaagtgggggttatggagtgaggcctgagggaaagggaagagagagaggagatcctagaagagtccagaagcagcttaggggcaatggggatcctaaggatgaggagagtggagaccgccagcctgccaccgcttctcagagtcccggggtcactgcccctgcccagctcgggctctgtcacctctttccttggtttcctcactggcctcctggccatgggttcccagctgtcctgacaccataaccagggaattgtctagaacgtgtcttgctttgtgtccctctgcagagccggacagcagaatggaggccaggctgctgcttttagagctcaggaagtcagtctgcctctgccccatgtaactggcccttctgagtctctgggtctcccagccacctgggctgtatggcatgcctcttctctcctttcccacggtccaaagcacacttgacttgccagagcctactggaattctcctccataagctgtccttccaggaacttacacacaacttgcccatagcagaggttttaaactgctttttagtggtagaacccctttatcaaagcaaaagaagtagaatataagcacataaaatagcttataaaaaggcagctcgggccgggtgcagtggctcacgcctgtaatcccagcactttgggaggccgaggcaggtggatcacaaggtcaggagatcgagagcatcctaacacggtgaaaccccgtctctaccaaaaatacaaaaaattagccgggcgtggtggtgggcgtctgtagtcccagctactcgggaggctgaggcaggcaaatggcgtgaacccgggaggtggagcttgaaatgagccgagatcgcaccactgcactccagcctgggtgacaagagcgagactctatctcagaaaaataaataaataaaaatttaaaaataaaaataaataaacaaataaaaaggaagctcagagccaggcgtggtggtgcatgactctaatccctgcaactcaggaggctgcagcaggaggatcacttagggcgagtaatttgaggctgcagtgagccatgcttgttccgctgcactccagcctgggcgacagagcaagaccctaactctaaaaaataaagaataaagcagctcaggctgaagctggagcagagggttactgcgatcagttgtgcatttctggaggttcaccccggcagcatgtgcaggatgtactggaagagggagacagaacacctcaggcccccgaatagattggtccttgggtcagcaagactcaggtgacacccagacagaggcccccaccccgcgggctctgttcctctgtaggaccttgtgctcatcaagaatacagacgtgcaggcagcccgcctgggaaacatcatccacgccatgatcatgtatcgccgtaaactggaccgtgaagaaatcaagcctgtgagttgcgtcagggttgaaggtgggatgggaggggagacctgagtctgagccatgctgggccttccctcaggtgatggcactgggcatagtgcctatgtgctcctaccagatggagaggatgttcaacaccactcggatcccgggcaaggacacaggtaactgagccccctcgctgctacctgtgggccatctggctggctcgctgccctcctgcctgctcatcaccaagcgtccccagtgtctcagggtcctgaaactgtgaacagtagtcaattgtgacagatactagacatccattgtttacaggcatgatgctggcgcagggaccccacagggcccagagcagagcccctccctccggggctcactgcgcatggtgaagggagtcctgctgcagcccaaagcttaggacagacccggcgctgccatggagccggcagaggaggggaggggcgcacccaggggtctggcagaggcagcagccttccctgcttctgacactgtatccttaggcggtttgcacaaccctctagtgcgtcgtttcctcttctgtgaaatactttataggattgttggtgttgcgtgagagagagtggaagcacccagcacagggcctggtttaggacacacggatcccatccagggggcaggaaggcccaggcagaggccgagcaaaacagggtctgcaggggtcacctagtgcatgggaggtgggcccttcccaggatgtagctgggggccccgcctcagcttgcccgtggcctgtatcacagatgtgctacagcacctctcagacagccggcacgtggctgtctaccacaagggacgcttcttcaagctgtggctctatgagggcgcccgtctgctcaagcctcaggatctggagatgcagttccagaggatcctggacgacccctccccacctcagcctggggaggagaagctggcagccctcactgcaggaggaaggtattggcctctaggaagggactgtccccaccctgagttcagggctccgtgaggagaggagcgtggccctgcctgccaccctggaactggaggctggaggcacaactaggggaggggcattggtggtcatggcagcaggacagccagcataacctacctctgacgggtggcagccaggtgaagtgtgcagagggtggggacaccctccaaaatagcttggcaccccccacctccaggcccagcctggcacacacacccccacctccaggcgcagcctggcacgcaccccaacacctccaggcccagcctggcacccccacatctccaggtccagcgtggtaccccccatctccaggtccagcctggcaccccacccccatctccaggtccagccaggccctcagaggcaccctcatcccaagtccacgtgcccactgcttaccctgccccatgcttcagggtggagtgggcgcaggcacgccaggccttctttagctctggaaagaataaggctgccttggaggccatcgagcgtgccgctttcttcgtggccctggatgaggaatcctactcctatgaccccgaagatgaggccagcctcagcctctatggcaaggccctgctacatggcaactgctacaacaggtacggcagccccagccccacaggttacagcttaaggttaaaagttagggttatggttagaggattaaagataaaagaaggtagggttatgagctgggtgcagtggcacacacctgtgatcctagcactttgggggccaaggcaggtggatcacttgagtgcaggagctcaagaccagcctgggcaacggagcgagaccccttcataaaagtagttaggattgtgattagtggttgggtagggctagtggctagggttaaaagctagggtttgggttatagaatagggttaaaagccgggcatggtggcaggcacctgtaatcccagctagtcggaaggctgacgcaggagaagcccttgaacccgggaggttatgggaagctaagatcacaccactgcactccagcctgggcaacagagcaagattccatctcaatttaaaaaaaaagtgagagaaaaagagagagagaatagggttagtaattagggttaaaggttggggttgcaggtcaggcacctctggacattcccagctttggttcttcatgtgtctactcttcctgcaggtggtttgacaaatccttcactctcatttccttcaagaatggccagttgggtctcaatgcagagcatgcgtgggcagatgctcccatcattgggcacctctgggaggtaatagccttgcagagggaacctgcagggcaggctgtaggggatgaggccagcctctcagtctcatcctctccctgcagtttgtcctgggcacagacagcttccacctgggctacacggagaccgggcactgcctgggcaaaccgaaccctgcgctcgcacctcctacacggctgcagtgggacattccaaaacaggtgggttggaagctcccagagcaggtgtgagaccacaaagcagcaggtgggtacagccccgacgaggcctgagcctcctcctcccctgctggcctcactgcctggcccagccctcgggaaggcacagggcacgtctcaggatacctgtagagtccaaactggcttcagggaggacagagaccacccaccgcccctggggccatctgtgtttagagacagccatgagatggaggaggcactcacaggcccctggagcattttcagcacttccctcttacccacaaagctgagcccggcctctgggggctgattctccctcagactgtcttttgcgtaccctcctcctgaagatgtcttggccggctgtgccctttctccaccagctaaacgtcatgcctcctagacatgacccagagtcctgcttggagagccctaccctcagctgacccttcccatgtcttggcagtgccaggcggtcatcgagagttcctaccaggtggccaaggcgttggcagacgacgtggagttgtactgcttccagttcctgccctttggcaaaggcctcatcaagaagtgccggaccagccctgatgcctttgtgcagatcgcgctgcagctggctcacttccgggtaggagccccgcctcccgctgctgagagggcagggtggtaccagggtccacctgccagattcacccctctgtatatcccaggacaggggtaagttctgcctgacctatgaggcctcaatgaccagaatgttccgggagggacggactgagactgtgcgttcctgtaccagcgagtccacagcctttgtgcaggccatgatggaggggtcccacacagtaagtgtcctctgcccatgtgggggtcacagtcgtcgggtgaggtgccccctctgcctcctgtctgcctggagggccagggctactcttcacccctttacttctgccccgcagaaagcagacctgcgagatctcttccagaaggctgctaagaagcaccagaatatgtaccgcctggccatgaccggggcagggatcgacaggcacctcttctgcctttacttggtctccaagtacctaggagtcagctctcctttccttgctgaggtcagcaccgttgttgggtgtgtcctttgtcccactgccctcctacacgcagggcttgggccatctcatgatggagcacggcctgttttcctggcttgctcccctgaagctccctggagtgctgggccagctttcccgcccacaccccacctgggcctgtggtcctgggactgagcaggagcaacatcctctttgtggtgttggtgtccttgtgacagggaacagacaaatatatgatctgtcaggtggtgacagcactactgagactagtgaggctatgtgggggagaggcagagcagagggagggctgggcagctcacacaagccttatgtggcatgatgcacaggggaccacggggtggtggccagggagctcctgcaccctcagcagaaccgtgtctggctcagagtaggtcgcagacaccacgtgttggacaggtgctttgggtatgtggcctctgaccagctgtggcctccattgcaggtgctctcggaaccctggcgtctctccaccagccagatcccccaatcccagatccgcatgttcgacccagagcagcaccccaatcacctgggcgctggaggtggctttggccctgtgagtgctcctgaagggggtgggtgggcagcaccagggccctgagggtttcagtggcgagtgcaggccctgaggtcagacgagaggcaggagcaccttgcttagaggagagcataaccccagacctgcatggaagcagaatgttagctatggactcaggcagccaagcacctgggacccacccatcccaaatacctccctgctgaagcatgaccgtggtttccggggtactgaagcatgactgtggggctggtttccagggtactgggcagtgcactgggtgcttctgaagtctacttatccaagagagtgcagctgtctcccacagaaaccttcacatgggctagcttgtcagaaggctagagaaccctctggagagagacggagtgatctagagaataagccccctgagggaaactgggaggtcccagatcccttggcggggtctgggcagcattctttggttttcacagtttcctgggggtggtcctcaggaaaaatgcagtgtctagggctggggcccgttcctgcaactcttgtgggaagaacaagtacaatatcagcttggctttcagatcttcaaggtttgatttatgccttcttcacccttcttgttgccctcaggtagcagatgatggctatggagtttcctacatgattgcaggcgagaacacgatcttcttccacatctccagcaagttctcaagctcagagacggtgagtctcctgccacagctcaggcctgaggaaggggtgccacctggggctgcccaggaacacaggtgtctttggctggggaggcatccttgcttgtgggaacagaggggtgggtacatatctgaaggtgcatctgaactcttggctcccacagaacgcccagcgctttggaaaccacatccgcaaagccctgctggacattgctgatcttttccaagttcccaaggcctacagctgaaggttggagaaatgccagctgccctttcgtccccacactgtggaggaagggacctgtggcagctcacaggcatgaggggtggccgtgcacaggtgcccaggctccaaggacagctccggcagcaggtcctcgctgggcagatgctgctccctgagggcccaggtggtggaggtggggttggagcaggaagggaattttgatttttttttttcttgatagatactaataaaaataaggctgtgtaattttctctcagcccttaggtacctgtgttttgtttgggaactcggaggccctccccctcccccagctcagaccacagaggtggcaagagaagggctgaagctggaagactgttcatgagggacttgtgtgacctgctttgaaatgtgtgactctgctgagtgacgtaggctctgagatagctgtccacgcccacgtgtttgcttggaataaatacttgcctcagaaccttcacctgttccctggggccatttctgtttgtctgtctgctggagagtgagcccacctcctcccatgcaggggcatgtgtgaggcacccctcttggctgaggcacaaccctgcacgggccccgcagcttcttgtcagcatggaaaggggctgcaggcccaggcctgaagtcttgaggcgccaggtggtcatgtctgcaagagggcacgcaggatgacctgtagcaacagacactccttcactgaggttggctcggctgctaaaatcatgttaagagtaaatacaaaataattattctttgtttttaaggcggagtttcgctcttgttgcccaggctggagtgcagtggcacgatctcgactcactacaacctctgcctcctgggttcaagcgattctcgtacctcagctcctgagtagctgggacaacaggcgcccgccatcacgcccggctaattttttgtatttttagtagaggcagggttttaccatgttggccaggctggtctcgaattcctgacctcaggtgatccacctgcctcagcctcccaacgtgcagggattataggtgtgagccaccgcacccagccataaaaaataatttttatgaaaagtataagtaggccctcaattactgtaattgaagtgaattagattcagttctggaccttcatttaggaaccagtgtcttcatctgtttttgtttttttcttttttttcccatgagatagggtctcactatgttgcccaggctggtctcgaactcctgagcttaagtgatcctcccacctcgactttccaaagtgctaggatttcaggcgtgagccaccgtgcccggccaggaaccagtgtctgttgaacacccaccatagacttggccctgtgctggggattcagtggtaaacaaggtcctattcctgcccatgtcgaattcactgctgggtgaggcaggtgtggtcaggggacagagcagctggcaggaaaccaggaggcttttgggataatccacttaccaagtacaggcatgggttgcttaatgaaggggatacattctgagaagtgcattgttaggcgattttgttgtgcaaagattctagagtgcatttacacaaaggtagatggtgcagcctactacagacctgggctatgctgcttaccctgttgctcctaggccgcatgcctttacaacatgttaccatactgaatactgtaggcaactgtaatacaatgggaagtctttgtgtatctaaacttgtctaaacatagaaaaggtatagtaaaaatgttatataaaagattaaaaatggcacccttatggccaggtgcagtggctcacgcctgtgatcccagcaccttgggaggccgaggcaggtggatcacgaggtcagaagatcgagaccatcctggctaacacggtgaaacagtgtctctactaaacaaaatacaaaaactagccaggcatggtggcgggcgcccgtagtcctagctgcttgggaggctgaggcaggaggatggcgtgaacccaggaggcggagcttgcactgagccaagatggcaccactgcactccagcctgggcaacagagcgagactccgtctcaaaaaaaaaaaaaatggtacccttatataagacacttataagacaccatgggctgggcgcagtggctcacgcttgtaatctcagcactttgggaggccaaggcaggtggatcacaaggtcaggagatcaagaccacggtgaaaccctgtctctactaaaaatacaaaaaattagccaggtgtggtggtgggtgcttgtagtcccagctactgggagaggctgaggcaggagaatggcgtgaacctgggaggtggagcttgcagtgagccaagatcgcgccactgcactccagcctgggcgacagagcaagactccgtctcaaaaaaaaaaaaagaggaaaagtaagtggagagacaaaaggagaggtgggtggcaatttcagacagtggcaaaagcaagccttcctgattggggtcctttgaccacaggcctgaaggagacgaggagcaagtcatgtccctcatgtccctcatgttccgtacctaagggcagagtattcctggctgaaggaacagcaagagccaaagctttgcgagcggtgtctgctgtgatgaaggatgtggctagtgtggagtcagggatgggaagagcaagcggggcagctagatcggggtaacaagggcctcgtaggccagattctggattttctgaatgacgggggaagctgttgggctttgaacagagggtggcataatctgtcctaattttaagggatcactggctaaccagggtggcgttagaacaaagtaggacgcagtaacagtggaagcaaggagacccgctggagaagtgctcctggtggtggtggagctggaagaaatgagcggcttaaactaaggcagtgccataggaaagtagaattaaggagcttggaatgtcaaacgtaggactgacaagtctaatcaggaggaatcaaagataactcatattttctatattgggtgattgggtgattaaattaggtctttaaatgttgaatttgacttgcctataagaaatagctgtgaaaatgtctcagactcttgaaaatataaatgaaaagctaaggagagatctaggctccttctaacagttttgaagacagttaaaaccttgaaagtgcatgagaggattcccagggcagaggctcctcacctccttcaagtcttcatgagctataagagtatgcctcttggggccgggcgcggtggctcacacctgtaatcccagcactttgggaggccgaggcgggcagatcacgaggtcaggagatcgagaccatcctggctaatacagcaaaaccctgcctctactaaaaatacaaaaattagccgggtgtggtggcacgtgcctgtagtcccagctactcaggaggctgaggcaggagaatcgcttgaacccaggagatggaggttgcagtgagctaagatggtgccactgtactccagcctgggagaccgagactctgtctcaaaaaaaaaaaaaaaaaaagagtacacctctgcctgcaaaatgttacattccatatcagagcgttcttcagcttccaaaagtatttccagagacctctacctgtttgggtgccagtaagcctcccctgggaaggtgcctgcgttttggtagtcttctggggacatcagctcaccccgtcctgagatagcagtaaacagagtttccaacaagctagctttcaattaacatcaaaattcagcattaaagttcttttatctcatttgttctgggttaaaatagtgagatgaggaacaacagtggtaaaccagggtataaacctctggagactgctgggcatggtagctcacgcctgtaatgcctgtgctttgggaggtcttgagcccaggagttcgagaccagcctgggtggtgcagtgagaccccatctctacaaaattaaaaaaaaaaaattagccaggcgtggtggcacttgcctgtggccccagctactctggaggctgagttgggaggattacttgagcctgagagattgaggctgcagtgagccatgattgacccactgcattccagcctaggtgacagagcaacaccctgtcttaaaaaaataaataaacctctgatgacaacccaaaccccaattagttccccatgtcccataggtctgcaggtctgcattaataaaagctagcagccataacataaatcctgaaacctcatggctcaacccaatagaagctggactgttggtcagataaaatccagttggctgagatgagggctctgctccatactgttattcaaggatctatggtgacagaggccctgccttcagcaggtagtactcaagctgccttgggcatcaacatcataagtacgtggggagagaaagagggggccacctgtgggaggctttgatggcctcaacctcaaagtgatacacagcatttccctccacaccctctggctaaagacttgtatttcaagagaatctgagaagtagagtctagctgtgtgtccagggcgtaaaggaaacatttagtgacagttggtctcagatacacaagggcatgggaagaccagcctgacatcttcctgggcttcatggcctggagtttgcagggtagcccacctccagctcctgagcagggtactcaagagcctgcacattccagctcaactgatctttcccgagtcttctctgtcccttaccaagaaccctgagcccagaacacactcgccattccccaaaggaggcaggctgagccacaccttcgcctttgccctagatgggccttctgcctggaatcctgtgccctttctcctactctctcggaagctgtcttccttagccatcagaattattcctgattcgggccaagcacagtggctcacacctgtaatcccagcactttgggagtccgaggcgggtggatcacctgaggacaggagttcgagaccagcctggccaacatagcgaaacccggtctctactaaaaatacaaaaactagctgggcgttgtggcatgtgcttgtaatcccagctactagggaggctgaggcaggagaatcacttgaacctgggaggcggaggttgcagtgagccgagatcgtgccactgcactccagcctgggcaacagagcaagactccgtctcaaaaaaaaaaaaaaagaattattccctattcatgtttctctgggctgctgtaacagaaatcggctctgggctgtataagcaaatggaagtatgaagagcagctcacaggtggaaagggatggccagaaaaccgggttcaaccggggcaggaacctggcagctggcggagggagtgtggcccaggcagcagcctcctcaataaacaagcgaatgctcactccttgcccagaactgtctggctcaaccccagccatttttcctcctctgcaatcaggctgctaagaatcagaatccctgagagaaaattcagggggtctaaggtttgtcaggattctcaaacacaaggtgttcaaaatcaaagttaaccttccaagctagcttctcccactcttccacatctctgccagtggtatcaccccggccattagccccttgcttctttctccctccctcccacattaccaagccctgtcaagtcgaccttggaatggctttgaccctgtccaccactcagccaaacaacagcaacggccggccccgtcgccacccgcctcggcagccagagaccttttaactctgccactcgcctacttaccacccttctagggtgcccacgtccctctgaaaaaaaaggctgagctcagactggcctctggtcagcctcctcccagccagagctttctgtcactgcccttctaggtgttgagtggctctgcttccagttcttgcctggagaccaggagcgcccgggaggccccagcactttccagcccacatagacctgcgtgcacctctgcctcgtctccctgagcccgggctgcctcctctgtaagatacatgccacataatgtccgccacacatgatcgctgtgacagtggaaatagctgggcgttcagcgactcattcgacaaatgtttaccagcacctttggtaccgggcgctgtcctggacactggggacacagcaggcaaacggggccctgcgtataaatccttaagctcaagaaggaggtgggggcaaaactgtcaggccgggaagctcttcatctccgcaggattctccctcaacctcaggacgtccccagcaccgcacctgccagtcccagactcggacgccgcagacctgtgggagcagcgcggaatgccccgccccttttcccgaggacacccaatgagggcgagaggtcacttccggggagggttcgctaacggaaagggcggggcatccctctcgaggagcggccttgttcctcaagcggccgctgggggcgccagagcaggaccggagcgcgggccaagctggaggtgagcgaggccgcgcccccctgggccccggccctcccaacgcgccctgacggctgggctccgcctgaccctgtcctagcgttcgcggtggcaccaacctcaagccagacccttgacttcgacccaactccactcacccgactccactcactccacaccccatgcccctcccccgacgcccctcaccccgcctcacccttcacccctcatcgctcacgtcaccgctcacccgcctcctcacccagcctcgcccctcacccctcaccccgcctcacccctcaccccgcctnacccctcacccctcatcccgcctcacccctcacccctcatcccgcctcacccctcacccctcctcaccccgcctcacccgnctcgcccctcacccctcacccctcctcaccccgnctcacccctcacccctcannnnnnnnnnnnnnnnnnnnnnnnnnnnnnnnnnnnnnnnnnnnnnnnnncccctcaccccgcctcacccttcacccctcaccccgcctcacccttsacccctcaccccgcctcacccttcacccctcaccccgcctcacccctccttaccccgcctcacccgcctcgcccctcacccctcatcgctcacgtcaccgttcacccgcctcctcacccagcctcacccctcaccccgcctcacccctcaccccgcctcacccctcacccctcctcaccccgcctcaccccgcctcacccctcccccgctcccctcactgcacactccataccccactctccccaccttacatccctcacctcagtccttcacccccttaacctaatctccatgtcctcacaccatacactcctgatcctgaagtctgcacaccctgggcttctcattccgtgcagcctgcccctcttaccctcacacctgccacacctgggaccccggagtccacacaccacctcacaccccaagttcccacacgcacctctggcttcctccacctgcacttcaggacccgcccagactcttcatagcccaactccaagacttctctcccacatcacaggtgcattcccttcctgtgctgctctcatcccgtacaaaagagcacatctctgcaccaagcatccctcttatcccctcacattccttgttctcagagggatcccagactctgttagaaactcttcgtaccaggcaagacactcagaccacaaaccagactctaggctctgactcgctcaacccccgtccttcacacctaaagtgatacccaagccagaccctacactcccgccccacgctcccgccccacactcctcccgccccacgctcctcccgccccacacttccgccacccatcctaagctccgttccattgtgctttggtgcgggctcaggcctctttctccacccgttcccagtcatcccaggcaacctcattaggcaagaaatgccgtgaattctaatcctgtggctgcttcctccacatcagctctcacaccctctccctggatctccttttcagatccatccctcttctgagatccagtgccactccggcccagcctccatccttctagcagtctcatgctctatccccaaatctacctgtggccaccccaacgccccacttatagaaactacatgtcttttctatgcctctgcttcaccccaaccatcaaccaccccttaagccactctcatacttgtgctctcagtgtccttaccttgtccatccactgcatgtatgtttacgttcccaggccttctacactccatccactgtctctgtgccgtcttagggtcctgaggacactgtggccatgtggcctcagtcacatgcctaggtgcccctagggaggcatgcagctttgataaagctttatcgttctcctcaaaccaagaatgtctgttgttacaagaagaaacttttcattgccatttattagggagttagagaccatcgggcctgaaatcccccccttgccatcctaccttgacctctacctaccttattctatctctacctccttaccttcccttaccttcatagggtgaaatgaccccttacttgtctgagaccagtccctgcaccatcagttgccctttcttctgattcttcaggcttttctgtccaggtagctctttccacacagcctagaaacgaagaattcaaaaaacaaaaaaccttgactctgtatcaccttctagttacctcctgtttttttctccccttcccatctaaatctgtacacacaatccattttgtctaatgatccattaattatttaattcatgaaatatttttacttttatggctctcctgaaacgtctcaccgagttgaccagtgacacccaaatcaaatatcttgaatttactgagccctttttttcattttgcagaggggatcttccagatcttcctctgtagcctagtctagagtgctgtggcacaattgtcccacctcaccctcctgagtaactaggactggaggtgcgcaccaccacacccagctatttttaaatttttttgtagagactgttgcccgggctggtctgaaactcctggcttcaagcatttctcctgctttagcctcccaaagcactgggattccaggcatgagctaccatgcctgggcctgccatgcccaaatactgtaatctttgacactggtgtaatatctcccaacttaaaataaaatacccctgtgactctacattacattccaggtactggcatgtttctctgcttctctttgaagtaaaactcaccagtttctacttctccttccctctctttagaaacatttcgattgggctcttgttccagccactccatgaaaacagctcctgtcaagattgccagtgtgacctccagattgtcaaatccagtggttactttttatttatttttgtttttgtttttttggaacagagtgttgctctgtcacccaggctggagtgcagtggcatgatctcggctcactgcaacctccaccttctgggttcaagggattcttctgcctcagcctcctgagtagctgggactacaggcgcccgtcaccatgcccagctaatttttgtatttttagtagagatggggttttgccatattggccaggcgggtctcgaactcctgaccttgtgatcccccgcctctgccttccaaagtgctgggattacaggcatgaccgactaagcctggcggctacctccacttctaacactctggtccaagcctcatcattccttacctggagttttgcagctgcctcctaaatgatgtccctgttccatgctttccaccccttagtctattctcaacacagaagccagagtgatccttttaagtcattattcaaatcacatcacctttgtcagatttttccagtgtttcctcatctcattcagaataaaaatcgaagttctggccaggcatagtggctcacacctgtaatcccaggacttgggaggccgaagcaggcggatcacctgaggttcaggagtttgagaccagcctggccaatatggcgaaaccccgtctctactaaaaatacaaaaattatctgggcatggtggcgggcacctgtaatcccagctacttggaaggctgaggcaggagaattgcttgaacctgggaggcggaggttgtggtgagccgatatgacgccactgcactccagcctgggcaacagagtgagactccgtctcaagaaaaaaaaaaaaagagtgtgtagtgagaagagaaggggctaaaaggaccttccttgacccattagagccagtaaaggagagagccaagaaagagcagggaaggaactaccacaggtggacagagtttggagagaacaaggttaaaacatcaagagaagagaattttgagcaggagaaaatggccaaatgtcagtgctgcagagatgttaaataaaagaaagacagaaagtgccctgggtgtgccagttatgactttggtgagagcattgtcagtgaatgtcagagacagatgccagatgacagtggagtgaggaggacagacaaacgtgtgaggcctggctgctaaaggaaggagagggaatagctataggagagggttaaggaaggtgttctggacatttcttcctcccatcacccactattagccccctgccctgccacctgcctgtacctccccacttactcttagcaaactattcctacttaccaaaaagcaggacggagtcctgcacgtggaatggctccatgcccacagaagtacctcctttacagatcccgaaagaccatacaccctgaccctgcaccctcattctcagatctgcctgtcaggcctcctggagggccctttgctcctccctcagaatctctacccttaacagggaggacggcaagaggggaaagataataattttctttcttttttttttttgagatgaagtttcgctcttgtcacccagactggagtgcaatggcacaatctcggctcactgcaacctccacctcccgggttcaagcgattctcctgcctcagcctccccagtaatcccagtagctgggattaggcacctgccgccacacccggctaatttttatatttttagtagagactgggtttcaccatgttggccaggctggtcccaaactcctgacctcaggtgatccacccacctcggcctcccaaagtgttgggattacaggcatgagcctccgcgcttggccacgatcatgattttctttcagaattagagctttacaatggtcaactcctttattcagccaacatttattaagcacttgctgttttcctagctctgagctgaacactaggaatagttcattggaaagatggcctctgctttccaggaccccacagtctagttggggaggtagaggaatccacaatcacaataccagctaagaggcaccgtgatgagggaggcccaggaagtcacaggagaactgagtggaggcccttaactctgaagtaaagaccaggaaggctttccccacatgtacagtgggaacaataccgcagcatctgtggcccatccctccctgttttatgcttacctggctcattccttcaccttcatgaggttacaagttccctggcagctcttacattatttatctatttctctcttttcttactagtgccttgtagataaataggtgagcatcaaatattaacagaatgaattaatgtatattaataaaggtgaggagaggatctggagtgatgtaattactgttcaacattttaaataacaacggatatgatttattaagtgctcattacggtaggtactgtgctgaacagtatataatttatttcaattaatcctcacaaaactccacaagatataggtaatactaataattcccgtttaaaaaatacaaaacttggctgggtgtggtggctcacatctgtaatctcagcactttgggaggccgaggtggatagatcacctgaggtcaggagtttgagaccagcctggccaacatggagaaaccccatctctactaaaaatacaaaattagccgggcgtggtggcacttgcctgtaatcccagctactcaggaggctgaggcaggagaatcacttgaacccaggaagcagaggttgtggtgagccgagatcgtgccactgtgctccagcctgggcaacaagagcaaaacttcgtctcaaaaaaaaaaaaaaaactcaaaaaaattaccaaaaatttgtcgagaagatgtgtaagttgccaaaagtaacactgctgatatgaggtagcgccaagatttgaacccaggcagctcaattccagaaccaggacagtctctatggggcactgcctctaatgcccaggagaattcttctggaaagttaagttgattataattttttttaatgtatgaatcatttcatattttaaaattaaacgtacccgcctccaggctcccatcgcttgatgtctgtaattattacattaactgcttcgacatctgtcacatcctggtttgtcatatggtgtgtgtgacttactcccatattgcactagaaattccttaggtacaggaattgtatctttgaaacacatcagcacaatagcttgcatcttagtgggtactcaatatggttttgcaagaaaaaattccatgtcaccattatgacagacttttttcattataatgaagatgttttctgtgttaatgactccagccttcagctacgtttgtatggcaaagatggaagaaaggggaaggacaacttatatgtgccgaatgctatgctggggcctttagacatgttcccatttaaccttcacaacagccctgtggagtacgtggtattgtctgaatctgagagatggggaaagaattccttagagaaatcactgagttataaccagtggagctggatttgaaatgtaggtctgtctgactgcagcttctttctgtgcattgcctagatggatgatgctgaccctgaggaaagaaactatgacaacatgctgaaaatgctgtcagatctgaataaggacttggaaaagctattagaagagatggagaaaatctcaggtaggatgtgtgaacccaaaagtatctgagacaggtctcaatcaatttagaaagtttattttgccaaggttaaagatgcacctgtgacacagcctcaggaggtcctcaggacatatgttcaaggttggcagggtacagcttgcttttatacattttagggagagagaatacatcagtcagtacctgtaagatgtacactggttcggccgggcgcggtggctcactcctgtaatcccagcactttgggaggccgagacgggtggatcacgaggtcaggagatcgagaccatcctggctaacacagtaaaacctcgtctctactaaaaatacaaaaaattagctgggtgtggtggcaggcacctgtagtcccagctactcgggaggctgaggcaggagaatggcatgaacccgggaggtggagcttgcagtgagccgagatggtgccactgcactccagcctgggcgacagagtgagactctgtctcaaaaaaaaaaaaaaaaaagatgtacattggttcgatctggaaaggtgggacaactcaaagggggatgattccaggttatagatagatttaaattttttctgattggcaattggttgaaagagttatggtctaaagacctggaatcaatagaaaggaatgtctgggttatgacggtaaggggttgtggagaccagagttttatcatgcagatgaagcctccgggtagcaggcttcagagggaatagattgtaaaaagctttcttatcaaacttaaggtctgtgttcatgttaatgctagtcaccttttcctgaattccaaaagagaggcaggtataacgaggcatacccaatttctccttctcctcacggcttgaaccaactttggccaagcaatacacccaccttggcctcccaaagtgttgggattacaggtatgagccagcgtgcctggccaaatagcttttattcactagagcagactttagaaaatttctccttagaaatgtttgcaattttttgcctatgtacttttgaactatgaatagctgagacacgtatcagttaatttagagagtttattttgccaagtttggggacacttatctgtgacacagcctcagggggtcctaatgacatgtgcccaaggtggtcagagcacagcttggttttatttatttatttatttattttaagacagagtctcgctctgtcgcccaggctggagtacagtggcgtgatctcggctcactgcaagctccgcctcccgggttcatgccattctcctgcctcagcctcccgagtagctgggactacaggcgcccgccaccacgcctggctaattttttgtatttttagtagagacggggtttcactgtgttagccaggatggtcttgatctcctgacctcgtgatccgcccgtctcggcctcccaaagtgctgggattacaggcgtaaaccaccgcgcctggccttgtatttttaatagagacagggtttcaccatgttggccaggatagtcttgatctcctgaccttgtgatctgcccgcctcagcctcccaaagtcctgggattacaggtgtgagccaccgcgcctggcctttttttttttttttttttgagacggagtcttgctctgtcgtccaggcttgaatgcaatgatgtgatctcagctcactgcaacctccgcctctcgggttcaagtgattcccctgcctcagcctcctgggtaggtgggattacaggcgcctgccaccatgcccagctaatttttgtatttttagtagagacgaagtttcaccattttggccaggctggtctcaaactcctaacctcaggtgatccacctgccttggcctcctgaagtgctgggattacacgcgtgagccaccacgcccagccagcaaacagttttatgtagtgaaaaatctatcaatattttcctttctgatttattgccattattttgacacctagaaagtctttcctcaatctgagatcagtgaaatatttagttgtattttcttctacttttctccgtattcctttttaacatttaatcctaacccatctggcatgccaaatgacctacgctgcgtattgctttttttttttttttgagacagagtcgcgctctgttgcccaggctggagtgcagtggcacaatctcggctcactgcaagctctgcctcccgggttcacgccattctcctgcctcagcctcccgagtagctgggactacaggtgcccgccaccatgcatggctaattttttttgtatttttagtagagatggagtttccccgtgttagccaggatggtctcaatctcttgacctcataatctgcctgccttggcctcccgaagtgctgggattacaggaatgagccaccgcacccagccgcatattgcatttttatataaatctgctacaggctgggcacggtggctcacacctgtaaacccagcactttgggaagccgaggcaggaggatcacaaggtcaggagtttgagaccagcctgggcaatatggtgaaactccatctctaataaaaatacaaaaattagctgggcgtgttggtggatgcctggaatcccagctactcaggaggctgaggcaggagaatcacttgaacccaggagacggaacttgcagtgagccgagatcataccattgcactgcagcctgggtgacggagcgagactctctcttctgtgatagtccctgggcatagagggagggtgtttgtatcgttttagcagcagggcatttgcagtgtaacagatccgggcccagtgcgatgccaaatgagggagattcatatctttggtcatctgcagaataccatgattttagtttccttggaagcaaaatgaggggagataagtttgacaattataagagtaatttgtgcattagaacagaaaaaggaacctattccattagggcaccaacgaaaaatatgaggaaaagttacaatctggtcctctctagaggattattgtagccaagaaacaatgatttaatttgcactcaaaaaaacgttatggctgggcgcagtggcctgtaatcccagcactttgggattttatttatttatttatttattttgagacagggtcatactctgtcacccaaactggagtgcagtagtgcaatcttggctcactgcaacctccacctcccaggctcaagggatcctttttttcatctcagcctcctgagtagttgcaactacaggtgcacaccaccatgcccagctaaattttgtattttctgtaaagacagggtttcaacatgttgcccagtctgatctcaaacttctgagctcaagtgatccacccacctcagcctcccaaagtgctgggattataggtaccagccaccttgcccggccagccaccttcttgtatcctcacatagagcctcacatatccttgcatagagtgagagtgagctcttgtgtctcttctttaaggggtgctaatcccattcaggagggtctacccttaggacctaatcatctccaaaagacccgacctcctaataccatcacgtcgggggttaggatttcaacaggtgaatgtgggagggacacattcagtccataacatgtgtgccaggcagtttacatatatcacccatttaattctcacagtaagccatgagattggtagggtctccaaagatgaggagactgagatttatgtatatataacctccaccttctgggttcaagcgattctcctgcctcagcctctctagtagctgggactacaggcacccaccaccacacccggctaatttttatatttttagtagagatgggccaggaacactggccatgttggccaggatggtctcaatctcttgatctcgtgatctaccccccttggcctcccaaagtgctgggattacaggcgtgagccaccgcacccggccgagattgatacattgcagacacttgttccaggtcacagagtcgtcaggtggggagctgggaggcgtactctgctctggccccaggtccctgctgcacctgctgtccaggtagtctgcggcctccctgcaccggaacgatctgggatgcttgtgaggattccacaaagaggaattttaaggggatgtgtttgctatgtacagttggttgtcatgcagaggggagatgacctttgttctgtatagttgcagagggctgaaccacaccagccggtggactatgcagagaaaaagttggaggtgggatttctgcacacacttctttgagttcacacaagaagcatgtgttcacctataggcccagggaatgctaccttcgagttgctgtcagagggaaagagcaagagagcccatcagtgcattggtagatggtcaaggacaccttcccaagaggagaagccccaggcctgggcctcaacgaaagcatagaggtgcccaggtggaggtgggcaggcatcccaggccactgaacataaggtgacatgaggtttgggtcttgcaggactggaaacaatcaactctacctgagtgtgtgagcttgggtggatgactccttaggggtcacctgcagccattggctgtgaactgcttgtaggtaaggagctgcggtttgctctaattctcctcacatttcgtatcagaccagcctctagttttttacatcatgtctggtgtatccagaagttatgccttgcatgagactaggaagcgtcactatggatgtttgtagggagtttttatgagcctgtaacaagtagcctaccagctgtctctccctagagtaattgggtgcctcagcaggatctgggcctccagatgctgagcccagctggaggcatctgacccttctggggcaccccagagctgcagcccctccctgtggcctgaccagtcctgtctgcttgttgcagtgcaggcgacctggatggcctatgacatggtggtgatgcgcaccaaccctacgctggccgagtccatgcgtcggctggaggatgccttcgtcaactgcaaggaggagatggagaagaactggcaagagctgctgcatgagaccaagcaaaggctgtaggccccactggcccaccacagctgccatgccaccctctgcccgtatgaagaggtcactgggggatggagctggcacccacatgaatagctgtatgcactgtacttgtttcttaataaacttatttttaagcacagcccgaggacctcttctctcctgtgccatgatccacccagctgcatatcaaaccttgtgaacaaaacacaacaagtgcaagctgcaggtgctttcggtgaattaaaatgtatttggtgccagtggtgctgaacatagaataaaaaacagaaaaagggcccagacagggacatccaggctggaggttggagtggagcacagtcagatgtattcacttttctagcatgggtttcaaagtgcgtaaggggagaaaacgcatcatggattgtgctgtgcatcctggacaccgtgcgaggtgctcatagctgtgatcttgtctcccacaactctcttgggtgacagacgtccactgtccacattttatagacaaggagaaagggaagtcaaatgtctcgtccaagtctacacagctaaaaaggggcagaactagggtgacgctcaggcctcatttagagatcgggggttggcgagaagtggggtgggcttctggaggggctgggagagccccacaaggctgcagagggtggtgagcccggagtgggcctggcctggtgtgggctgggggtatgggcaggagctgcagacagcagggctgcaccagcggaccagtttcagaggcaagggttctaggcccttgagaatccacagtgccaaacagacccagatagctacggggttggtacctggggaggccttaggacaggcagaaagtcccagaggcgagggcgttgcctggggacgtttttgctccctgtcctgctgacagagcataggaagtgtgaatgttttctaccccctcctctctcggctcagcagagctccagcgagccaagtccttgtctgtggagacgcatcagtccctggctctagggaatagggagtcccacagacaggggggtgtcagcaagctgagagggtctgtaagtaggtacggaattgagtcaggaaacagtctgggtgtggagtgaggggcagaaagaggctgagggagtctgggcttcaaaataatcgacaacctttaaagcagaaggggaaagttgtccagaaacaagagcaggaagttccgatcccagccccttccctgagccccggcctctcaggcccatcccaggagggtctccctggagagcagcgaagcagctttggttctctgcctgccactcagagtgaggtctgcagccggtcctcagggggcagagtcaggatgaatggactgaggaccccggtgctccccaaggggaagggctgcagctccttggcctggaactgggcagtccccccagagaccgtgaaggtggcagtgacctgggggttgaggcagtaaatggtgttgcccagggtggtgcagtgcagtggggcgggggcgggcaggggcagggaggcagccctgctccaggagccggtcactgtgttgtagcgcatcacggcggcgcccacgccccgcagcaggtcgaagcggtacaggaagccccccagtgccacgatgtcgctggaacgccggtggctggcactgtatgggcactcgtcccaagcatccttcacggggctgtacctgagcaggcggtagaagaggtgacccccggtgacgtagatgtccccacggcaggccacagcctcgtgggccacagggaaggtgcctgcggggagtggcgcgcgtggggtccaggcgtctgttcgcgggtcgtagcactccatgctgtacaggcattcgccaccgatggcatagagcagcccgtccagggccaccagcttgagctgggctcgggcctgctgcatgggccgaacctggctccagatgttggtcagagggttgtagcagaagacctcgttggagcagacggccttggcaccggagccacggatgccccccgccagaaacaggtagttgtgcatggtgcagagaccgcagccccgaagcggggcctcctcgggcacctgggtcaggggccgccaggtgttctcccgggggttgaacacatgcaggtgcgcaggtagaggcagggacacaggggccgccgcaggaggctcctcgccacgagggcccctggggagccctgagcggcccccctggtagaggctgggcagtacgaggacgcccagcaccgccggccccggccggtccgcaggctgaggatgcgctcgcggtcggccgcgctcagccggcggtagaggcacgggtctcccagcactcgcagcaggttgtcgctcatcagcgcgtaggtctcctgcgccaggccgggctctccgtgctgctgggcaaaggccagcacgtccaggcaactgcccaggtccagccgccgccgcaggctgccgccgtggcgggctccagggcccgggagctgggcttccggggcccctccaccaccccccaacccccgggcctctgcagaaacaccatgagcttccgggcctcctcctgcttttccgtgagcgccccgctgcggccggcagggctgcccccctcccccggcgcctccccttgagggtcccccgaggcggccggcctgacctcctgctccgagctcggggcgatttcgcacctgctgcgtttccgtagctggggtaccggctgtgagcgcctcgcagaggaggaggccgcggggccaggcggcctctgcgcggggggctgtgcggggcccctgggcatcgcggcttggggcagcgggtctagacttttctccctggttccctctcctcttaggcctgggggagggtctgggctgggcgatccgttggtctcggagcttcttggctgtggctgacctccagcctcaaccaggccccctgtacctgtccctatgactgtccccactgaagaagaggggccgtgtctgtcctcagagtgtgtggaagtgctgggacccacggggctcccgggaaccgccctcgggacactcccttggggcctgtcttgcctggggaaggggtggcttctaagaaccatggcaataaggtttccccagctggctgagacctgcccctcctggtagcgcctggggagagccacactctcctgaggctttgacccgtcagctggggcaggggatgcggctggggttggggttggggctgaggtgggggctggggcaggggatgcggctggggttggggctggagttggagctgggcttagggctggggttgggactggggttagggctggggatgcggctggggttagggctggagttggagctgggcttagggctggggttgggactggggttagggctggggatgggggtgtgagggttgggactgggactggggctggggctggagttgcggctgcagctggacttggggctggggctggggttgaagttggagctgaggttggagctggggctggggctgaggtgggggatgaggttgaggtggtggctgaggttggtgctgagctgggggatgaagccagggctggggctaggactgaggctggagctgaagttaagacttgggctgaggctgaacttsgggctggcgccgctctgagattttcgcccacggaaggatcctgggtaacctccaggggcaaaaagtctgaaggagaggggagagtcagggcttcaggtgggaaccccgggccgggagctgcgggcggggaggcggagcgcgggcgaggctcacggctccgggagggcgcgcggctgtggccggctgcagccggctttgcttgctccgggggccgggtgggccccaggtcagcggcaggactgttatctcgggagctgtcagccccggcctcgccggcatcgtaggcccctgtggcacccggcccttgggacgagagtgggcgaccttgaggcggactctctagccaggggcgcgtggagtctggggctgggccaaagctccgggtgcccgggacctccctgctgacccagggccagcctcctccgggggcagggacccccgaggcctccctgctccagccacccttggccccagagccttccgtctgagacccaggctgcagggcgcggggagcgggcagcgccgggagtgcgggctcctgggcgagtgggggtcctgtggggaggccgcgcgcgtgggcgtccagggcggcggcccgtccaccgcgtcccacacgctccccgcggcgcccaggcggagcgggtccagtttccgggggcggcgggctctgtctcccgagccagcgtccatccgccgccgccggccccggcctctccccatcgagcccgagggccccgcgcccgcctgccaggggccagtgtcctgttgccccgcggggcctgcggctggcgagaggacgccctgacaccacctgtctccgcctccgcttcgctgccagggctccgaggagtgaagtggatcaggaggggggcggacatcccccctgcttcgctcctgcccaggagggcagtgcctggcctgggaggctcctttccttccgctcggggggccgcgggggtggcactgccccgttgctgtcctaatgcctctctgcgggcctcctcgacagccgtcttgagtggaagccgggccatggcggccaggcccccgcccggcgctgcagcagggacagggctctgctggccgcgtcctgggggctctggtttcccctgccctgggctctgcccctcgctgccatcactgaccttagacttcggttgcagggccagctcagctcctcctgcctgatgaggttgagccccgagggctgtggacaccggttctgccgcctcttgatcgtgcccggagccaaaccagtgtaaggccagcgctgtggcagccaccacagccagcgccaggagggccagcacagcactatcccagtcattgtcactgtcccagtcccagccccagaggggaccatctggctccaaggtgccctggatcatggttcagggctgcaatagaggcctgatggcaggctggcagtgcatgcagagcacagaggcctgggctgaggcaccggccagcgcctgccccaagggctgcccagttaaggtggaccagtcctccagggcctgggaatggtggggtctctgcttgcactcaggcctgggggtgtcagtagggcctggctgcagatatcaggagacagcgaggcttatggcaggataggagcccagggtctctgcaagcaccccaccagctcctgccctcttctcctcctcgtaggccccagggtcctcaggcagcgttcctgagctctgtgctgtcatcacagccaacctgcttctgcctggtagaccctcacacccctaaatttattccacaccccacagtccctcctctcagcctgggcccagcttcagggggcttggcagggaagggttacccacagggagatgttatctctagctctagcaatgtgatgtggccctgatgaaatcaccagaaaccggagaggctgattccactgtgggccagcaggggaggggtgggggccgtgcacgggagggtgcaggctgtgcctgacggtggtctctcaggctgaagagggagaccctggacacgggtcctggcagtgagcattatcattgcaggggtgctgtggaggtttgtactggggcacagggagggggcatagagaggagactgaggctcccatagctcctcctccagcagcttttggactccttactctgggtttaccagacatgggatagggttatcaagtcaagagaaaaaaaaaattaatgggataaataaaatccaaacatatttctctctttatggccaggcttatttcagcccacctagaccttctaggatctcctggaccccctgcgcccatcgagagtgtcttgactgcccagatgagactctcactgtgcccctggagaaccctgagcccagcctgccccctactccagttaccgcatcagccagcacctggatcccttagaaaccacccccctctggccccaggtgctctaatagccagactctgggtgtcttcatctcagtcctcagccttcccttatctgagctgaggactcgccctcgagaccacatcctggctggtacctcctagccctggctcaggccggcatgtaggtacttctgttggatgtgagcacttgcttcctgagggagaagcctgggctcctccacctgctccttgcttaatcccatctcaggagtgtctcgggccaggtgccaggtgaggctcagacaagaaaaagagcctggagtccctgggacaaaggcagggctccctggaaagtaccgtgtgtatttttccttcctctgggacacagcaggcctggggatttctcccttactcaagcagcaaggagatggcctaggagtgtccctggcacccagcctgaaccctactgagcctcaggtaactcacctcccagctccccctgggactattagatgacagggagagggtgagggtgggccccatgccttaaggtggacctcaagttgagggaaggctttctagaccgtgcccttattctctgtcccagtctcaggctctgcctcttggttaagtttggggtccagaaaccttcagaggatggagatgacacccataaatattagagactgagtagggggcgggaagcggtggcggcagcgcacccccggggtgcaactgccctggaactccaagtggtggcttcaaaactggattaaaatttatttccgcgaaaccctggagtcacggtccggcgccgactggcgttttctgccgtagactgagaacgcgtcagggatggctccgttggcagcgcgcgcgagcgcccccgggccgcgcctggagggttgacagcgactcgcgggcgaactgtgaacccgcagcccctgggctccgagcgcaaacctggcgactgggagggcccggggagcgggtgagccagcgccagccccgccggccccaggagcgcgaatttctctacatttccggctgtggccgcagttggaggatgggatcaaaacgggcaaaaaagtgcgacctgggccgaggtgtcggatcgcctcgaggtgggaggccgaggtgttggatcgcctgaggtcagcagttcgagaccagcctggccgacagggagaaaccctgtctttaccgaaaatagaaaaattagccgggcgtggtggcgggcgcctgtaatcccagctactccagaggctgaggcaggagaatcgcttgaacccggggagttgcagtgagccgagatcgcgccactgcactccagcctgggtgacagagccagactccatctcaaaaaaaagaaaaaaagacaccagcaaagggtttttttctgttaataactaggtccccccaaccccccaaaaaggaggatggttaaaagcagaaaaggcaaaaaataaaggcttttggccgggcgtggtggctcacacctgtaatctcagcactttgggaggccgaggcaggcagatcacctgaggtcaggcgttcaagaccagcctggccaacatggtgaaacccctgctctactttaaaaaaaaaaaaaaattagtggggcatggtgccggacacctgtaatactagccactcagaaggctgaggcaggagaatcgcttgaacccgggaggcggaggtttcagtgagccgagatcgcaccgccacactccagcctgggcgacagagcgagactctgtcttaaaaaataaaataaataaactcttttatatttcaaaatctgaagacaaatcactgtagtgcagataaaataaaacgttcatatcattttattattttaacgtgtttcatattattttaacgtgtgacattaaacaatttcagggccgggcgcggtggctcaagcctgtaatcccagcactgtgggaggccgagacgggcggatcacgaggtcaggagatcgagaccatcctggctaacacggtgaaaccccatctctactaagaatacaaaaaaattagccgggcgcggtggcgggcacctgtagtcccagctactcgggaggctgaggcaggagaatggcgtgaacgcgggaggcggaggtttcagtgagccgagatcgcgccactgcactccagcctgggcgacagagcgagactctgtctcaaaaaataaaataaataaaataaagtctgttatatttcaaaatctgaagacaaatcactgtagttcagacaaaaccttcataccattttattatttaacgtgtttcatattattttaacgtgtgacatgaaacaatttcaggaaattgtattaggtattgcgctcgtgtcttcttaggcgtcctcatcccttttcacctcggagctcagcgtcttcctcagcagcacttccatgtcatctgccccgtgaaatcagcctaacgccgtttctcaatgacgtggatcgccctaggccaccgcaaccttccggaagctctctcagctcagttcccattctcccaccatctcttggttctccttctacctcaccggttgctagtcctccgcttcgcagctgaaaatgtgcccggggcctactgtgggcctagccaggcctgcttacgcagtgcagtttcccatgaatgatgcccagtcattatcacataacctgtggcaagccagcaagatggccctggtgacagcaaaagaaactgcactaggacctgaatgtagatctcagtcatgttccttactaacagcacgttttgcaaccatgcgttaaagaaacatctgactcacaacaaaattttaaagggtttatttgagtgaaaagcaatttatgaattggggaacacctgactgaaagagcgttagtattccagagacaaaacatcaagtgcaagtttttattgggaaaatgtagaagcacaataaagaaattatttgattggttacagttatagagttgctttctttggcttatcctgttggaaagtcagtagttatataatcatgatagttggttacttatgattgggtagattaaaatttatctctgtctaatggaagcatttatcagaaacaactcagccaggcatggtggctcacgcctataatcccagcactttgggtgggaggctgaggtgggcagatcacctgaggtcaggagttcaagaccagcctggtcaacatagtgaaaccccatctttacaaaaatacaaaaattagctgggcatgatggcaagtgcctgtaatcccagctactcgggagggtgaggtgggagaattgcttgaacccggtaggcagaagttgcagtgagccaagattgcgccattgcactccagcctgggcaacagagaagactctgtctcaaaaaagaaaaaaaagaaatgactcatgcctgtaatcccagcactttgggtgtgaggccgaggcagggcagatgactagtctttgagaccagcctgggcaacatagcaagaccttgtctctactgaaaaacaaacaaacaaaataatggctcaagttaagtttcacttatgttttcaatttaagcaaggctgaagtcacttacgagacctaacttgttttgtctgcttagggattcttcaggcccggtctccattttagtttacttaaacagcccgggtgcagtggctcacacctgtaatcccagcactttgggaggccaaggcaggtggatcacctgagatcaggagttggagaccagcctggccaacatggtgaaaccccgtctccactaaaaatacaaaaaaattagctgggcatggtggtactcacctgtaatcccagctactcgggaagctgaggcaggagaattgctgaacccaggaggcagaggttgcagtgagctgagatcgcactactgcactccagcctgggtgacagagcgagactccgtcacaaaaaaaaaaaaaaatttacttcaacaaatccccactgggcaagctgagaggatgaccagatggtagagctttgctctctgttaccactgagtgacgtagtcactggagtgcagagtcgtgtacaggtgatcaccatcatagacctgggtggtggggtgttgaattctgtaagttgtttaatcctgatggcaatcatttgatgtgagagtggctgctggaaagtgttgaaacccttgagaggatacaatgaaggaactgggtaaacacaatgactgtaagaaaaaccaccaaggactcagcaactccctgcagctgagatccccaggagccaagatttaacccattaaatcaaccaacggcgtcgtctatctcatgagagacttacatttgtttcttaagagtctttaaattttggaaaacaatttctaacgtattgataaggaaattttcttatcaagaacacaagctcttatttgttaagctcctaaggtatcaagagcttctagtttggaacactgttgaggctaagttgttcatttcagattgcattgcatgatggggaattcaaagtattgttctatggaaacaaaataatttaacaaaggttaatctttggagtaaattatgaccttagccttgttcgttttttttttttttgactaccagtgactatgatcttagtttttgagcccagagattgcagcctcttcagatgatggaatgaagatgtcagttaaaaaaagaccgggcgcggtggctcacgtctgtaatcccagcactttgggaggcggaggtcaggcagatcacctgaggtcgggagttcgagaccggcctggcgaacatggagaaaccccatctctactaaaaaaaacatatatatatatacaaaattttcttgctgacaaattttgtaacagagataatatgagtttatttgattaacaaagctaggtagaatatccatttttactaaatcaccaatattcttatttattaaagattaatcaagccacatggacttgaaaagtatttgggttactctttttctgagaaaatacttcatataaacacttgtttttcttatcttttccttttttttttttttttgtttgagacagagtcttgctctgtcccccaggctggagtgcagtggcgtgatctcggctcactgcaatgtcagcctcctgggctcaagcgattctcctgcctcagcctcccgagtagctgggattacaggtacgcgccatcacacccagctaatttttgtatttttagtaaagatgggctttctccatgttggccagtctggtcttgaactcctagtaatccacccacctcggcctcccaaagtgctgggattacaggtgtgagcctggccataaacactttttttctcaggctagtgacaaaaatgtcagagataagtatttgtctgtctatttaagaaaatcaggaggcacactgaagaaatcacttggttacagttatgcaacttcctcatttggtctgtctagttgggaagtccctagttacgcaattgagcgttagctggccgcttaggattggctggagttgagttttacttctgcctcacataaccatttatcagaaatgactccagttaagtttcacttacgttttccatttaggcaaggttgaggtcagttagaacgcctaactggttttgtctgctcaggggttcttcaggcctggtctctattttaatatttagctcaggtaaggtaattatgctggggtttcacagtaatctattatagtctggaaaattaagtcttcctggaatacaacaggacctcaccgcagatgtcaaatacgagtccaccagcttaagggtccctggtgaggatgacagaaacttgagaagctacacttatcaaacatcccacaacctaactcatgaaagttggctgagacgcctaagtgctgagcgtcggaggctgtcacttgtttatgatccacatatcagagtgcttgtttctgccacgtctccagcccgggagtactgcagggccctggggctctttacccacgtgcacaccctcagtcaggggcagcaaagtttttgtgcgaagagctggattgcggctgtttttgcctctgcaggtcacacagtctcttgcaactactcaagtctgcacaaaaccaaccttaaaaaataaaaggatgtggctgtgttcctataacattttattttttatttttatttttatttatttcttttttgagatggagtctggctctgttgcccaggctggagtgcagtggtgggatctcggctcactgcaagctccgcctcccgggttcacgtcattctcctgcctcagcctcccgagtagctgggactacaggtgcccaccaccacgcccagctaattttttgtatttttagtagggatggggtttcacagtgttagccaggatggtctcgatctcctgacctcatgatccgcccgcctcggcctcccaaagtgctgggattacaggcgggagccaccgcgcctggccccaataaaattttatttacagaaacaggaggtggctggacttggtgacccctgcactaagcggccccatccattcccacggcttgtgcacgcctctcagttcagcatctccgacctggacctctccgctacgtctgccatgaacatcactgggtggcagacgacatctcaagcctgctgtgctcacatcaggactcttgattttccactgtgctggatgtggtccattgtgttcagcttccattctcacctccttttgtttattttcctgtattttagaacctaaaatacaaatgcggcaatactgtgttttacagatccccttgcagccacagttccgggcgaggctgttggattcagtgcagttgtgtaagatgtgaaaggcagaaatgactcggaggcctccgccctgcgctgactgctggcagacagggctgtggacactcagccgtcgctgagggaggcctgggcagcaggggtgcagcatcaggattcccggcaggttcctgatctcagaatcacagctacccaagtttcctcttaagctcggtagtcccaaaggccacctctcagctattataccaccaactcatccagcgattctataatattccccataataaatccatttctacccctgcctgatacactcaccgaacctctctcatcttcccctccgaaaatctctatcacgacttagttccaaacagaagggaacagccacaccaggaatgtgaacaggaaaaacattaacatagcgaatcgttacctagtaagatgacgttaacagcggaagtcaagaaaagaggacacaaagggattcagaagcagcaaatgcagaaagatgccgcgatggctgggcttcaggagcaaggaaggggccgggaatgcacagagctgccaggggtgcgtggcccagccaacctggtgcatcaaattaactgtcgcatgcggttaatacctaagaacccttttattcttttcctgttttagaatttttttgacaattgaacacatttttgcatatgaactttaaatttgtgttttcctatttttaacattggaaatcttactggaattaaatatttatattcatttgaggagctgtttgtttgtttgtgacagagtctcgctctgtcccccaggctggagtgcagtggtgcagtcttggctcactgcaacctccacctcccaggttcaagcgattctcctgcctcagcctccctaagtagctaggattacaggtgcctgacaccaagtccggttaattttgtatttttagtagagatgggttttcactatgttggccaggctggtttccaactcctgaccgcaagtgatctacctgcctcggcctcccaaagtgccgcgattacaggcatgagccacagcgcccagtctcgtcttcccatcttgttcagaggattaccggtagggtaatgaaaatcgtaaagcgttagccatctgaacaggtaaccttaacctgttctgttttatcaaaaacataatttaaatccaactgtcctttcacacacccgtgaatttatatttttatgttttactgtttttgtttttgcttttgtttttgtttcgagacagagttttgctcttgttgcccaggctgaagtgaaatggtgcaatctcggctcactgaaacctccgcctcccggatttaagtgattctcctgcttcagcctcccgagtagctgggatgacaggcacgcaccaccacatctggctaatttttgtatttttagcaaagacagggtttctccatgttggtcaggttggtctcgaactcctgacctcaagtgatctgcccacctcggcctcccaaagtgctgggattacaggcatgagccaccgtgcctggcctactgttttataactaaaattttcaagtgaaaagccacaagatctttgtgttgtctatgtttttgtgtctttatgtctatatgtgattttaatttacaaagaactctatttaattggcataaagaaaaaaagcacttaaatcaagtaatctaagagcatacagtgtatactatttttatactatatttaagaaatatagggacaagcacagtggctcatgcctataatccctgaactttgggaggccaatgcaggaggattgtttgaagtcagtttgataccagcctgggcaacaaagtaagacctcttctctacaacaaaaacaaaaatagctgagtgtctctattaaagtatagatagatagatagatagaagaaaatacaaaaataaaatcattctgcaaactgagttcatcatattacttcactctgtgtcattcttttaaaaccctgcacctgcccaacctctgcaaaagtacaactgctaacaagtaatgctggcgcagcactttgacatgatagggaacacctgtgagactgatcaaatgaaaggccgacttaacccaatagctactccttccaaatttccttccagctgctcaaatgtggttcaaatggttttgacactgacttaaaattgctggccattctcccaacatggcaccaagtcaacctggacaggaagggataatcgaaacctaaccacaggataattgatcagtgatgtcttcagagaattttttttttttttttttggggactgagtctcactatcacccaggctggagtgcaatggcacggtctcagcttactgcaaactccgcctcccgggatcaagtgattctcctgcctcagcctcccaagtagctgggattacaggcacttgccaccatgcccagctaatttttgtatttttagaggaaacgtaaaaattgccaatatcaagatggagtcacttgtgtcgaacccaaacaaaataagaggttaagaaggggtgggggccttcatgcacacatgcctatgaaaagaaccatgacaaaactctctgagtggctggacgcggtggctcacgcctataatcccagcactttgggaggccgaggcgggcagatcacaaggtcaagagatcgagaccatcctggccaacatggtgaaaccccatctctactaaaaatacaaaaattagctgggcatggtggcgggcgcctgtaatcccagctattcgggaggataaggcagaagaattgcttgaatccgggaggtggaggttgcagtgagccgagattgtgccactgcactccagcctggcgacagagcgagactctgtctcaaaaatatacatatatagttattatattttatctactactttgtgttagttcctgtttcattcctttatgttacttattttttttccatttgtaagatatatactaagctttttgaatcgtttcttcattaataatgtagtcacgaggctgggtggcttacttctgtaatcccagcactttgggaagccaaggccggtggatctttcgagcccaggtgttcaaggccggcctgggcaacatggtgaaaccccacctctcccaaaaatacaaaacaagtagccgagtgtggtggtgcatgtctgtggtcccagctacttgggaggctgacaagggaagattgtttgagcctgggaggcagaggttgcagcgagctgagatgctccactgcaccccagcctggttgacagagtgagactctgtctaaaataataataatgaagtctttttttttttttttttgagatggagtcttgctctgtcgcccaggctggagtgcagtggtgcaatctccgctcactgcaagctccgcctcctgggttcacgccattctcctgcctcagcctcccgagtagctgagactacaggcgcccgccactatgactggctaatttttttttgtatttttagtagagacggggttccaccatgttagccaggatagtctcgatctcctgacctcgtgatccacccgcctcggcctcccaaagtgctgggattacaggcgtgagccaccgcacccagccataatgaagtcatcttaaaatgactataaattttcctcagaacatgtagggtccagccgtacggggcttagtgggtgttctccccgtgtgcggagatgagagattataataaataaagacacaagacaaagagataaagagaaaacagctgggcccgggggaccactaccatcaagaggaggagaccggtagtggccccaaacggctgatatttattgcatacaagacaaggggacagggtaaggagggtgaatcttctgagtgattgacaaggtgaagcatgtcacgtgatcacaggacaggggccccttcccttttaggtagctgaagcagagagggaaggcagcaaacgtcagcgttttcttctatgcatttctaagaaagatcaaatactttaagactttaactatttcttctaccgctatctactgtgaacttcaaagaggaaccaggagtatgggaggagcatgaaagtggacaaggagcgtgaccagtgaagcaccacagggagggggttaggcctccggatgactgcgggcaggcctggaaaatatccagcctcccacaagaagctggtggagcagagtgttccctgactccttcaaagaaaggagactgcctttcgcagtctgctaagtaacgggtgccttcccagacactggcgttaccgcttgaccaaggagccctcaaacggcccttatatgggcgtgacagacggctcacctcttgccttctaggtcacttctcacaatgtcccttcagcacctgaccctatacccgccggtgattcctaggttatattaatgatgcaacaaagagtaatattaaaagttaatgactaatgtctacactaatgattgataatgtccatggtcatctctatatctaatttgtatgataactattcttactgtaactattttctttattatactgaaacagtttgtgccttcagtctcttgcctcggcacctgggtaatcctccgcccacaagaacacagctttagctgcctcctgtaggagttcagtaggaagggaatctacctttgtagtgtttgatatgtagttttaaggaaggagaccacccctcatatatatgtcttatgcccaatttctgcctccaaagaaagaaaaagtaaaacctaaaagacagaaataaaatccacaggcagacagcccagtgccgcgccctgggcctggtagttaaagagggacccctgacctaaccggttatgttatctgtagattccagacattgcatggaaaagcactgtgaaaatccctgtcctgttctgttccgttctgattacccggtgcacgcagaccccagtcacgtaccccctgcttgctcaatcgatcatgacctctcacgcagacccccttagagttgtgagcccttaaaagggacaggaattgctcactcagggagctcggctcttgagacaggagtcttgccgatgcccccggccgaataaatcccttccttctttaacctggtgtctgaggagttttgtctgcggctcttcctgctacagtttgtaaccagattatttctgacaagttttgatccagggtttttttttaaagatttgtcaatttcaaaatatttgtttgctcctgcttcctgttctctctctccctttttttttctttttttaagacaaggtctcactctgtcacccaggccggagtctagtggtgggatcactgctcactgcaggatccaactcccagactcaacagatcctgccgactcagccaccgaccccatagctgggaatacagatgtacatcatcacacccagctaatttttaaagttttttgtcgagatgggtctcactgtattgcccaggctgagttttcttcttcttttttttacattttgtttgcctagaattgtatttgattgtaatcaaatcatgtgtcacatctttttttcaatttgtgtgattattttgtggcccaatacatgattttttttgcgaatatttcatggacttaaatagataagtcctctctctacacataattaaatggagtgtgtgctttgcattattcagttcctttattcccatccttgcttttgtctgcagatttgtcctattccagaatgggtatactgaaacttgggtaagggtgaggccagcgttctgggtggcccaggctactatcccacccgtgccacagaatccacacagaggcccagcggcggcactgggtggtggggaagggggaggcggacccaggttgggggggcaggcagtcagtgcggttgccaggaagcgggaaagggccacaatggggtctgggaggtgggcggggcggagcggggatgtccagccacgtcgctttgttttcccacgctaggagctaccacaacaggtcagtgcacctcggggcaccgggtcccccacgcaggcccttcccggggcaccctttcccaacagcacgaaaatctcctgcccccaccccacccccaggtgattcccttcaccaagtctgggtctagacttggcccccgcgagttcacgtccctgcctaatgcgcctggagtccgggtgatggccctggatccgctcccggccccaagctccacacagccgggaaggaagctcgcgtttgttttgctggcgccagggatacggtccaggccccgccccgccccgcgctgatcccagggtagtgggaaagtgcgctccccaagaatttgcggtgcaggggccgcggccaccgccttctgtccgcaggtgctgcgagccgtaagcgccccccacccgcgctatgggctcggacgcctgggtgggcctttggcggccacaccggccccgcggccccatcgcggcgcactacggaggccccgggcccaaatacaagctgccgcccaacaccggtagaaggggcaggccccgggattgaggggtgggacggcgcctgggggagggaaggggaagagaccagggaggcctgcgctcggggctgaaccgtgcctgctagaggggagagggggtctgtgccgggggagggtccgtgttgcagatggggcttggggctgggcccggccagacgctaactcggatgctcccaggctacgccctgcatgacccgtcgcggccgcgcgcccccgccttcaccttcggcgcgcgcttccccacgcagcagacgacgtgcggccccgggccaggccacctggtgcccgctcgcatgaccgtgcgcggcaccgacggcgcccccgcctactccatctacggccgcccacgccgctcagcgcccttcctcactccgggacctggtcaggacccccgggcccctggccaccccaacgccgaactgcctccagggaggcccacctgggaacccccgacctgaaccccgagtccccctcggataccctaacaccgcatattcggtacccccatatccggatctcaaatcccaaaccccgaaccccacggggctttgataaatcgtggctcagactccccactagtcccaggaccccatctcgggtacccaccaggctcccacgcagttctagccccccacacccttgatccgccccgcaggcaggtacttcccggagcgagcggggaacgcgacgtaccccagtgcgcctcggcacaccattgctccccgaaactggggtgtccaggcggaacagcagagcccaggtgaggtcagaacggcccatcccagaactgtgggccttcccactcgagaccggggaccgccctccgggagctgggaccaccctgcgcctgtccgcggagacccactacccccgagccctgcctcctccccaggtcccgcggcctatacggtgccctcgctcttgggtccgcgcgtcatcggcaaagtctccgccccaacttgctccatctacggccgcagagcggctggcagtttcttcgaggacctcagcaaggtgggggaggggccggggcggacgcagggggtccctggtccgcggcagtggaggcggcagccagcaccctctgccctctcgcagaccccgggcccctgcgcctatcaggtcgtgagtccaggggtctacaagtcccgggccccccagttcacgattctggcgcggacttcgctcccccaagacaacactcggaagccagggcccgcggcctacaacgtggatcaggtggcctggagcccagggtcaagggtcagagtcaggagagtggggagggcctgaggtcggagtgatgggatcagagtccccgggggtccaggggtcccggcgcggagaggatgccggccccgcgaggtcagcggtgtctccgggcccgcagcaccggaagccccgcggctggagtttcgggatccggcactcggactacctggccccgctggtgaccgacgcggacaactgacccgccaggcgggagcggccccacacgtgtttgcttaaagtctgcgagtccgcatcgtgtccgcctctctctctctctctctgcgcgtcctggcgcaaggcctggggtggagccacggctggggccgtgtcccaactccgaacccagcggggcggggcccgagcgtcgggcgaggccgggaccccagcgctgcgccgcgtccgaacgtcgagaccccaccgagggcgggagggggactctcgggagccacagacgcccgagacccacgccgggcgggaccggccagggatcacccccgccgacggccccgggccccgacggcccggaagttccgcgtgtccgggggcaccgggggattggccggggcgcggcgtgcaaggcttcccgggggcggcgactgccgagctccgccctccaggcggccccacccgcctgccgtcctggggcgccgccgccccgccgccggcagtggaccgctgtgcgcgaaccctgaaccctacggtcccgacccgcgggcgaggccgggtacctgggctgggatccggagcaagcgggcgagggcagcgccctaagcaggtacgggcggggctcaagtcgcgaggcggggaagcgggaggcagacacggacgagggcgacacagacacgggaccgaggggcggacaccggagagacacgggaaaggggtcgggacaggagcacgtggctcagacaccgacgccgggaggccgcagaccccggacgtgtcaggcatccccgcaggcccggagcgatggcagccttgatgaccccgggaaccggggccccacccgcgcctggtgacttctccggggaagggagccagggacttcccgacccttcgccagagcccaagcagctcccggagctgatccgcatgaagcgagacggaggccgcctgagcgaagcggacatcaggggcttcgtggccgctgtggtgaatgggagcgcgcagggcgcacagatcggtgcgtggggagggttgggcgttcctgaccccgactgggaggtcagcccgagagactttgggtccctgggggtgcgacggtgccccactaccagcaccggccccagggtgccccaccgctgtgggctgccaccctcacgcgtacccccacataccaggggccatgctgatggccatccgacttcggggcatggatctggaggagacctcggtgctgacccaggccctggctcagtcgggacagcagctggagtggccagaggcctggcgccagcagcttgtggacaagcattccacagggggtgtgggtgacaaggtcagcctggtcctcgcacctgccctggcggcatgtggctgcaaggttagaaaccacctcctttccagacgggagcctataccgcacatgcagcaaccagtccatccacaggcagctcccaacctcaagcctggcccaaagcctccaagaccctaccaaggcttctccccaccctgctccccagcacagttctccccaccccgttccccagcacagcgcttggggcccctctggctccagaccaggccccttggagcaggaaaaagatccactgatggaattcagacccctttccccttgggtccccagacagctcccccaagggaggagctgaggactttcctccctctgccccaagccttgtttccccaaggacaggtaccaacctcctcccctactgacacttctcaaccaagaaaacttcctttccattccctcaccagctgggcacccctatagctgcttaaatactttccaaatccagctgcactcctagccagggaaggtgaagggatgcacagaggtgggggaggggtactgtgcagggtactcagcatccctgaccaccaggtgccaatgatcagcggacgtggtctggggcacacaggaggcaccttggataagctggagtctattcctggattcaatgtcatccagagcccagagcaggtacggggcgccacggatcagtcattaatccaggttgatgatggagaccctggccagaatcactaaaagatcactggtggatcattagggtcactaatgagaacactggtcaaggttactcatgagtcactgggcctgggccgaaatcatcagtggaactttgattaggatcataaaatgggaagttggtcaaaatcacagatggctggcggggcacggtggctcacacctgtagtcctagcacttggggaggccgaagagggcagatcccttgaacccaggagttcaaaaccagcctggataacacggcaaaaccccatctctacaaaatagttcgctgcgtgtggtggtgcacgcatgtggttccagctactcaggaggctgaggcaggaggatcacttgagcctgggaggtctaggctgcagtgagccgggacgatgccactgcactccagcctgggcaacagagtgagaccctgtcccagcactctgggaggcagaggagcccagttggagatcagcctgggtaatatagtgaaacttgatctctacaaaaaaaagaagaaaaaaaaaagccgcgtgtggtggtgcgcacctgtagtcccagctactgggaagctgaggtgggaggatcacttaagcccaggaggcagaggtcacaatgagccgaaattgtgccaactgcactccagcctgggcaacagaggaagactcttcacagaaaaaaaaaaaaaaaaaaaaaaagctgctaagtcatttaccataagtcactgagaacaggggatgtctgaccagatgcaagtgctgctggaccaggcgggctgctgtatcgtgggtcagagtgagcagctggttcctgcggacggaatcctatatgcagccagagatgtgacagccaccgtggacagcctgccactcatcacaggtgacctgactccatggcctgcttctgcatgttcacaggctcctgacctccaaactcaagtcaagggcctctcgttaggagttacccgtcacctgaccgtgtgcccccctacccccatcacaagatgcctgaccaccaccatgtggggtggcctgatactcaacccaccaggtgctgccacccccataataagggacttgaccctcaatgctcagggcccctgaccccaaagtcggcatccccgaactctcccaagaagctccaggttctccattgtctccaacctcctctgcctcccccaaagcctccattctcagtaagaaactcgtggaggggctgtccgctctggtggtggacgttaagttcggaggggccgccgtcttccccaaccaggagcaggcccgggagctggcaaagacgctggtgagcggtgtggcctttccctgggcaagcgtcttgatgcgggcccagcctacccttcacccctcccgtccccactgcctccctccactcagcagtcctgcctaaccccagtcccaccctcttctgcccgaagtccctccctccttcacggcttcctaacctgctgtgactttagaggtcaaggctggcccggcctggacctggggaagccctctgtggcgttcctgccccagaccaagtacaagttcctcctggccccatggcgaggtgtcgcacttcactcgtgtctcttccccaccccaatccttccctgacttcatgctggggggctggcaacccagggtgcagcaggggctggagttcgaccaagaaccggctgcagaaggccccgccatggggggtccacgctgagcctcctctccgcaggttggcgtgggagccagcctagggcttcgggtcgcggcagcgctgaccgccatggacaagcccctgggtcgctgcgtgggccacgccctggaggtggaggaggcgctgctctgcatggacggcgcaggcccgccagacttaagggacctggtcaccacgctcggtgagggggacggggtgtaggggagcggaggcggcggggggtgcttcccgctggggccgccccgacccggccgcgcctaagacccgtccccgcccgcagggggcgccctgctctggctcagcggacacgcggggactcaggcccagggcgctgcccgggtggccgcggcgctggacgacggctcggcccttggccgcttcgagcggatgctggcggcgcagggcgtggatcccggtctggcccgagccctgtgctcgggaagtcccgcagaacgccggcagctgctgcctcgcgcccgggagcaggaggagctgctggcgcccgcagatggtgagcgtcgggggagtccccgtccttccgcctccgccatccccttcccttcccgaggccccgccccttcccgagcccgcgcctctcagcccctctccccgcaggcaccgtggagctggtccgggcgctgccgctggcgctggtgctgcacgagctcggggccgggcgcagccgcgctggggagccgctccgcctgggggtgggcgcagagctgctggtcgacgtgggtcagaggctgcgccgtggtgagcgccgcccccgccctgctggccccgcacccccgcccagctccggccgcgcggcctctaacagcccctcgctctgcagggaccccctggctccgcgtgcaccgggacaggcccgcgctcagcggcccgcaaaaccgcgccctgcaggaggcgctcgtactctccgaccgcgcgccattcgccgccccctcgcccttcgcagagctcgttctgccgccgcagcaataaagctcctttgccgcgaaaccttgtcagtgcttgggcgggagcggaaggatccagggctgcggaggcgggggccgtctcgatgaacacgtgacccccggcgggctccgccttccgcgcacgcgctgagagcctgtcagcggctgcgcccgtgtgcgcatgcgcagctccggggacgcctgcgccctgcctgtgagcgtgtggcgcccgctttccctgagccggcggggcagagcgcagggagctggaggtcggcgcttcctctcgtgcttggtccactgacgcgcggccccgccgcgaggtgcggacgccggggctgggaggggaggaggtagccctgaggactcgctggactccggggtagtttcccagctccggctactgcgcggggctggcggggcacaccccagggcgcgctggaggccggagcgaggctggggcgcccgtgggaggctcccagcaggcaccggtgttctcgcggccaagcacagttataacgcgctcgcgcggcgcttcgagtggtcctggaacctttctggccacgagggcgctggccttgctggggagggcacaaacccagaaccgcccgggcgggggtgcagtgagtcctcgggagggtgccctcagcaggagggggcagtgaccgggagtcctgagacctccacctagcaaaccttctgcgggggcccgtgggaaaggctcaaaggtcaccaacgcaaaggcagggcgtcggctgtgagcccggaggagctgctgggaagcctggatgtgaggagggtggggttttgtggcgggtggaagtgtcgtgcgtctctgccaggagaggttaaacacagccggcgggcagagtctgagctccgggggtaggtcgtgcaggttttctgctgggagtgtggaggaaggccgcggttggttgaagtggctggaggtaacaggaaagtgttggaggaatcggttgctctcggggattgcaagccagagagttacccacctccttttaagaaatgggtttattgcaaatagataacgtggttagttcaggcaaggcatgcacttggaatgctttccgtcagcaagaggttcaccttgctgaggtgcaggtgcagggcagggtgcggtgacaggctggtgatcccaggtagaggacaggagtgacaggtgtggttgcccaggtgtggatgtttggtggaggtggagttctgagctcaggtgagcagctgcaaatgcctgttaagcctgaacgtgggctgggtccttcagatgggtggctggtctcaagtcgcaggggcagcccaggcactgtcctgggccttcccttctggctcctgacgcctgtgcttgtttccaggagcatcagatccatgctgctgctgactcggagccccacagcttggcacaggctctctcagctcaagcctcgggtcctccctgggaccctgggaggccaggccctgcatctgaggtcctggcttttgtcaaggcagggccctgcagagacaggtgggcagggccagccccagggccctgggcttcgaacccggctgctgatcacaggcctgttcggggctggactcggtggggcctggctggccctgagggctgagaaggagaggctgcagcagcaaaagcgaacagaagccctgcgccaggcagctgtgggccagggcgacttccacctgctggatcacagaggccgggctcgctgcaaggctgacttccggggccagtgggtgctgatgtactttggcttcactcactgccctgacatctgcccagacgagctggagaagctggtgcaggtggtgcggcagctggaagcagagcctggtttgcctccagtgcagcctgtcttcatcactgtggaccccgagcgggacgacgttgaagccatggcccgctacgtccaggacttccacccaagactgttgggtctgaccggctccaccaaacaggttgcccaggctagtcacagttaccgcgtgtactacaatgcaggccccaaggatgaggaccaggactacatcgtggaccactccattgccatctacctgctcaaccctgacggcctcttcacggattactacggccggagcagatcggctgagcagatctcagacagtgtgcggcggcacatggcggctttccgcagtgtcctgtcttgagccactgcagtctgggccccatcattaaacgggctgcgtttaatctgtgtgtgtgtgtgatctgtaccagcggcccagggaggccaggcagccctcttctctgcgcaggtgtacataaaagggtttttagggggaagatgagatggcaacactgctttattaggccgggccagccaggagcagacacacggctcctcagtacacattcccccacccctgcctcggtgctccccactcagggctgggccatggagggggcagcgtaggtctggaagcgcttgtgcgctcgctggtgcgtgagcagtctcagggacatggtgtccacggccatctccagcccgggctgctgggttatctccactgtgtagtcattggcctgcaggggtggcacatcagcagggtctggggaccgtctccccctcccacgtatcccaggctactcaccagctgcagggaggccagcatggaacgacacacctcgaaggccggctggccagccaccagctccgcaaagggacaccactcattgagctgggggaaccgtgagaccagctggtccccataggtgtggatgtcaaagggcacatgctgctcctgcacaggggaggggcatgttggctgcggagagaggcaaggccctggacagacccgtggcacacagctctggttcccagcggccccgcctcacctgctcctggagcagaggctgcactgtgtcctcccagtccctgatgcgctggctcagctctgtctcctggacaaacttctgggaggtggcgatgaagagctcctaggggaggatcagcaggagctactgcctcccaagcaggggcctgggcaccgctcacctgtccccctcccctccccgtctccctctaacccaggcctaccacattccttcgaaccagctcctcgtagctcagggacatcggcactgcgtctgggaaggggtagctgtgagctgggcagctaaggggccacgctctcccctgcccccagctccagtggcccctcagcactcctagcccgctgcccacctaccaaggtcagcggcttccctggggtctgctccctcgggctccatgtactcctcaggctctagaaagtcatctgctgggaggtgggagagtgaacagcacgcaggcagctagtcggcaggtgccaagccccaccccaccccctggcaggcacccacctgctgcccccaggtcttccagggaatcctccaggtggtcctcctctgcaggccgcagccactgctcagccacctgtccagagaaagcatctgtgaggggcactgtcacctcccatcagggccaccacggggtcctagatcacagctgaccagctgggacttgcctccctcctctgcagcttccggagagtttccaactgctccttcacgtgtgtccagtacaggacctccatgtctgcagacaaaggccttgtgagggctccctcgtccttcccaggccccgtgccagtccacccaaggctttgggtgacaccaggtgggggaagaggtaggggaaggagagtaaaactgtcttccccgaggacttcagcctcacctgcaaaggacggaccctttcgccgaagccgcctgctgtcggcatggtctgcatctgtgaaagaacatgctcagcaccagccaggccaagagctgcccacagcattgggaaaagggtgctgatcctcctccactggccctggcccagcccccagctcccagtggtccggagtgcacaccacacccactcacaggcagccaggtaccactggtggaagtcctgcagcttggcagcgcccttcctcttgcgcttctgtcccagagcctcctccacacaggggggcacagagtaaggcctacctgggggcaaacagggactgtcttagagccgctgggggatcagggtgcaaagcccactcccacccccccacctcatgccccaggaaacccagccaggggtacctgagtggaggtaccttccacccaattacctttcttgaagggcttagactccaaggagtcaaaggggtccaggctctgccaggggtctggagtctcctgggcacagagcacaagaaggcgctggagaagtagggggtgcacagccgtccctcccaaaggagtaggggatgcacagccaccctcccaaaggaagagtagggggtacacagccgcgctcccaaaggaggagtagggggtgcacagccaccctcccaaaggaggagtagggggttcacagccaccctcccaaaggagtagggggtacacagccaccctcccagaggagtagggggtgcacagccgccttcccaaagcccaggcaacaagtgcagtgacagcctggggcagagccgaccacactcaaatcctggatcacagaggggaacactagagagagggtgggagcccagagtcgcatgagggggtctttaagagagcaagtgcaaagggccacaggctgggaacaccacaggccagcaggagcaagagcatgatgggcaggcagccagtcctcgaatccgcccatccctccctgccgggggtcagggccccaacactcctaccttcacgcaggatgcaggctctggggccccctcccgctcccgcagcatgtacctcctgggcagggcagcactctgcaaagacagtcacagggtccccacttctcctctttctcccctcaaggctctgggtaccccaggaactccaccttgggttaacatcaagaaccctacaagggtcgggcgtggtggctcatgcctgtaatcccagcactttgggaggccaaggcgggcagatcacccgaggtcaagagtttgagaccagcctggccaacatggtgaaacccccgcctctactaaaaatgcaaaaaaaattagccgggtgtggtggcgcacacctgtaatcccacctactcgggaggccgaggcaggagaatcgcttgaacccaggaggcagaggttgcagtgagccgatatcacaccactgcactccagcctgggcaaaagaacaagactccgtccaaaaaaaaaaaaaaaacctacagggaccggacacagtggctcacgcctataatcccagtgctttgagaggccaaggcgggtagatcacttgagcccaggagttcaagaccagcctgggcaatgcagtgagaccccgtctctacaaaaaatacaaaaattagccgggtgtggtggtacacgcctgtagtcccagctactcgggaggctgaggtggaaggatcacctgagcctagagagagtcaaggctgcaatgagccaagatcaggccactgcactctagcctgggcaacagagcaagaccctgtctcaaaaataaataaataaaataagataaaaataaaccctgctagtactctctgggggtattaaaacaaaaaccctaagaaaaactttaaaacacaaacagtgggccgggcgtggtggctcacgcctgtaatcccagtgctttgggaggccaagacgggcagatcacgaagtcaggagattgagaccatcctggccaacatggtgaaaccccgtctctactaaaaatacaaaaaattagccaggcatggtggcgggcgcctgtagtcccagctacttgggaggctgagggaggagaatggcgtgaacccgggaggcggagcttgcagtgagccaagatcgcaccactgcactccagcctgggggacagagcaaaactccatctcaaaaaacaaacagaaaacacaaacagtggtcacggggtactcttcttcaaaactaggaaaaatgaatagaatatgacaaatatccatgccatctaccaactagagtgaagaaacgttaacatttcctctgtatgcatcaggttgattttgttttaatgaataaaaaggaaggatttcttggctctaggctgggtacagttgaccccgggggttgagggaggcagcaatggcctccagacactccctcctaccagcccgactgcagagaggcgccttggcaaccggcggccatcccaggttgccgtgagctcgacagggctcaaatccttggacgccagcccactactctgaggagcatcagttctgctcagagaggggaggaacacagaagctgctcttcaaaagggctggttgcaggacgggctgcaagacaggtgggcttctgccccagaccagtggtctggggccaaggccataccactgtcctccttgtgcaaggtgactcggccccagagccagggttgccagttcacagctcaggttctgcaggcctccatgtgggtcccacctgctgcgggctcctggactccttgggctccagagcggccttgggggccgaggcctcaggaagctctactgcctcctctgcatcctcgtcctcgcccccacccaggggcatcgggccttctggagaggggcctaggcagggagcaagagagtgatcagctccaaggagtgccgagaccagacggcaccaaagggaccctgatggctacttcctccctcagctttagtcacggagcccagaggatttggcgggtgccttgcaccatcctcgtcgtgctcctgtgctctgtgctctgcttggttcattttatttcttagcaaatgttcctctttaaatgcagccatccacatctgcccagagaggagacccaggagggcagtcagagggcagtcagtgaaccaagatgggctgaggctcaccgggggctgtggctgcttccccggggcgaggcctcactcccatgggccacagaaggggcatgaggctggcagctgagagcagccccttggagccctgtccactgggtgctgcctccctggtcccctctttggctgccctgccagtcccaccggggagctctcttctcacctggctcctgggagaagccgagtgctgggacagggctcctgcacacggaaacttccattggctgctcctcagtcctcccggtgtctgggagagacagggatcagacaaggtcagcccagcccctctccaagatggtccctgcccggtgttcaacaagcctctccaaggggccagcaggagggcagagaccagcagactccaggccttgggctggggggagacagcagggccctgagccaggcaccaggtctctggcactgagaccatgttaacttgtaatcaaggcacagcagatgggtgggatgagcaccagccaacctgtctagactagagcaggcacccagagacagggagctcccaagaccagaggtggcaagcacagggcaccccacaagagtccaaccagaagaccctcccttccttcccaccaagccccccgcatccaagccctcacccttctgggtccctggcatgggggaaacgcccgctggttccatgggggacatgccctctggctccaacatgaaggcccctctggggtggggaacgcacgtgttcatcctgaaatccttccggctggccaggacctcaccctgacggctgtgctggcaaaaacacgcctgctgtagagacccttcccaggcaggcctccctccccgtcgctgggctcagatccctacctgtacaggggattgttgttcttctccatttcatcaggggccaccagggccatgggcaggagggggatgatgaggacctcctgcatggaggccaagggtgggtgagccaggcacccttccactccagtggagaacaggacccacatggggcaatgacaccttcccacaccccatcagctcaacacagccccagggaaagtgctgacctcaccccagcctaagaggggccaggccaggactcacactgggcgtctgatcattcttgagatccacgttagtccgggagtcagggaagtcatccagcgacaggaactggagggagacagagctcgtgggggcggagcccaggcaaacacacagtgggcggggaccacatgccaaagaaactcacctcattctctgcctcctgggggaccccggagctggcaaccccattggccctgtcctcctgcaccgaagagagctgcttggcccgcctgagagagaagcacatcccgtgggcatcccaggagctgcaggggcctccctggccacatgcagggcagcacagtgagtggctgcagaactcacctctttccagagatgaaatcaagggcctggtagacgagtgagtagaggtattccacctggtgaccagatgcaggcagtgaggacccagaaaggaggggcccacccccaaggccttcccagctatccatcggtgcccccacgaggcctggccaccaccaccaaacctccagtacaagaaaccaccaattttggttccaaaaataattctcaaatcaaaccaggaatctcatgagaattactttaccagctgaggccacccacatctctcctctgccctctatggtccacgcagccgcgagcgtggccttctcaacgtgtgaccctgacagcactgtggttcccacagtgtgcctcatcacacggtccttggtggtgaggcccctcgtgcttggcacccactctgccgacggcctgcagccctgctgctcctccgcccgtgtgctcccgccagcatcaccccagcccctcctcctgtcctggccctgccctgtcccagctcctgccgccacggggcctgcaggacagagcccgtcactcacttcctgtccttctcctccacagaacagaggccccaccgtgagggtggtggttgtggactttctaggtgctgacaatgaggcacccacaagtaggggacggggaaggggaaggtgggtgcaggtggcaccctgggctgtgtccaagtgcacacagcaggtgtcattcccccaagacaacagagcccaacagcacaaaagaccctccctgcctggctgtgcgattttaaattaaaaattgttcttggtgttggaaggtgctgaggaattggctgagacctgaggagagagggaggtaggtcacagacgggacgaccactgcacctgccccagaaggagagccgactgtggtcccactggccaccaaaatgccaagaccagcgtcaagcagggcccaccttcttactgtagacgcaggcagagccctggatcaacaacgctgcctcaatgaagttcattgtggtcttgccttcgtcaaaagaaatgcagatctgatccagctgcaagaaacaacacaaagacagggggaatccaaggcccagtctgcactcgcttcttccagggcagccccacccatctttggtctctgcccagcacctcccgagacgggcagctctagctatgctgtgggctcaccggttgtccctggtatttcggggcagagacaggtctctgtgtttccccctacttcctataacaaaaacctgttttggaagtggaaggcccccagggcacactgtctacaaacaaccagggcagcacagcggctccctccacaaggcgccagaggctgacagactccagcaggaagatccccgacacagagaagaaaagggaacctcaggggtaggaaaggcagagataaaatgctgaggtctccatcctctgagcagagaactcaggaaacagttacaggtgagtcgccatccttcctctgctcccctcagcctcccggagccccagctcctctgtcaccccttaaacgtcagtgcgccaggcgctccaccccccgccatgcacattccttcatcccatgcccaagctgccaaccataagccaatgagccccaaacccaacccgaccagctctctctccttagctctggggctgcattcatagctgtccacagagtacattcaaatgtccccaaacactttacttccatactttacccaacatcttccccaacgctggctcatctcctgtattccttctcagcaaatgacactttaaaaaaaaaaaaaaaaaaaaggccgggtgcggtggctcacacctgtaatcccagcactttgggaggccgaggcgggcagatcatgaggtcaggagatcgagaccatcctggctaacacggtgaaacctcgtctctactaaaaatacaaaaaattagctgggcgtggtggcgggcgcctgtagtcccagctactcgggaggctgaggcaggagaatggcatgaacctgggaggcggagcttgcagtgagccgagatcgcgccactgcactccagcctgggcgacagagcgagactccgtctcaaaaaaaaaatgtttttgtagagacagggtttctctatgttgcccaggttggtctcaaactcctggcctccagtgatcctcctgcctcagcctcccaaagcactgggatcacaggcatgcaccaccgtgcccagccacaaacgacactttgaagcccctaggtgtctttccagctcttcaattttgcatttccatctgcctggaacaccgacccccagctgtccccacgcaaactctttttcagagcccctccattcctggggcctctgtgccgctcccttagtgtgatcgtgtcccttagtgaactgtgtgagcagcattagtgtaattccagccttctgttcagtgcctgacactggtgtccagtaaatatttgatgaacacatgcatagataatgtcaaagctaagcctgaaaaacgcagaggctcaccagacagatgaagggaacgtgaaggcagctagcagagactggacacgtctcttcaggaaaatgagcatgatctaaacatggccaaagcatggcgcgtgctggggagaggcaagattttaggcaccatggtagcacgaaggagtggcagaggctgggaagccatccccaaggggagtcacttccattagctcttgaaggataaagggtgtttgtcagatctgggaggaagggagaggaaacagcagcatggtcgtctacggagtgtaaggacctcgggggtgttcaggacctgaagagctggtccagaaagaagggaacatggaggagatggcggcctggaagctgagctgcagaagtggcccttctctccagtgaccctcagcctggctggcttgcccactcccaagacactactgggcttcacttgtcttctcacctccccaggttggacctgccatctgagcccaaacccacatgttcagctgccttcttcaaacatcgcttggatggcttcaccaagattcatactgaatgcatccacactgaactccaaatagcccccaacccacctgcccagaaacccaggggttcctctccacagtcacccccattctggccccaccacctcccctttcacctctgcactgacagggctcctcctgcccttcactcccctcccgtccactctccacgctctgctcagtgcctctgtttaggattttgggtttttcctaacagtggcaggaaaaacccaaaatcctaaacggagccagagggaggcctccatgctggccagcctccctcgccagctgcctgccctcctctgctctatggtcccaacttggaaccttctgttttgttttgttttgttttgtttgagacggagtctcactctgtcacccaagctggaatgcaggggcgcaatctcagctcactgcaacctccgcctcctgggttcaagtaattctccctgcctaagcttcctgagtagctgggattataggcgcccggctaatttttgtaaaaactccaatccttccaacaccaggtttcctccacctggagctaaacattctttagctcaccataaataagtaactgctttcatctcaaacaaactaagccccccaaactctccacaggaccatacattttctttcaaatcccttataagtttctggtgattttttcggttggttggttggttttggtttttgtttttgagacagtctctcgctctgttgtccaggctggagtgcagtggcacaatctcggctcactgcaacccctgcctcccaggttcaagtgattttcctgcctcagcctcccaagtaactgggactacaggcatgcaccaccatacctggctaattttttttgtacttttagcagagacaggttttcaccatgctggtcagactcatctcgaactcctgacctcaaatgatcctcctgcctcggcctcccaaagtgctagcattacaggcgtaagccacctcggcctccctaagtgctgggatcacaggcgtgagccacctcggcctccctaagtgctgggatcacaggcgtgagccacctcggccccccaaagtgctgggatcacaggcgtgagccacctcggctccccaaagtgctgggatcacaggcgtgagccaccttggccccccaaactgctgggatcacaggcgtgagccaccttggccccccaaagtgctgggatcacaggcgttagccacctcgcctggccatcagtttctgactacacaaagtcacacgcaggggtggaggctggattctgatctgccaggaaccactatcattcagagtacatctctaacgcctctactaacaaggtttttgtgaggactctgcattcatatgtgtaaagcacataaaacaggtgcttaacacaagtaaacaccaaatgcatatttattacacccccatgcggttactctcttggacccgtcttcccatgacagaggaagtcctaccatagtggggattatcatttgctttgcttggcactattttttcaaagtttaacatggttcttggcacacaattcacaactaacaacaatgaataaataaatggataaaagagagtaggatcatgacagtactagaagaacattctggccagtgcaatggctcacacctataatcccagcactctgggaggccaaggcaggtggatcacttgagcttgggagtttgagaacagcctgggcaacacagtgacaccccatctctaccaaaaatacaaaaaattagccaggtgcggtggcacatgcctgcagtcccagctacttgggagatgggaggatcacttgagcctgggagatcgaggctgcagtgagccatgattgcaccactgcactctagcctgggcaacagggcaagaacctatctaaaaaaaaaaaacaaaaaaaaaaaaacaaaggacaaaaaaaagaaaaagaacatcatggtagtgtgtggaaaatgacagaaggaaaaagataatactagaaaccaggaaatcaggacttcaagctgcagaggtttggaagagcagacataagaaagcaggaagggagctgaccaagccaggaaggagatttaccaagtgaacaggtgtcctcatggaccctgcttgatgtgaaaacctgaatccacaggagctctgcccagcacagttccccgtattttctcagccaactatgcatgagagcagagaagtttggtcatcagatcacatgtgcatttaacaaacactttaacgtccacacctatgtgccaggcactctactaagcagacaaaagagggcataagtatggtccctgccctggcagaattcacattctagggtggagacaggccacaaacaggtaaatgagttgaagaatggcttgtggccagtcgcagtggctcacacctgcaatcccagcactttcaaaggatgaggtgggcggatcacgaggtcaagagttcaagaccagcctggccaacatggtgaaaccccatctctactaaaaatacaaaaattagctggggccaggcacggtggctcacacctgtaatcccagcattttgggaggccgaggcgggtggatcacgaggtcaggagaccaagaccatcctggctaacatggtgaaaccctgtctctactgaaaaatacaaaaaaattagccaggcgtggtggcgggcgcctgtaatcccagctactgaggaggctgaagtaggagaatggcgcgaacccaggagatggagcttgcagtgagccgagattgtgccactgcactccaacttgggccacagggcaagactctgtctcaagaaaaaaaaaaaaattagccaggcgtggtggcaggcgcctgtaatcccggctactcaagaggctgaggcaggatcggacgcggtggctcaggcctgtaatcccagcactttgggaggccgaggcgggtggatcatgaggtcaggagatcgagaccatcctggctaacacggtgaaaccccgtctctactaaaaaaatacaaaaaattagccgggcgtggtggcgggtgccagtagtcccagctactcgggaggctgaggcaggagaatggtgtgaacccaggaggtggagcttgcagtgagccgagattgcaccactgcactccagcctgggcgacagagtgagactccgtctcaaaaaaaaaaaaaaaaaaaaaagaggctgaggcaggagaactgcttgaacccagaaggtggaggctgcagcaagctgagattgcaccactgcactccagcctgggtgacagagtgagactccatctcaaaaaaaaaacatataaataaataaaattttttttggctgggcgcggtggctcatgcctgtaatcccagcactttgggacaccgacacgggcggatcaccaggtcaggagatcgagaccatcctggctaacacggtaaaaccccgtctctactaaaaatacaaaacattagccgggtgtggtggcaggtgcctgtagtcccagctactcgggaagctgaggcaggaaaatggcgtgaacccagaaggcagagcttgcagtgagctgagatcatgccactgcactccagcctgggcgacagagtaagactccatctcaaaaaaaaaaaaaatttaaatggtttatgataaacattctaaagtgtgtaaggtgctgagatggagaggactattttagatagggtggtcagctgacatttacactaagaccttaagaatgaaaaggactcagtcagccaggcgtggtggctcacgtctgtaatcccagcactttggaaagaggcagagctggctggatcacctgaggtcaggagtttgagaccagcctggccaatgtggcgaaacccatctctactaaaaatacaaaaattaactggacgtggtggtgcatgcctgtaatcccagctactcgggaggccaaggcaggagaattgcttgaacctgggagtcggaggttgcagtgagccaagattctgccattgtactccagcccgggcaacagagcaagactccatctcaaaaaaagaaaagaaaacaaactcagtcattgaaagaatattcccagccaggtgtggtggtgcacagctatagtcccagctacctgagaagctgaggcaggaggactgcttgagcacagcagtttgagaccagcctgggcaacacagtaagatcctcctctctgattttttttttctccttttccttgccatatgaagtccctctttatttaaaaacaaaaaagaggccgggcgcggtggctcacgcctgtaatcccagcactttgggaggccaaggcaggcggatcacgaggtcaggagatcgagaccatcctggctaacacggtgaaaccctgtctctactaaaatacaaaaaaattagttgggcgtggaggcgggcgcctgtagtcccagctactgcagaggctgaggcagaatgatgtgaacccaggaggcggagcttgcagtgagctcagatcgcgccactgcacttccgtctcagagtgagactccgtctcaaaatatataaataaataaataaaaacaaaaaagaagattcccaagtgggggcagaaagcatgaagatcttccaccaagaaaaagcttggaggggccataggttgactggttcaaaagaacaagatacaaaacagcccaaaatgaggctaaaatggagagcagagccaggttcagagaaggaaatttgggttttattctgggcataatggaaagccactgaggggttgattttaggcagaaaacagtgctgtggccagattttaatttttaagagtcacacttgctgctggttggagcacgaattggacgggacaaaaacagggataagggaacccaaataggaaggttttacacaaacccaggccagagacaatggtggcctagaccaaataaaatggacaacagatgaattcaagtgatattccggtggtataactgatggaattcatggatgaactgagtgttaagcatggggcttcactatagccacatttagcttttgcttttggttgaacagcggtgtcattttccgagatgggaaaagctggggtttaagcagaaaaatgaagagttccactttaaatatgttaaatgagatgtttgcgtgacacccactagatgtcaagagagcagctggatatgtaaagtagatttggaggaaagatctaggatggagctgcagatctggtagttgtcctaatacaggcaatatttaaaatcatagaaataaatgacacttcagggtaaatgcatcagaagatgacctaggccccatcctgaggaactcaacacttagagactggatagaaaagaaaaatcaggcaatgaaatagggaaaaaaaatcctaccaccatgtttcaaaaagaaaggagtggccagtccaacaaatgctgacttatgtcccttggatttggtagaatggagatcactgctgatcaagacaagaaacatttaagtgtcgtggacgccagactgagctgggctgaggagtaaaaatgaagcgcaaatatggagcagacagcttaacacaggtctagacagggctgtcaaacatggaagaaacactaatcgctaacaggatagagcatggcaatagcttgaaattggtttgaaaatccaagataaaaaattcctctgacatcgtgatccagacctctcaaacacacaagcatgctcgcaataactgcaataaaagcaataatgctttctagtctattccactacgttagagaaacggctggtcaccacccactcaatcattcacggctcgctgacgggtagaaacctgcaatgacaggtccacgctaatccaacaagggatgatttggggaggcagagatggagtttgaaaagaagcagggagcccgaggacctgcgcggccagagcgccagatagccataggcgtggagacggtggggcgcccacagccccgggcccggagcccccgccccgcagccccacccgccggcccaccccgcgtcactcccccgccgcccttacctcctccagatactcgcccagctgggccgccacgtccacctcccagttcttggtgaggtcgcggatgggctgcaagaggtgggcgaagcgcgcctccacgtcctccatgtccgggagggaacgggcggcaaagggaccgcagggctgccttccgaggggtacggcgtcctcagcccgccactagttctggcgccattttgctgttcccgcccaggaaaatgcgtagcgcggcgtcgcgcgcatgtctatgacgtaacgtgggcaaaagccagagaggcgaaccccggcgccgcgcagcgggagctcaccggaagagtcgcggggcggggtckaacctccgggaggggggggtgggcggarctttgggctgccaccagtttggacgggagggcttttggggccgccstgggtckggcggggcggggtggggcggggcctggagctgccgcgggcgarcgggccgaggaggcggggcttgggggctgccacgggttgggggggcggggcggtgargaagcggggcctggggcagccgcgggcgggcggacgggccgaggaggcggggcttggggctgccacgggttgggcgggcggggcggtgaggaggcggggcctgggactgccgcgggcgggcgggcgggccgaggaggcggggcttggggctgccacggattgggcgggcggggcggtgaggaggcggggcctggggctgccgcgggcgggcggacgcggagggcgggccctgctctagcgggccgcgtagcggacatggcggctcccgctcccgcggcagtyttcctccagggcgtggcggccgtcttcatgtttgctttcgcttccctctacacgcaaatcccaggtgaaggcacccagggtgggacacccccagcctcggcgcgggaccctatgtcctcttttctctgtgcccggcactcacgcagtccggggttgggagtgagggccaggccttggcgtggggtagggggcggcggttcgtgtcctgcaggccgctgtgggggtaggaaggtgtgcggtgatccatttcccgtaaggctctggactctgacctggggtgggggacagaactctgagagaggtgggagagaggcttcctcccagacctggtgggacaggtaggagatcgggctgagacctggaagagggcagtgggctctgctgggtgggaggccctgactcaggtagttgagcaggcctctagccctgggacggggttttgacaggtcccgacctgggggacgggctctggagggactgcagactctgacctagggatggaggtatccgcatgctctgacctaggctgggggatctgcaggccctgactcagaggtagtctagtctgcaagggctgtccagggcctggccatgacatgccctcccacaggcctgtatggccccgagggcatcctacctgcaaggaggacgctgcggcctcagggcaaggggcgctggcagcagctgtgggagaccccgacgctgctgtgggaagcgccgagactggggctggacacggcccagggcctggagctgctgagcctgctgggtgcactagtggccctgggagccctgctgctgagcccactgcgccaccctgtcatctacttgctgctttgggccgcctacctgtcagcctgccaggcaagtgggacctgtgaccagctcactctatctccaacccccaccacccacccctgcctctaccttacctgagtccacagacacacccgctccctgacagcccctctctccgcaggtgggccaggtgttcctttatttccagtggtgagtgacggctgggcctggggctgtgggaggctgggtagggggtgggggagggctctgcccttcctgggaggactttccgagggaagcagctgtgtggggaggggctcttggtgctatttgctctccccatagggactccctgctgctagagactggcttcctggccgtgctggtggccccgctgaggccagcctcccaccgcaaggaggccccccagggcaggcaggcaggggccctgccccacgaagacctccccttctggctggtgcgatggctgctgttccgcctcatgttcgcctcaggcgtggtcaagctgaccagccgctgccctgcgtggtgggggctcactggtgaggggcccggtctggacctggggtagtctgggggctcggccagccctgactcctgccctcgcctgcagccctcacctaccactacgagacccagtgcctgcccacgcccgccgcctggttcgcacaccacctgccggtctggctgcacaagctcagcgtggtggccaccttcctaattgagatcgctgtgccgcccctgttcttcgcccccattcgacgcctgcgcttggctgctttctactcgcaggtgggtgagggccgcagctgtcagagagaggcagacagggctcggccttcagcgctgctcagcgtgccctgttggggacagcgtggctcccggggacagctggcaaccgctgttgggaaggccttgtagcagagggatgcaccctgcagggtggaggtgggtgcctgccacggggccaggcgtcagtctccgggagcactgagagcgggccgcccccaggtgctgctgcaggtcctgattatcatcaccggcaactacaacttcttcaacctgatgacgctggtgcttaccactgcgctgctggacgaccagcacctggctgctgagcctggccacggcagccgcaagaagacggccacctgtgcgtgtcacttgtccagccccctgccctcccaggggttctcccctccaacacccccacaggactcccactctagctgcaccccagccccctggctggggaccctctgctgacccatgactgtcctgccccacagcctggcccaaggccctgctggccaccctgtcgctgctgctggaactagccgtctacgggcttctggcctatggcactgtgcactactttggcctggaggttgactggcagcagcgcaccatccactccagaaccagtgagtgccgacctgggggggccagagggcaggggcggaccagtcctcacacccccctcctccaccagctttcaccttccaccagttttctcagtggctgaagacactgacgctgcccactgtgtggctgggtgtggcctccctggtctgggagctgctgagtgccctgtggaggtacatggcccaggaagcagggagggggcacaggtgtgcagggccggcctgacgaccttgggtccttgcccacaggtggacccaggtgcggggctggctacggaagctcagtgctgtagtccaactgtcccttgtgggcactgcgaccgtggccttgttcctgattagcctggtgggtagcgctgcagggctgggggatgggctgggggcagggcagccctgagaacctcccacctgtctccaggtgccgtactcctacgtggagcccgggacccacgggcgcctctggaccggggcccaccgcctgtttggtgccgtggagcacctacagctggccaactcctacggcctcttccgccgcatgactgggcttggtggacggcctgaggtggtgctggagggcagttacgacggccaccactggacggtgagccctcccagggcgggcagggtggtggggcccaggtcagcgggcccagctgacctcggcctgcctggcaggagatcgagttcatgtacaagcctgggaacctgagccggccgcccccggttgtggtgccccaccagccacgcctggactggcagatgtggtttgcagccctgggcccacacacgcacagcccgtggttcacaagcctggtcttgcgcctgctgcagggcaaggagccaggtgcggagcgggcttggggggtgtggagtgggctggggtggagcggggtggggaggggaggggcagggcgggtactgtgggggccacgctgatgcctctcgctgcagtgatccgccttgtccagagccaagtggccaggtatcccttccacaagcagccgcccacctacgtccgagcccagcgctacaagtactggttctcccagcctggggagcaggggtaaggctgggcaccgggtggggtgtggagcccggggtgcaggggtaaggccgggcaccgggggtgtggagcccggggtgcaggggtaaggccgggcaccgggggggggtgtggagcccggggtgcaggggtaaggccgggcactggggggggtgtggagcccggggtgcaggggtaaggccgggcaccggggtggggtgtggagcctggggtgcaggggtaaggccgggcactggggggggtgtggagcccggggngcagggntaaggccgggcaccgggtggggtgtggagcccggggtgcaggggtaaggccgggcaccagggggggatgtggagcgtgaggagctgaggagcaggggtaaggctgggcactggcgatggggtatggagcccggggtgcctccagcttctgaacatcgggtyctgctgcagccagtggtggcggcgccagtgggtggaggagttcttcccatccgtgtccctgggggaccccacgctggagacgctgctcaggcagtttggactacaggtaagggggtgtcagccaggctgggggaggtggcaggggtgaccccagcctcccggggtaaacccagtaagcacttccccaacctccctccctccctccctcccacaggagaaaagcccacctcgcacccgcagcgccaacagcaccctggcccaggccctccactggactcgctctcagctgtctcccctggaggcccccgccctgctctgggggctcctcatggccgtgggggctgtcagatttgtgcaagccctgctagcaccctgttctctccggtcctccccgctggcaccagtcagcggggagaagcgcaggccagcctcccagaaagactccggagctgcctccgaacaggccaccgcagcccccaacccctgctccagtagttcgaggaccacccggcgaaagaagtagctgtgttctcccagctgcacgtcctgagagggccaggtcgccgggagtgctctggcctccggcaggacaggacccagccactgtgccttagctgaccctgcagggccaggcacaggttggggggctgcccctggggtttgcagggtgctgcattgagggctccaggccccacccccacgccagccatgcccctccccaggactcccactattgcctctgtgattggcccaggaggaaaacacgaccaagctcaagacccttcccctgccctgggctgtgggggtctgagtctagagcccccaaccctaggccccgtgccagaggggaagaggctgactcccaggggaagaggggaagcactgtcatcttccacgtcatcttcacaccagcccatcctgccctttagatctgggcaccaataaaggcgtcttttgtgcttggctgtgtgcctggtgctgctttcccaggaggcatgaggatgggattgtctcccctgccccaggcagtgggccgcccagagcacagtcaggctccgccacggcgtggctccctgggcaccctcctgccccgtcctcagcattctctctgaagaggcctggcttggtgttgcccactgcctgatcacagaggagcctcaggcctggcacagcccggtggacctgtcagctccacactccaaggtcggtggtggagccggtccctcacttccctcctgctcccacttcttggcctcaggaaaggacggaagggccagagtgggcaaggggagaaggagagatgaggtgggcaggttagaagaggctcctctgcagagtgaggccagggggagggtagctggaggccctgggttgggacggaggagggaaggtgcatctgatgcccctggcctccatcctgggaagagaacagcagcagagacagcagtcagggcaccgtccaggtttccatttggggtcaggttatcaatcagaggtcactgcccaccctggaaactcacagcacagcttcctctgcctctggcccgtcctcttggtacagcccctgcctcctggtctcctgccagacccctgggcagctcccaatgtacccagctccctcatgtcactgacctccatctggcccacccaggcagagccctgtgctcaaacacagcctgtggcgtgaactctcagatgtcttcaaggggctcctatacatggaataaacaatcgagaagtcagccttggcttaataataggctgggcgctgtggctcatggctgtaatcccagcactttgagtggccgaggtgggtggatcacctgaggtcaggagttcgagaccagcctggccaacatggtgaaacccaatctctactaaaaatacaaaaattagctgggcatggtgtcgggtgcctgtaatgccagctactccacaggctgaggcaggaaaatcgcttgaacctgggaggcagaggttgcagggagccgagatcatgccactgcacttcagcctagacaacagagtgagactccatctcaaaaaaaaaaagtaatatgtttaaaactaaaaaacctgttcctaggcttcttggctttctagacagggtctcactctgttgcccaggctggagcacagtggtgcagttgtggctcactgcagtctcagactcctgagctcaaatgattctcctgcctcaggctgccatcaccacccacactccccttgttgcccaggctgatgttcctgagtttttttttttttgagacggagtctcgctctgtcacccagtctgaagtgcagtggcaggatctcggctcactgcaagctccacttcccgggttcgcgccattctcctgcctcagcctctctgagtagctgggactacaggcgcccgccaccacacctggctaattttttgtattttttttttagtagagacggggtttcaccatgttagccaggatggtctcgatctcctgacctcgtgatccgcctgcctcggcctcccaaagtgctgggattacaggtgtgagccaccgcgcccggcctgatgttcctaagctttcaagctcacttgatgaatgcgttctgtgttttgttttgtgtagcagctctcttggtaagccacgtgctacacaattcacccgttcaagtgcgcaattcagtggctttcagtttattcacagagttgcacgtctatcaccagagtccatttatttacttatttagagatggagtctcactctgtcacccaggctggagtgcagtggcacaatctcggctcactgcaacctccacctcctgggttcaagcgattctcctgcctcaaccttgcaagtagctgggattacaggcgtgcaccaccacaccgggctaatttttgtagtttattagtagagatgggttttcactatgttggccaggctggtctcgaactcctgacctcaggagatctgcccacttcggcctcccaaagtgctgggattataggcatgagccacggcgcctggcccggaggccattttagaacctttcatctccagaagaaaccccaaaccctttagcctttgccctctgacccctccctgccaagccctaagcaactattcatctaccttctgtctctgtggatttacctactctggatatttcctgtaaattggatcagtaacatgggacctttgtgtctggcttctttcactcagcacggtgttttcaaggccacacccacgtcatagcacgtatgagcgctgtgttcctttagggctgagtcagtccagtgtacggaggggccacgttttccctgtccctattcattcgtatatcgatagacgcttgcgtggcttccgcctttcctatgtgaatagtgctgctgtgaacattggatatg

SEQ ID NO: 62137 - DNA, 607 bp, Homo Sapiens
  misc_feature (147)..(148): n is a, c, g, or t
  misc_feature (482)..(482): n is a, c, g, or t
  misc_feature (521)..(521): n is a, c, g, or t
  misc_feature (596)..(596): n is a, c, g, or t
ttttgttagtctctcaatactttactggccatatcccccgatacccccacagcaatttcaccaacacagagcaactgccctcagccactctgatgtgatggagccaatccaggtgtcctagaaatatcctagaaatgcagagatggnngaaatcacagaaccctgggaaatgccataagaacctgggctctggaaagtgccatccacctcccctctggtcaggctggcggcactgacaaggcatccacagggcagccatgctatggcccagacctccggatatgcaggaaccggggcctcccacagaagtcccttgcgcacagccacaagattaaggtacaggtcaggccggctctgaagccagctgctgacaagctccgggtgccttgggtccacttctaagaagatactaccagagtctttcaggagccggggtgccaaggccagaatgtgggtaatgatgtccatgccctcctccccancatccagggccgcggggtcttcatagctgcggatctcanggggccagctgctccatgtcctggtggaagacgtagggaagggttgctgacaatcaggtccatggggccccaggnaaggtgtttca

SEQ ID NO: 62138 - DNA, 3233 bp, Homo Sapiens
tgcgactgagtcggtggcgaagacgggaacgcgacgatggcggagactctgcccgggtcgggcgactcgggccctggcacggcttctctcggcccgggcgttgcggagactgggacgaggcggctcagcgagctgcgggtgatcgatctgcgggcggagctgaagaagcggaacctggacacgggcggcaacaagagcgtcctgatggagcggctcaagaaggcggttaaagaagaggggcaagatcctgatgaaattggcatcgagttagaagccaccagcaagaagtcagccaagagatgtgttaaaggactgaagatggaggaggaaggcacagaagataatggcctggaagacgattccagagacgggcaggaggacatggaagcaagtctggagaacctgcagaatatgggcatgatggacatgagtgtgctagacgaaactgaagtggcgaatagcagtgctccagattttggggaggatggcacggacggccttctcgattccttttgtgatagtaaagaatacgtggctgcacagctgagacagctcccggctcagcccccagagcatgctgtggatggggaaggatttaagaacactttggaaacttcatcgttgaacttcaaagtaactccggacattgaagaatcccttttggagccagaaaatgagaaaatactcgacattttgggggaaacttgtaaatctgagccagtaaaagaagaaagttccgagctggagcagccatttgcacaggacacaagtagcgtggggccagacagaaagcttgcggaggaagaggacctatttgacagcgcccatccggaagagggtgatttagatttggccagcgagtcaacagcacacgctcagtcgagcaaggcagacagcctgttagcggtagtgaaaagggagcccgcggagcagccaggcgatggcgagaggacggactgtgagcctgtagggctagagccggcagttgagcagagtagtgcggcctccgagctcgcggaggcctctagcgaggagctcgcagaagcacccacggaagccccaagcccagaagccagagatagcaaagaagacgggaggaagtttgattttgacgcttgtaatgaagtccctccggctcctaaagagtcctcaaccagtgagggcgctgatcagaaaatgagctcttttaaggaagaaaaagatataaagccaatcattaaagatgaaaaaggtcgggtcggcagcggttctggtcggaacctgtgggtcagcgggctgtcctccacaacacgcgctacggatctcaagaaccttttcagcaagtatgggaaggttgtcggggccaaagtggtaacgaacgcccgcagcccgggggctcgatgctatggattcgtcaccatgtcgacatctgacgaggcgaccaagtgcatcagccatctccacagaactgagctgcatggacgaatgatctccgtagagaaggccaaaaatgagcctgctgggaaaaagctttccgacagaaaagagtgcgaagtgaagaaggaaaaattatcgagtgtcgacagacatcattctgtggagatcaaaattgaaaaaactgtaattaagaaggaagagaagattgagaagaaggaggaaaaaaagcctgaagacattaagaaggaagaaaaagaccaggatgagctgaaacccggacctacaaatcggtctagagtcaccaaatcaggaagcagaggaatggagcggacggtcgtgatggataaatcgaaaggagagcccgtcattagcgtgaaaaccacaagcaggtccaaagagagaagctccaagagtcaggatcgcaagtcagaaagcaaagaaaagagagacatcttgtcgtttgataaaatcaaagaacaaagggagagagagcgccagaggcagcgggaacgggagatccgcgaaacggagaggcggcgggagcgcgagcagcgggagcgggagcaacgcctcgaggccttccatgagcggaaggagaaggcccggctacagcgggaacgcctgcagctcgagtgccagcgccagcggctggagcgggagcgcatggagcgggagcggctggagcgcgagcgcatgcgcgtggagcgtgagcgcaggaaggagcaggagcgcatccaccgcgagcgcgaggagctgcggcgccagcaggagcagctgcgttacgagcaggagcggcggcccgggcggaggccctacgacctggaccgacgagatgatgcctattggccagaaggaaagcgtgtggcaatggaggaccgatatcgtgcagactttccccggccagaccaccgctttcacgacttcgatcatcgagaccggggccagtaccaggaccacgccatcgacaggcgggagggttcgaggccaatgatgggagaccaccgggatgggcagcactatggagatgaccgccatggccacggaggacccccagagcgccacggccgggactcccgtgatggctgggggggctacggctccgacaagaggctgagtgaaggccgggggctgccccctccccccaggggtggccgtgactggggagagcacaaccagcggctagaggagcaccaggcacgcgcctggcagggtgccatggacgcaggcgcggctagccgggagcacgccaggtggcaaggtggcgagaggggcctgtctgggccctcggggccggggcacatggcaagccgcggtggagtggcggggcgaggcggctttgcacaaggtggacattcccagggccacgtggtgccaggtggcggactggaaggtggcggagtggccagccaggaccggggcagcagagtccctcacccacaccctcatccccccccgtacccccacttcacccgccgctactaagtcccactcgctgtgagttttcgggtgggcagacgcactgttgaatctggtagccagggttccctcgaacttgggggatctttttaaaagcaaagtaaatcctgccaccatgttgtagctcaatacaatgtgaactcacttttttttttttttttaataaatgtgttcttgttctgccatttttaaatcaaggtttctgttaacgaggcattccattttccattaataaagtttaccattcgcaaaaaaaaaatgtgttcttgttctgccatttttaaatcaaggtttctgttaacgaggcattccattttccattaataaagtttaccattcgc

SEQ ID NO: 62139 - DNA, 6060 bp, Homo Sapiens
atctcactgaggaccaacctttcgacattcttcagaaatccttgcaagaggccaatatcactgaacagacattggcagaagaggcatatttggatgccagtataggttcaagccaacagtttgcacaagctcagcttcatccttcttcatcagcatcctttactcaggcttctaatgtttctaattactcaggtcagacgctgcagcctataggggtgacgcatgtgcctgttggagcatcgtttgcaagcaatacagtgggtgtacaacatggctttatgcaacatgtggggatcagtgttcccagccagcatttgtctaatagcagtcagattagtggttctggtcaaatacagttaattgggtcatttggtaatcatccttccatgatgactattaataacctagatggatctcaaatcatattaaagggcagcgggcagcaagccccatcaaatgtgagtggagggctcctggttcatagacagactcctaatggcaactccttgtttgggaactctagttccagtccagtagcacagcctgttaccgttccatttaacagcacaaattttcaaacatctttacctgtgcataacatcatcatacaaaggggtcttgcaccaaattcaaataaagtcccaattaatatacagccaaagcctatccagatgggtcagcaaaatacatacaatgtgaacaatttgggaattcagcagcaccacgtacaacaagggatctcttttgcttctgcaagctcaccccagggctcagtagttggtccacacatgtctgtgaacattgtaaaccaacagaacacaagaaagccagtcacctcacaggcagtgagcagcactgggggcagtattgttattcattcccccatgggccaacctcacgcaccccaaagtcagttccttatacctacaagcctttctgtcagttccaactcggtacaccacgtccagactataaatgggcaacttcttcaaactcaaccctctcagctcatttctggccaagtggcctcagagcatgtcatgttgaacagaaactcttccaacatgctcaggaccaaccaaccatatactggaccgatgcttaacaaccagaatactgctgtccacttagtgtctgggcagacatttgctgcctctggaagtccagtgatagccaatcatgcctctcctcagcttgtgggtggacagatgcccttgcagcaggcatccccaactgtattacacctgtcacctgggcagagcagcgtttcccaaggaagacctggcttcgccaccatgccatcggtgacaagcatgtcaggacctagtcggttccctgctgtcagctcagccagcactgcccatcctagtcttgggtctgcagttcagtctggttcatcaggatcaaactttacaggagatcagctgacccagccaaacaggactccagtaccagtcagtgtgtctcatcgtcttccagtttcttcttccaagtctaccagcaccttcagtaacacacctggaacaggaacccagcaacaattcttctgccaggctcagaaaaaatgtctgaatcagacttcccccatttctgctcccaagaccacagacggcctgaggcaagcacagatccctgggctcttgagcaccacactgccagggcaggattctggaagcaaagttatatccgcatccttaggaaccgcacaaccacagcaggaaaaagtagttggatcatctcctggccatccagctgtgcaggtggagagtcattcgggaggacaaaaaaggcctgctgcgaaacagctaacgaaaggagctttcattctccagcagttgcagagggaccaagcccacactgtgacaccagacaaaagtcacttccgatcactaagtgatgcggtacagagactgctctcctaccacgtgtgccagggctccatgcccactgaagaagacttgagaaaagtggacaatgaatttgagacagttgccactcagctcctaaaaaggacccaagctatgcttaacaaatacagatgcctgctcctagaagatgccatgcgaatcaatccctctgctgagatggtgatgatcgataggatgttcaaccaggaggaaagagcttccctgtcccgagacaagcgtttggcacttgtagaccctgagggttttcaggctgatttctgttgttccttcaaacttgataaagctgctcatgagacacagtttggccggagtgaccagcatggcagtaaagcaagcagctctctgcaaccgccagccaaggcccaaggcagagaccgagccaaaaccggtgtgacggaacccatgaatcatgaccagtttcatctagtgcctaatcacatcgtggtctctgcagaaggaaacatttctaaaaaaacagaatgccttggcagagcactgaaatttgacaaagtgggcttagtgcagtaccagagcacgtctgaagagaaggccagccggagagagcctctgaaggccagtcagtgctctcccggccctgaggggcaccggaaaacctcatccagatcggatcatggtactgagagcaaactgtcaagcatcctagcagattcgcacttggagatgacgtgtaacaattccttccaggacaaaagtctgaggaattctccaaagaatgaagttttacacacagacatcatgaaagggtcaggcgaaccccagccagatctccagctgacaaagagcttggaaaccacatttaagaacatcttggaactcaaaaaggcgggacggcagccccagagtgaccccacggttagcggctctgttgagttagatttccccaacttttctcctatggcttcacaggaaaactgcctggaaaagttcatcccggaccacagtgaaggtgttgtagaaactgactccattttagaagcagctgtaaatagtatcctagagtgttaatagcagcagtcctccccctaccccgccccgagaccccaccccgagaccccaccccggaccagttacattcgttcctggcaaaagcaaatggaaatggtctcctgtctccagcctgcttgatctttcatcacaggttattctttctaatctcaatcctgttctttgtttaagagcaatacttgtcgtgattacagggagatcctttagtaaaattaatccttggcagaaagcagtctgataggccccactcatttcaagtgttatgaaagtgcttataggcattttgtttatttgttttgttttttaaaaacactgtaactcaatgagaccacagtatacttggcccttggtaaaattttgacaatcataagtcatttgaaaagaacagacttactaaaatcaaacgagacggatagaagctactttttaaagaatatcccactgcatctgcaaatttagttttgggtttttttattattattattttgagtttttttgtgtgtgttttgttgttattgttgaggggaagaccacatggttcttccccctcagccatctttgagcagtaaattgctggctgtgctgccagggacccgcagccctggtggaaaagccagtagcacatacgcagggcattgcagggcttccctattgatggttcaagtgcttttctgatgcttccggagcaaaacctcatgcttttaggcatatctatgttgaatttcacctagggaatgttctgttcttagttacagcagcaaaatttgaaataatttcaccaggctaaataaaggaaaatggaaaccagttaagaggcacagtgtacagaggaggccgggatagagccatgagggttataatattaatatgtatatatgtaaaagcatatatatgttaactattgagaaaaaacaagttttgcattttataattggatatagtcaacatataatgtatgtttttgtttgttgctggattttgtttcatttaacctctctttgcaccctctcccacaacaaataccaagcatcaaaagcactttcatttgaaaattattatgttgtaatttttcagtttaaactttaaggagactctggccttgtttatgcttcttgtctgagaacagtagtgacccctggcagcaattcattaccaaaacacagacaaaccaaaggtaaccagctagcccaccactgaaaggaaagatctgagacatgggattcccatttgagagccaaaggatatgccctgtcatggtttctgtttggcctgtgttcatattagtgagcatggcttactgcttttttttttttttttttttgtcagggagtattctccgttttcctttctcgtatacctgccccaggttatcccatttctgttgttacctttattcttaatgtcattgtaaccatcacttatctcctctcattgggaaagctacatgatagtatttttatgcactcttctcccacacatacacacacgtgcatgtatctgagctgctcggatccagaggtcatttttgttacagtgtgtgcacactcactctccttcttagtgtgcatactctctcatttattctgtttatctccctggctctggaggtgcagccactggtcttcactttaatgtgttgccagaatctgcttctggctgtcgccaacatggggatgacccccattgtcatcatgttgggcatttcttttccagattggcctgtgatggaaaggaaggcttctaattagaaaacacagcaacagaagacctataccccggtgcccctgtgtcccactacacacagaaaaccctgtgagatggccagtcttcataatagcaacgtaccttcaccccagccacatgccccagccaatacaaattggaaaatctggcccattttagggttaccattttttccttatttgtgccaatgtccaagttgcagatttcccctttttcctgtattgtaacatattagataagttggtgtcgccagttggtactttctgtttgggtagtcctagggtaacaccctgccctaaactccatgatttcataggcttttcttcccttggggctcatgctcccctaattcctagcaagatgatccttcctaatcaaattcttctcattgcagaactttatccctggaagccttcatgtgggctgctagtgagttacattaattactgcaaatcagtggaattctcaagagacaagataagcttcatgtacatttgtcacctctctttcttccctatcctgccctgctgtcccaatcctagcttttctatataccatcttaaagggtttttaagccctaacacttgtctagcaaatggagagcctaatttaccaaaatgaaacttgtaaatttttgtgtcattgtatgtaagtttactttttatggaggaaggattctagataatgacaaatgaagattatgacatgtatttcactcctgtgattaggttctacgcacatgggtcataactcgcatgtcgagccccctctagtgaagggtaggagagctcagcctcggatggccaacattcagttgttcaggttcattcgtcaaagttaagttttagaactatttgtactcagtaacaaaaatcattttctttttttttttttttttctgttgtggaaaagcgtgaatttgttattaagcatttgattttctgtgtccttaagtacttcctgaagatgaagcaaaattttaatctggcaattatgaaaaagaaatattttagctctgaaggatttagtagattctgttagattagggaggccttacagactgactttacttaaagaggacgcgtcactcgctgtcagtgtggtgtgggctttatttgcttaaataccttcatttgtatagtacgtctcacttgaaattgctttgtatacattttgtaaaaatatttataaaatgttttgtaaaaaaaaaaaaactataacaaattgcagtttattttgttatgttggataaatactgttaaaagaaaccagtcagtaactatattgttaatccatggttaggaaatgtttagttggagattacaaattgaaacaaccattgcaatacagccaaagatttggg

SEQ ID NO: 62140 - DNA, 1670 bp, Homo Sapiens
ggcgggagggccgcagctccggcgccgcgccgtcccgccagaacgatcgccgcggccggaagagttggcgctcggggcggactccttggaactggcttagcgcacccatcccaccttcccgcaccctgggaccggtccaacgagcgctcctccaagcggagccttggagggcacggccggcaccattacctccaacgagtggagctctcccacctcccctgaggggagcaccgcctctgggggcagtcaggcactggacaagcccatcgacaatgacggagagggcgtgtggagcccggatattgagcagagtttccaggaggccctcgccatctacccgccctgtggcaggcgcaaaatcatcctgtcggacgagggcaagatgtatggtcgaaacgagctgattgcccgctacatcaagctccggacagggaagacccgcaccaggaagcaggtctccagccacatccaggtgctggctcgtcgcaaagctcgcgagatccaggccaagctaaaggaccaggcagctaaggacaaggccctgcagagcatggctgccatgtcgtctgcacagatcatctccgccacggccttccacagtagcatgcgcctcgcccggggccccggccgcccagcagtctcagggttttggcaaggagctttgccaggccaagccgaaacgtcccatgatgtgaagcctttctctcagcaaacctatgctgtccagcctccgctgcctctgccagggtttgagtctcctgcagggcccgccccatcgccctctgcgcccccggcacccccatggcagggccgcaggcgtggcagctccaagctctggatgttggagttctctgccttcctggagcagcagcaggacccggacacgtacaacaagcacctgttcgtgcacattggccagtccagcccaagctacctgcgcccctacctcgaagccgtggacatccgccaaatctatgacaaattcccggagaaaaagggtggactcaaggatctcttcgaacggggaccctccaatgccttttttcttgtgaagttctgggcagacctcaacaccaacatcgaggatgaaggcagctccttctatggggtctccagccagtatgagagccccgagaacatgatcatcacctgctccacgaaggtctgctctttcggcaagcaggtggtggagaaagttgagacagagtatgctcgctatgagaatggacactactcttaccgcatccaccggtccccgctctgtgagtacatgatcaacttcatccacaagctcaagcacctccctgagaagtacatgatgaacagcgtgctggagaacttcaccatcctgcaggtggtcaccaacagagacacacaggagaccttgctgtgcattgcctatgtctttgaggtgtcagccagtgagcacggggctcagcaccacatctacaggctggtgaaagaatgagagactcggggagcagggaggggggaagagacgtgtgtgcaggaaacggggacgtggggaggggacctgcaggggccagccccctgaagtgccaagagagctgagaggagcagttgtgactctacccaggaacaaactgtgcctgaacctgaggtgcccaaccccaaataaacccaagatgctgtgtattttcagaggaaaa

SEQ ID NO: 62141 - DNA, 519 bp, Homo Sapiens
tgatctttaaaaaagcaaaacaaaaaacacgacttttccagcgctcagcgctttttcctttcgtccgaagccgctttctgatttgacttttctcgccggccggtctcaggccgcacagacgttccagaggaggagggtgacatttttactccctttttggggctaaccatttatgcttttgtacatcaaccgtgcgcggccggaggggggcaggggggcgggggcgaggggcgttccaatcaaatttctaactttctgttaattattaatcccctttttactgcggtttctgttgtcatttttaaaatttttttaattttttttttttttttacttttactttttacctcttgtgtatatgtagggaatttatagggaaatatgtactttatggaataaattttaagaactaaaatatattytattttaaataaagtaatggacctttaatcttacacagctaaattactgattatatatttgctgagctgatttaaggggtaaaaaattgtatcagag

SEQ ID NO: 62142 - DNA, 525 bp, Homo Sapiens
  misc_feature (471)..(471): n is a, c, g, or t
  misc_feature (496)..(496): n is a, c, g, or t
  misc_feature (522)..(522): n is a, c, g, or t
ttttttcagaatccaaaaggactttattttctggcactgggaggcgccctgaggccacagccttttcccagggctgctggcagggtcccagggctgctggcaggggttgtggtcctgttgagcagaggagcgacgccgctgccctggcccccgctgtccctatgatcctgcactctggggtgggagctacatatcatccttggacaccaggcagtagaagtctgtgcgggcactgtagtttcgcgagccgagatccgagacgtccacttcgctgctccggctctctcccagcgagaccccactggtgtgcggtggagctgatggctctccaaagacaggcccccggacacccaggtcgccctcagggtccgggtccacctctgagtccagggcccggcctcagggactcggcctcgaagaatcagcatggggtccttgtcgtcctgcagtggtctgggggtctccttccanaggcctgtactgaacttccgggcanccagtaactttctttccaaaatcgangaa

SEQ ID NO: 62143 - DNA, 2912 bp, Homo Sapiens
gcagacacacacggacacacagagacaccagacacacatatacacatgcacacacagatgcacacacatgcacacacatgcacagagacacacagatgcacacacacacgatatgcagaaaaaaatatgcactaactaacatccaggcggccatgggcctctcggatccagctgcacagcccctgctgggaaatggctctgccaacatcaagctggtgaaaaatggggagaaccagctccgtaaggctgcagagcaagggcagcaggaccccaacaaaaacctgagccccactgcagtcatcaacataacttctgagaagttagagggtaaagagccccacccacaggattcctcgagctgtgagattttaccctcccagcccaggagaactaagagcttcctaaattactatgcagatctggaaacctcagccagagaactagagcagaaccgaggcaatcaccatgggactgcggaagagaaatcccagccagtccagggccaggcctccaccatcattgggaatggcgatttgctgctgcagaaaccaaacagaccccagtccagccctgaagacggccaagtagccacagtgtcatccagcccagaaaccaagaaggatcatccgaaaacaggggccaaaaccgactgtgcactgcaccggatccagaacctggcaccgagcgatgaggagtccagctggacaacgttgtcccaagacagtgcctcacccagctccccggatgaaacagatatatggagtgatcactcatttcagactgatccagatttgccgcctggctggaaaagagtcagtgacattgccgggacctattattggcacatcccaacaggaacgactcagtgggaacggcccgtctccatcccagcagatctccagggttctaggaaagggtcacttagttctgtaacgccatctcccaccccagagaacgagaaacagccatggagtgattttgctgttctgaatgggggaaagattaatagtgacatttggaaggatttgcatgcagccactgttaacccggaccccagtttaaaagagtttgaaggagcaaccctacgctatgcatctttgaaactcagaaatgccccacaccctgatgatgatgattcttgtagtatcaacagtgacccagaagccaagtgttttgctgtgcgttctctgggatgggtagagatggcagaagaggacctcgcccccggtaaaagtagtgttgcggtcaacaactgcatcaggcaactttcctactgcaaaaatgacatccgagacacagtcgggatttggggagaggggaaagacatgtacctgatcctggagaatgacatgctcagcctggtggaccccatggaccgcagcgtctggcactcgcagcccatcgtcagcatccgcgtgtggggcgtgggccgcgacaatggccgggattttgcttatgtagcaagagataaagatacaagaattttgaaatgtcatgtatttcgatgtgacacaccagcaaaagccattgccacaagtctccacgagatctgctccaagattatggctgaacggaagaatgccaaagcgctggcctgcagctccttacaggaaagggccaatgtgaacctcgatgtccctttgcaagtagattttccaacaccaaagactgagctggtccagaagttccacgtgcagtacttgggcatgttacctgtagacaaaccagtcggaatggatattttgaacagtgccatagaaaatcttatgacctcatccaacaaggaggactggctgtcagtgaacatgaacgtggctgatgccactgtgactgtcatcagtgaaaagaatgaagaggaagtcttagtggaatgtcgtgtgcgattcctgtccttcatgggtgttgggaaggacgtccacacatttgccttcatcatggacacggggaaccagcgctttgagtgccacgttttctggtgcgagcctaatgctggtaacgtgtctgaagcggtgcaggccgcctgcatgttacgatatcagaagtgcttggtagccaggccgccttctcagaaagttcgaccacctccaccgccagcagattcagtaaccagaagagtcacaaccaatgtaaaacgaggggtcttatccctcattgacactttgaaacagaaacgccctgtcaccgaaatgccatagctgcacatgcaaaaggactcggctatttacctgaagattgactagctacactaaagaaaatgaactccgccatccgaccttccatccagttgctgatgctttgtcttcagagaatttacccttaaccaagcagtgttagacaagcatgttctctcgtcttgccaccatcatgtgatatgaaaagaagcatgaataattttttttgctgtaagttacatcatgcgcagtggaaggtctttttcttattgtaaatattgtgaacattacttaacttcacacacacacagagaagagtctggccccacccctcctagtgaactaacgctgcgtccttggaatgaatgatgcgtgagttagtttcactgtcttcttggctggacctgtcacaagcaacctttaagtcctacagcactttgccctgttttcaacattggagtaggcactgcatagcagataccattgaattgctgtaaaaataggatggcgagtttgtgttttaatttttcataaaattgaacctgttggttgacaaaattggctgttggcatcagtatagaaaccaactggcagctttccctgacaagctctttgacacatggacaccatttcatgtctacagctgtttgtgggatgttggaaaaaaatgaaacttcaaaattgatgaaaaactaaattcgaggaattaaaatcgaacaaaacataaaaaaaaaaaaaaaa

SEQ ID NO: 62144 - DNA, 6777 bp, Homo Sapiens
ctgcgaccggtctgccacttgccaggtgaccgctgatgggaagaccagctgtgtgtgcagggaaagcgaggtgggggatgggcgtgcctgctacggacacctgctccacgaggtgcagaaggccacgcagacaggccgggtgttcctgcagctgagggtcgccgtggccatgatggaccagggctgccgggaaatccttaccacagcgggccctttcaccgtgctggtgccatccgtctcctccttctcctccaggaccatgaatgcatcccttgcccagcagctctgtagacagcacatcatcgcagggcagcacatcctggaggacacaaggacccaacaaacacgaaggtggtggacgctggccgggcaggagatcaccgtcacctttaaccaattcacgaaatactcctacaagtacaaagaccagccccagcagacgttcaacatctacaaggccaacaacatagcagctaatggcgtcttccacgtggtcactggcctgcggtggcaggccccctctgggacccctggggatcccaagagaactatcggacagatcctcgcctctaccgaggccttcagccgctttgaaaccatcctggagaactgtgggctgccctccatcctggacggacctgggcccttcacagtctttgccccaagcaatgaggctgtggacagcttgcgtgacggccgcctgatctacctcttcacagcgggtctctctaaactgcaggagttggtgcggtaccacatctacaaccacggccagctgaccgttgagaagctcatctccaagggtcggatcctcaccatggcgaaccaggtcctggctgtgaacatttctgaggaggggcgcatcctgctgggacccgagggggtcccgctgcagagggtagacgtgatggccgccaatggcgtgatccacatgctggacggcatcctgctgcccccgaccatcctgcccatcctgcccaagcactgcagcgaggagcagcacaagattgtggcgggctcctgtgtggactgccaagccctgaacaccagcacgtgtccccccaacagtgtgaagctggacatcttccccaaggagtgtgtctacatccatgacccaacggggctcaatgtgctaaagaagggctgtgccagctactgcaaccaaaccatcatggaacaaggctgctgcaaaggttttttcgggcctgactgcacgcagtgtcctgggggcttctccaacccctgctatggcaaaggcaattgcagtgatgggatccagggcaatggggcctgcctctgcttcccagactacaagggcatcgcctgccacatctgctcgaacccaaacaagcatggagagcaatgccaggaagactgcggctgtgtccatggtctctgcgacaaccgcccaggcagtgggggggtgtgccagcagggcacgtgtgcccctggcttcagtggccggttctgcaacgagtccatgggggactgtgggcccacagggctggcccagcactgccacctgcatgcccgctgtgttagccaggagggtgttgccagatgtcgctgtcttgatggctttgagggtgatggcttctcctgcacacctagcaacccctgctcccacccggaccgtggaggctgctcagagaatgctgagtgtgtccctgggtccctgggcacccaccactgcacatgccacaaaggctggagtggggatggccgcgtctgtgtggctattgacgagtgtgagctggacgtgagaggtggctgccacaccgatgccctctgcagctatgtgggccccgggcagagccgatgcacctgcaagctgggctttgccggggatggctaccagtgcagccccatcgacccctgccgggcaggcaatggcggctgccacggcctggagctggaggcaaatgcccacttctccatcttctaccaatggcttaagagtgccggcatcacgcttcctgccgaccgccgagtcacagccctggtgccctccgaggctgcagtccgtcagctgagccccgaggaccgagctttctggctgcagccaaggacgctgccgaacctggtcagggcccattttctccagggtgccctcttcgaggaggagctggcccggctgggtgggcaggaagtggccaccctgaaccccaccacacgctgggagattcgcaacattagtgggagggtctgggtgcagaatgccagcgtggatgtggctgacctccttgccaccaacggtgtcctacacatcctcagccaggtcttactgcccccccgaggggatgtgcccggtgggcaggggttgctgcagcagctggacttggtgcctgccttcagcctcttccgggaattgctgcagcaccatgggttggtgccccagattgaggctgccactgcctacaccatctttgtgcccaccaaccgctccctggaggcccagggcaacagcagtcacctggacgcagacacagtgcggcaccatgtggtcctgggggaggccctctccatggaaaccctgcggaagggtggacaccgcaactccctcctgggccctgcccactggatcgtcttctacaaccacagtggccagcctgaggtgaaccatgtgccactggaaggccccatgctggaggcccctggccgctcgctgattggtctgtcgggggtcctgacggtgggctcaagtcgctgcctgcatagccacgctgaggccctgcgggagaaatgtgtaaactgcaccaggagattccgctgcactcagggcttccagctgcaggacacacccaggaagagctgtgtctaccgatctggcttctccttctcccggggctgctcttacacatgtgccaagaagatccaggtgccggactgctgccctggtttctttggcacgctgtgtgagccatgcccagggggtctagggggggtgtgctcaggccatgggcagtgccaggacaggttcctgggcagcggggagtgccactgccacgagggcttccatggaacggcctgtgaggtgtgtgagctgggccgctacgggcccaactgcaccggagtgtgtgactgtgcccatgggctgtgccaggaggggctgcaaggggacggaagctgtgtctgtaacgtgggctggcagggcctccgctgtgaccagaaaatcaccagccctcagtgccctaggaagtgcgaccccaatgccaactgcgtgcaggactcggccggagcctccacctgcgcctgtgctgcgggatactccggcaatggcatcttctgttcagaggtggacccctgcgcccacggccatgggggctgctcccctcatgccaactgtaccaaggtggcacctgggcagcggacatgcacctgccaggatggctacatgggcgacggggagctgtgccaggaaattaacagctgtctcatccaccacgggggctgccacattcacgccgagtgcatccccactggcccccagcaggtctcctgcagctgccgtgagggttacagcggggatggcatccggacctgcgagctcctggacccctgctctaagaacaatggaggatgcagcccatatgccacctgcaaaagcacaggggatggccagaggacatgtacctgcgacacagcccacaccgtgggggacggcctcacctgccgtgcccgagtcggcctggagctcctgagggataagcatgcctcattcttcagcctccgcctcctggaatataaggagctcaagggcgatgggcctttcaccatcttcgtgccgcacgcagatctaatgagcaacctgtcgcaggatgagctggcccggattcgtgcgcatcgccagctggtgtttcgctaccacgtggttggctgtcggcggctgcggagcgaggacctgctggagcaggggtacgccacggccctctcagggcacccactgcgcttcagcgagagggagggcagcatatacctcaatgacttcgcgcgcgtggtgagcagcgaccatgaggccgtgaacggcatcctgcacttcattgaccgtgtcctgctgccccccgaggcgctgcactgggagcctgatgatgctcccatcccgaggagaaatgtcaccgccgccgcccagggcttcggttacaagatcttcagcggcctcctgaaggtggccggcctcctgcccctgcttcgagaggcatcccataggcccttcacaatgctgtggcccacagacgccgcctttcgagctctgcctccggatcgccaggcctggctgtaccatgaggaccaccgtgacaagctagcagccattctgcggggccacatgattcgcaatgtcgaggccttggcatctgacctgcccaacctgggcccacttcgaaccatgcatgggacccccatctctttctcctgcagccgaacgcggcccggtgagctcatggtgggtgaggatgatgctcgcattgtgcagcggcacttgccctttgagggtggcctggcctatggcatcgaccagctgctggagccacctggccttggtgctcgctgtgaccactttgagacccggcccctgcgactgaacacctgcagcatctgtgggctggagccaccctgtcctgaggggtcacaggagcagggcagccctgaggcctgctggcgcttctacccgaagttctggacgtcccctccgctgcactctttgggattacgcagcgtctgggtccaccccagcctttggggtaggccccaaggcctgggcaggggctgccaccgcaattgtgtcaccaccacctggaagcccagctgctgccctggtcactatggcagtgagtgccaagcttgccctggcggccccagcagcccttgtagtgaccgtggcgtgtgcatggacggcatgagtggcagtgggcagtgtctgtgccgttcaggttttgctgggacagcctgtgaactctgtgctcctggtgcctttgggccccattgtcaagcctgccgctgcactgtgcatggccgctgtgatgagggccttgggggctctggctcctgcttctgtgatgaaggctggactgggccacgctgtgaggtgcaactggagctgcagcctgtgtgtaccccaccctgtgcacccgaggctgtgtgccgtgcaggcaacagctgtgagtgcagcctgggctatgaaggggatggccgtgtgtgtacagtggcagacctgtgccaggacgggcatggtggctgcagtgagcacgccaactgtagccaggtaggaacaatggtcacttgtacctgcctgcccgactacgagggtgatggctggagctgccgggcccgcaacccctgcacagatggccaccgcgggggctgcagcgagcacgccaactgcttgagcaccggcctgaacacacggcgctgtgagtgccacgcaggctacgtaggcgatggactgcagtgtctggaggagtcggaaccacctgtggaccgctgcttgggccagccaccgccctgccactcagatgccatgtgcactgacctgcatttccaggagaaacgggctggcgttttccacctccaggccaccagcggcccttatggtctgaacttttcggaggctgaggcggcatgcgaagcacagggagccgtccttgcttcattccctcagctctctgctgcccagcagctgggcttccacctgtgcctcatgggctggctggccaatggctccactgcccaccctgtggttttccctgtggcggactgtggcaatggtcgggtgggcatagtcagcctgggtgcccgcaagaacctctcagaacgctgggatgcctactgcttccgtgtgcaagatgtggcctgccgatgccgaaatggcttcgtgggtgacgggatcagcacgtgcaatgggaagctgctggatgtgctggctgccactgccaacttctccaccttctatgggatgctattgggctatgccaatgccacccagcggggtctcgacttcctggacttcctggatgatgagctcacgtataagacactcttcgtccctgtcaatgaaggctttgtggacaacatgacgctgagtggcccagacttggagctgcatgcctccaacgccaccctcctaagtgccaacgccagccaggggaagttgcttccggcccactcaggcctcagcctcatcatcagtgacgcaggccctgacaacagttcctgggcccctgtggccccagggacagttgtggttagccgtatcattgtgtgggacatcatggccttcaatggcatcatccatgctctggccagccccctcctggcacccccacagcccgcagtgctggcgcctgaagccccacctgtggcggcaggcgtgggggctgtgcttgccgctggagcactgcttggcttggtggccggagctctctacctccgtgcccgaggcaagcccatgggctttggcttctctgccttccaggcggaagatgatgctgatgacgacttctcaccgtggcaagaagggaccaaccccaccctggtctctgtccccaaccctgtctttggcagcgacaccttttgtgaacccttcgatgactcactgctggaggaggacttccctgacacccagaggatcctcacagtcaagtgacgaggctggggctgaaagcagaagcatgcacagggaggagaccacttttattgcttgtctgggtggatggggcaggaggggctgagggcctgtcccagacaataaaggtgccctcagcggatgtgggccatgtcacc

SEQ ID NO: 62145 - DNA, 8924 bp, Homo Sapiens
gagagcgtccccttaggctacctggttctccatgtccaggctatcgacgctgatgctggtgacaatgcccgcctggaataccgccttgctggggtgggacatgacttccccttcaccatcaacaatggcacaggctggatctctgtggctgctgaactggaccgggaggaagttgatttctacagctttggggtagaagctcgagaccatggcactccagcactcactgcctcggccagtgtcagcgtgactgtcctggatgtcaacgacaacaatccaacctttacccaaccagagtacacagtgcggctcaatgaggatgcagctgtgggcaccagcgtggtgacggtgtcagctgtggaccgtgatgctcatagtgtcatcacctaccagatcaccagtggcaatactcgaaaccgcttctccatcaccagccaaagtggtggtgggctggtatcccttgccctgccactggactacaaacttgagcggcagtatgtgttggctgttaccgcctccgatggcactcggcaggacacggcacagattgtggtgaatgtcaccgacgccaacacccatcgtcctgtctttcagagctcccactatacagtgaatgttaatgaggaccggccggcaggcaccacggtggtgctgatcagcgccacggatgaggacacaggtgagaatgcccgcatcacctacttcatggaggacagcatcccccagttccgcatcgatgcagacacgggggctgtcaccacccaggctgagctggactacgaagaccaagtgtcttacaccctggccattactgctcgggacaatggcattccccagaagtccgacaccacctacctggagatcctggtgaacgacgtgaatgacaatgcccctcagttcctgcgagactcctaccagggcagtgtctatgaggatgtgccacccttcactagcgtcctgcagatctcagccactgatcgtgattctggacttaatggcagggtcttctacaccttccaaggaggcgacgatggagacggtgactttattgttgagtccacgtcaggcatcgtgcgaacgctacggaggctggatcgagagaacgtggcccagtatgtcttgcgggcatatgcagtggacaaggggatgcccccagcccgcacacctatggaagtgacagtcactgtgttggatgtgaatgacaatccccctgtctttgagcaggatgagtttgatgtgtttgtggaagagaacagccccattgggctagccgtggcccgggtcacagccactgaccccgatgaaggcaccaatgcccagattatgtaccagattgtggagggcaacatccctgaggtcttccagctggacatcttctccggggagctgacagccctggtagacttagactacgaggaccggcctgagtacgtcctggtcatccaggccacgtcagctcctctggtgagccgggctacagtccacgtccgcctccttgaccgcaatgacaacccaccagtgctgggcaactttgagatccttttcaacaactatgtcaccaatcgctcaagcagcttccctgggggtgccattggccgagtacctgcccatgaccctgatatctcagatagtctgacttacagctttgagcggggaaatgaactcagcctggtcctgctcaatgcctccacgggtgagctgaagctaagccgcgcactggacaacaaccggcctctggaggccatcatgagcgtgctggtgtcagacggcgtacacagcgtgaccgcccagtgcgcgctgcgtgtgaccatcatcaccgatgagatgctcacccacagcatcacgctgcgcctggaggacatgtcacccgagcgcttcctgtcaccactgctaggcctcttcatccaggcggtggccgccacgctggccacgccaccggaccacgtggtggtcttcaacgtacagcgggacaccgacgcccccgggggccacatcctcaacgtgagcctgtcggtgggccagccgccagggcccgggggcgggccgcccttcctgccctctgaggacctgcaggagcgcctatacctcaaccgcagcctgctgacggccatctcggcacagcgcgtgctgcccttcgacgacaacatctgcctgcgggagccctgcgagaactacatgcgctgcgtgtcggtgctgcgcttcgactcctccgcgcccttcatcgcctcctcctccgtgctcttccggcccatccaccccgtcggagggctgcgctgccgctgcccgcccggcttcacgggtgactactgcgagaccgaggtggacctctgctactcgcggccctgtggcccccacgggcgctgccgcagccgcgagggcggctacacctgcctctgtcgtgatggctacacgggtgagcactgtgaggtgagtgctcgctcaggccgttgcaccccgggtgtctgcaagaatgggggcacctgtgtcaacctgctggtgggcggtttcaagtgcgattgcccatctggagacttcgagaagccctactgccaggtgaccacgcgcagcttccccgcccactccttcatcacctttcgcggcctgcgccagcgtttccacttcaccctggccctctcgtttgccacaaaggagcgcgacgggttgctgttgtacaatgggcgtttcaatgagaagcatgactttgtggccctcgaggtgatccaggagcaggtccagctcaccttctctgcaggggagtcaaccaccacggtgtccccattcgtgcccggaggagtcagtgatggccagtggcatacggtgcagctgaaatactacaataagccactgttgggtcagacagggctcccacagggcccatcagagcagaaggtggctgtggtgaccgtggatggctgtgacacaggagtggccttgcgcttcggatctgtcctgggcaactactcctgtgctgcccagggcacccagggtggcagcaagaagtctctggatctgacggggcccctgctactaggcggggtgcctgacctgcccgagagcttcccagtccgaatgcggcagttcgtgggctgcatgcggaacctgcaggtggacagccggcacatagacatggctgacttcattgccaacaatggcaccgtgcctggctgccctgccaagaagaacgtgtgtgacagcaacacttgccacaatgggggcacttgcgtgaaccagtgggacgcgttcagctgcgagtgccccctgggctttgggggcaagagctgcgcccaggaaatggccaatccacagcacttcctgggcagcagcctggtggcctggcatggcctctcgctgcccatctcccaaccctggtacctcagcctcatgttccgcacgcgccaggccgacggtgtcctgctgcaggccatcaccagggggcgcagcaccatcaccctacagctacgagagggccacgtgatgctgagcgtggagggcacagggcttcaggcctcctctctccgtctggagccaggccgggccaatgacggtgactggcaccatgcacagctggcactgggagccagcggggggcctggccatgccattctgtccttcgattatgggcagcagagagcagagggcaacctgggcccccggctgcatggtctgcacctgagcaacataacagtgggcggaatacctgggccagccggcggtgtggcccgtggctttcggggctgtttgcagggtgtgcgggtgagcgatacgccagagggggttaacagcctggatcccagccatggggagagcatcaacgtggagcaaggctgtagcctgcctgacccttgtgactcaaacccgtgtcctgctaacagctattgcagcaacgactgggacagctattcctgcagctgtgatccaggttactatggtgacaactgtactaatgtgtgtgacctgaacccgtgtgagcaccagtctgtgtgtacccgcaagcccagtgccccccatggctatacctgcgagtgtcccccaaattaccttgggccatactgtgagaccaggattgaccagccttgtccccgtggctggtggggacatcccacatgtggcccatgcaactgtgatgtcagcaaaggctttgacccagactgcaacaagacaagcggcgagtgccactgcaaggagaaccactaccggcccccaggcagccccacctgcctcttgtgtgactgctaccccacaggctccttgtccagagtctgtgaccctgaggatggccagtgtccatgcaagccaggtgtcatcgggcgtcagtgtgaccgctgtgacaacccttttgctgaggtcaccaccaatggctgtgaagtgaattatgacagctgcccacgagcgattgaggctgggatctggtggccccgtacccgcttcgggctgcctgctgctgctccctgtcccaaaggctcctttgggactgctgtgcgccactgtgatgagcacagggggtggctccccccaaacctcttcaactgcacgtccatcaccttctcagaactgaagggcttcgctgagcggctacagcggaatgagtcaggcctagactcagggcgctcccagcagctagccctgctcctgcgcaacgccacgcagcacacagctggctacttcggcagcgacgtcaaggtggcctaccagctggccacgcggctgctggcccacgagagcacccagcggggctttgggctgtctgccacacaggacgtgcacttcactgagaatctgctgcgggtgggcagcgccctcctggacacagccaacaagcggcactgggagctgatccagcagacagagggtggcaccgcctggctgctccagcactatgaggcctacgccagtgccctggcccagaacatgcggcacacctacctaagccccttcaccatcgtcacgcccaacattgtcatctccgtagtgcgcttggacaaagggaactttgctggggccaagctgccccgctacgaggccctgcgtggggagcagcccccggaccttgagacaacagtcattctgcctgagtctgtcttcagagagacgccccccgtggtcaggcccgcaggccccggagaggcccaggagccagaggagctggcacggcgacagcgacggcacccggagctgagccagggtgaggctgtggccagcgtcatcatctaccgcaccctggccgggctactgcctcataactatgaccctgacaagcgcagcttgagagtccccaaacgcccgatcatcaacacacccgtggtgagcatcagcgtccatgatgatgaggagcttctgccccgggccctggacaaacccgtcacggtgcagttccgcctgctggagacagaggagcggaccaagcccatctgtgtcttctggaaccattcaatcctggtcagtggcacaggtggctggtcggccagaggctgtgaagtcgtcttccgcaatgagagccacgtcagctgccagtgcaaccacatgacgagcttcgctgtgctcatggacgtttctcggcgggagaatggggagatcctgccactgaagacactgacatacgtggctctaggtgtcaccttggctgcccttctgctcaccttcttcttcctcactctcttgcgtatcctgcgctccaaccaacacggcatccgacgtaacctgacagctgccctgggcctggctcagctggtcttcctcctgggaatcaaccaggctgacctcccttttgcctgcacagtcattgccatcctgctgcacttcctgtacctctgcaccttttcctgggctctgctggaggccttgcacctgtaccgggcactcactgaggtgcgcgatgtcaacaccggccccatgcgcttctactacatgctgggctggggcgtgcctgccttcatcacagggctagccgtgggcctggaccccgagggctacgggaaccctgacttctgctggctctccatctatgacacgctcatctggagttttgctggcccggtggcctttgccgtctcgatgagtgtcttcctgtacatcctggcggcccgggcctcctgtgctgcccagcggcagggctttgagaagaaaggtcctgtctcgggcctgcagccctccttcgccgtcctcctgctgctgagcgccacgtggctgctggcactgctctctgtcaacagcgacaccctcctcttccactacctctttgctacctgcaattgcatccagggccccttcatcttcctctcctatgtggtgcttagcaaggaggtccggaaagcactcaagcttgcctgcagccgcaagcccagccctgaccctgctctgaccaccaagtccaccctgacctcgtcctacaactgccccagcccctacgcagatgggcggctgtaccagccctacggagactcggccggctctctgcacagcaccagtcgctcgggcaagagtcagcccagctacatccccttcttgctgagggaggagtccgcactgaaccctggccaagggccccctggcctgggggatccaggcagcctgttcctggaaggtcaagaccagcagcatgatcctgacacggactccgacagtgacctgtccttagaagacgaccagagtggctcctatgcctctacccactcatcagacagtgaggaggaagaagaggaggaggaagaggaggccgccttccctggagagcagggctgggatagcctgctggggcctggagcagagagactgcccctgcacagtactcccaaggatgggggcccagggcctggcaaggccccctggccaggagactttgggaccacagcaaaagagagtagtggcaacggggcccctgaggagcggctgcgggagaatggagatgccctgtctcgagaggggtccctaggcccccttccaggctcttctgcccagcctcacaaaggcatccttaagaagaagtgtctgcccaccatcagcgagaagagcagcctcctgcggctccccctggagcaatgcacagggtcttcccggggctcctccgctagtgagggcagccggggcggcccccctccccgcccaccgccccggcagagcctccaggagcagctgaacggggtcatgcccatcgccatgagcatcaaggcaggcacggtggatgaggactcgtcaggctccgaatttctcttctttaacttcctgcattaaccctgggccgtggttcctacgcccgaggctcccttcccttccccagccgcactcatgccctgctcctgtcttgtgctttatcctgccccgctccccatcgcctgcccgcagcagcgacgaaacgtccatctgaggagcctgggccttgccgggaggggtactcaccccacctaaggccatctagtgccaactccccccccaccattcccctcactgcactttggacccctggggccaacatctccaagacaaagtttttcagaaaagaggaaaaaaagaatttaaaaaaggatctccactcttcatgacttcagggattcattttttttatacgctggaaattgactcccctttcccttcccaaagaggataggacctcccaggatgcttcccagcctctcctcagtttcccatctgctgtgcctctgggaggagagggactcctggggggcctgcccctcatacgccatcaccaaaaggaaaggacaaagccacacgcagccagggcttcacacccttcaggctgcacccgggcaggcctcagaacggtgaggggccagggcaaagggtgtgtctcgtcctgcccgcactgcctctcccaggaactggaaaagccctgtccggtgagggggcagaaggactcagcgcccctggacccccaaatgctgcatgaacacattttcaggggagcctgtgcccccaggcgggggtcgggcagccccagcccctctccttttcctggactctggccgtgcgcggcagcccaggtgtttgctcagttgctgacccaaaagtgcttcatttttcgtgcccgccccgcgccccgggcaggccagtcatgtgttaagttgcgcttctttgctgtgatgtgggtgggggaggaagagtaaacacagtgctggctcggctgccctgagggtgctcaatcaagcacaggtttcaagtctgggttctggtgtccactcacccaccccaccccccaaaatcagacaaatgctactttgtctaacctgctgtggcctctgagacatgttctatttttaaccccttcttggaattggctctcttcttcaaaggaccaggtcctgttcctctttctccccgactccaccccagctccctgtgaagagagagttaatatatttgttttatttatttgctttttgcgttgggatgggttcgtgtccagtcccgggggtctgatatggccatcacaggctgggtgttcccagcagccctggcttgggggcttgacgcccttccccttgccccaggccatcatctccccacctctcctcccctctcctcagttttgccgactgcttttcatctgagtcaccatttactccaagcatgtattccagacttgtcactgactttccttctggagcaggtggctagaaaaagaggctgtgggcaggaaagaaaggctcctgtttctcatttgtgaggccagcctctggcttttctgccgtggattctccccctgtcttctcccctcagcaattcctgcaaagggttaaaaatttaactggtttttactactgatgacttaaaaaaaatacaaagatgctggatgctaacttgatactaaccatcagattgtacagtttggttgttgctgtaaatatggtagcgttttgttgttgttgttttttcatgccccatactactgaataaactagttctgtgcgggt

SEQ ID NO: 62146 - DNA, 6837 bp, Homo Sapiens
ccgcgcgccatccgccaccctactggacacgggcgagagcgtcgccgccgtagcctccggagaagacaagggcatcgccgcctcagccgccgccgccgccgttttcgcctgcagctgctcaccggatcctcagtcttccacaatgaaccctgtttacagccccgtgcagcctggggctccttatggcaaccctaagaacatggcctacacgggttaccccacagcctatccagcagctgcccctgcctacaatcccagcctgtaccccaccaatagtcccagttatgctccagagtttcagttcctgcattcagcttatgcaactctgctgatgaaacaggcctggccacagaactcgtcttcctgtggcactgaaggcaccttccacctcccagtggacaccgggaccgagaaccgaacttaccaagcatcctctgcggctttcagatatactgcggggacaccatacaaggtcccaccgacccagagtaacactgctccacccccctactccccatcacccaacccctatcagacggccatgtatccaatcagaagtgcctacccccagcagaatctgtatgcccagggagcctactacacacagccggtgtatgctgcccagcctcatgtcatccaccacaccacggtcgtccagcccaacagcattccctctgctatctacccagcacctgttgccgccccgaggaccaacggtgtggccatgggcatggtggcaggcaccaccatggcaatgtcagcaggtaccctgctgactacaccccagcacacggcgattggggcacaccctgtctccatgccaacatatagggcccaaggaacccctgcgtacagctacgtgcccccacactggtaaagcctgcagcccatccaaatctggagtcacacattgtatgcaactactcaagtcttacaccggtgctggagcagttccctagcagcaccacctctatttgcaagaagagacaacggaagtgcaagggtcactttatgcatctttaatggttttgatttttatttttggtttttgtaaaagctgctttttctaatctcctgcctctccccaactgtccccctcttagcccctgcccttccagctctatccccttcctcctacctgaccaggccatgtcctctctgctcttccctaagtgtcctgtccctggggatcccagtctagaggcaagcagagagtagggtttattgcagtggttcatctgaaggctggattccatttgaagagcataaacagatgtggtccagggtaggaactcagagctgttgagcaggctacatctctaggggagtgttctggttgttttttcttaagcaagattagttcaggacattcccatgtcccagacacaaatgaaatgtctcctgagaaccattgcaacagaccaagaacaaaaccacctgagtatgtaggcgtgttattagcagcttaataccccaggctgagaacctggggaaaaaagtctttagaatttgggggagggtggggggagggagggcattgtggggaaggagagggaagaagggaggagcggtgcttgcctcatggctttggtttgaaaggtctctggccaaagcatctggccctggaccttctgatttgcacagtgatgttaactgacctggcacttcctcaaaaggtgattttgtccttagacctgccaagcggctgcagggtggtaggatcccagcatcccgaggccttggaaggccggatgccctgtgtcatccagacttcagcctctgagctgtcatggacccactctgatgaggagcttcctcctgattggagtgggaacctagggcatttctctcccttttcttttgcccttcccagtgccaggactcacctgtctgaccatagagcttgcaggcaggccaagctcttggttacctgtgccattcatggcccaagtgaaggaaccacattccaggtgggtgctggcagctctgaaggtgaggatagtgaaggaaaagcaatagcaataaacatttcatagactcatggaactgaagggaccttagcaatcatctcatccatttccctatttggcagatgaggaaactgaggcccagagaagcggaaaggacttccctagaccttacagtaaattagcattaaatgcagccttcctacctagtgggcaccttgcttacaaaaatttacctagggacggattggcttggttttgtaaaaatttaagtcggcagcgcccatacctggtgagtctggaatggtctctgggctcctgtttctgctcttttcctccacggactccaaaggcgggggttgaagactgggcagaggctacatgggggcggatggcaggaacagaaattgcaaatgaagaaatagcatttggaaattctgtgaagacatctggaacttccgtcctgtacctgactccacctccaggagaaggagcaggtggactggccgaaaaggagaggccatgcttttaggacagtagcccctcatcccgagaggagaggaagaggaggaagacagtgggagtcatcaggagaggagaatgaggatgaggcccaggagacaggctcatctgggagaagagggacccctgggacgaggaggtccctgctagtctcagccaggagcctggattgcccagcagcagcctccggcacccagcgcttggctgggccagcagcccctctgggggtggggcacgaacattttattgtgaaaaatgggatcattgacaacatttgggactttaaaaaactgctttcatttaaaattcatgcaaacttggacatatccttaccccaacctcccatgtctccctaagggagggaaaaatcaggaaacccttgggttggaaggagctcagaagctgtctagccattcccaggagggtaaagcccatcagcctccttggcctagagccaggagtttgggggcccaccttcctgggcttccaaggaactttaggaccagtaagaaaaaattcagctgttctaaattatctgttctgggtgctgatgaggtttcactttaaaacaatagaaagttttccagtgttaattcactttttgcaaatacctccttccaccctctttggttttgtaaaggtgggtgaaggttgttctagattatgtcatacgtgtttgaaaaatgccaaaataataataatgataataataatagaaacctttggatttgtcaggtgcatcacagaggtcaaagcacttcacggcctttcatgtactcgccctgagagggacagggttagagttattacagtcaattgacaaatgaggaaacaggttatggaagggaacaggcccacagtgagcagcatgctggtatccgccaggcttcccagaaccctgctgcctccatgtgggctggggtggaaccacagagaggagaaaggaagaagaggagacctaggaatgaccttgtaacttttgttctttcaacaccagtaagtaaaactaacagctggacctcacagttcacagaacagttgaacataaattatctggtttaacccgatgaaatagaggttatttctcctatttgatccataaggaaatcaaggcttggaaaagtcaagtgacttgctaataagtgacagagccactcgaatcccaggctgtctgctgtctcgttcccctccatctgatccccacacaggctcacgtactgaagcatctgtgctctgtgccctatcttagcacctactatgtaattcaagagcaaaggggggccccaaggtgaaaataaggcactgaaaggctgtggtctggaagagcccaggtccagcacccctttttcagtatgagccccagttcagccggcctcagcctcttgctgtgatggagatccacaagcctagccaagcttggggagtcactgcaaaaggactgagcccaggagagcggggacagtcatgtgcctccggtaggatgggcacagttactggtaaggtcacagagatctagtgggaggtaccataggtagatacctccaaagattctagatggcacggtggtcaagctagacaaaaagtcagagctggaagggccgtctcattgaaggcaggcaagcaagagaggacaagggatgtagccgcctgacagtgagctacagcactggccccaggatgcaaacccctctctcctcctcatgccactgcctctccccaagtgcaacacctatggccaggatcaggggtacagatggctcgttaccagccaacccttttgaattcttctacttctacctgaccccctctcctcactggcctggggtcaagaagtttgagtctgggagctggattgcctgcaaatagtgaaagcctgaaacataatggtttgccatgttttgaaaaaaaatgcatatttaatttcttcctcatgagataggacagttgctgttctttcttacctggcaatgaccctaaaatgtatatcctctttcctgaatatttagcagagacacacacacctgtccagagcgtttttggtatgcaaagtactttgacattggttgccaaagtcctccattttatagatgaaaaaactaaggctcaggaggcttgagacttgctaaaaggtcacacagcttggaagtgattcttcaaatcctctgctctttctgctgccacctgctgggtctcttggcaagcatggagggaggggctaactgtactttatagagctgggaagcccagtctctgagctgagcagatttgtatgaactgctttgggccaggacctgtaatgagccctggggagggacccagaggcacatctaactggcagcacaaggaggatgagaatttgcaactaaaggcctcacttggacaaaacactttggggtcacaatgcccaggaccgaagacatgttcaaggacagcacgaggcatctttctattgggagacccatgtccttggtaagcctgcacacctggcttcctaatccctgagagcctgcccactgtccagatccagtgagttggtacaaaacgtacagactgaagtccctgggcttgcttttcccatgggtgaggaccagaaccagactctgagcatccttacccctggccacccgaattgttccaagtttgaggtaccccgttcccagagatctgggggtccttctttggagggcttgctttgttctgatggccttcagaaaggaatcacatgaagtataaaaggacaggccccttggtcaccaagttttggctcctcatacagataggactcatccaggttcccagcgaggcactgactaagcgaggctcagagcttccatatcaaattcctcagctttgttctgtgcccagagggggtgggccccattctgggccctgtgaactttgtcttatatatcaccatctgtatcagaattcctcctcaattgcagttaagtgaaaatacgtggaagtctgcttttccatcctgtattctcccacatcactactggctgtgcggcccccgctgcttgccaagcttgggaatccagagaggggcagtagtagagtgggccagttgggacccacccgcagagctgaagaaacacgccagactaactgatgggattccacaccggagcctctgagcgcacaggcaggcatgccaagggggctgcagggtttgtcctttacttatctgcccctttcctagaaaactcctcgtttctgaaattaggcattatatggttccaggacccagccttcaaaattcctggcaggccagcttcaacattccatggccagccctgcctaagccagacttgggtcccagtccctcagtctctccagtggatatcttctgtggtgcatgctgttgagtccaacccaaaggccaaccgaggcacacaggagttgggactggctgccacaaagctagaaagggacaaaacagcacttgcttccctatggccacatggatagtccctggatatccttgctgtggtagaggtcctctacccattccagccactgatagcagggggattttccttcctaaggagaacagatgtaacagctttgcaaagtaccggcccataggaatcaaatgggtgagatcagctttgggcctgaccccagcaagaccagcatctccagaccccagcctttctcctcaggcctaagagagtcagggaaagagaggagactgtcccagagaccttctcctcgggtcagccagatagtctggatctatggtgtgactcaagctcctccttacccagggtgggtaaggccaggcctctagctacttggagttgtctgtaataatcttgaaaggcccaagggcctgtccccatcctgacttaaaggcatctgcttccctgtttcatatcacatgacggagaaacctgttctcatggcatgtaacatccctgtgaagagagcgttgtatatgattttgtattttttaattcattttaatctacaggttggaatctaatttttaaattttattggaactcacattttaaaaagaaataaaatttaaaataataataataataataataataataaacctttgaccagtgtcttccaagtagtttgatcaaagaatttataggtgttttcaaaacacagtccggagtgtaaagattggaaagccccatggccttgcctgtgtgtatgaagtgtaaatctggttttgttttgttgttttggattcttttgggtttttgttttgttttgaagatcagacagtgatcactctgaaagattgaagccaagaatttgtaactatggtatttactgtaagctgtagaacactcaataactattaaaaaaaaaattccccccc

SEQ ID NO: 62147 - DNA, 2238 bp, Homo Sapiens
gccgcggcgcgggacgcatagagctgcggctcgggcggcgcctccctgcggcggcccggcccggctccggcccccgctggggcaatgctccccggggccgcgggatgagccagtgactcggccggtccgggcatggcagacccagtggcgggcatcgcgggctcggcggccaagagcgtgcggccatttcgctccagtgaggcctacgtggaggccatgaaggaggacctggccgagtggctcaatgccttgtacggcctgggtctcccgggtggtggcgatggcttcctgacagggctggccacgggcacgaccctgtgccaacatgccaacgccgtgaccgaggctgcccgtgcattggcagccgcccgcccggcccgaggtgtggccttccaggcgcacagtgtagtgcctggctccttcatggcgcgcgacaacgtggccaccttcatcggctggtgccgcgtggagctgggtgtgccggaggtgctcatgtttgagactgaggacctggtgctgcgcaagaacgagaagagcgtggtgctgtgcctgctggaggtggcgcggcgtggggcacgcctgggcctgctggccccacgcctcgtgcagtttgagcaggagattgagcgggagctgcgtgctgcacccccagcccccaacgcccctgccgctggggaggacaccactgaaaccgcccccgcaccagggactcctgcccgcggcccccgcatgacacccagcgacctgcgcaacctcgacgagctggtgagggagattctgggccgctgcacctgccctgaccagtttcccatgatcaaggtctcagaggggaagtaccgtgtgggggactcgagcctgctcatctttgtgcgggtgctgaggagccacgtgatggtgcgagtgggtggtggctgggacacgctggagcattacctggacaagcacgacccgtgccgctgctcctccactgctcatcgcccaccccagccgagggtctgcaccttttctccacagagggtgtcgcccaccaccagtccccgccctgctagcccagtccctgggagtgagcgccggggctcccggcctgagatgactcccgttagcttacgaagcacaaaggaggggcccgagaccccacccaggtgagatgcaggaggacgaggagtgaggggtccagagggtgggggggcgtcagccctggcctgcatgatgggttgcctgtgcgccagagtgactcacaccctgggaaaagttcccgtgggtgggggcgggcctggcttcccatctccatggcaacccaaccaaaccaacaacacagctggggcgggccctgtggctgggcggcagccagtccagctcttgcttcctctggcccgtcctgggaaggggggtgtctagagcccaggaaacttcttcttccgtggcttttggggccctgggccgctggaggaagctgctcacttctccctggaagtccccaggacagaccgatgcccctgacagccccgtccaccagccacataccctgctgttcctctccctgcctgttctgcatgccagtccttccgtggtaccccatctgtctctattgtccccctgccccaggccccgggatcagctgcccccccatccccgctcccgccgctactccggggacagtgactcctcagcctcctccgcccagagcggcccccttggtacccgcagtgatgacacaggcactggcccccggagggagcgacccagccggcggctgaccacaggcaccccggcctctccgagacggcctcctgccctgcgcagccagtcccgagaccggctggatcgcggccggccccggggggccccaggaggcaggggagcccagctgtcggtccccagccctgcccggcgggcccggagccagagccgcgaggagcaggctgtgctgcttgtgcgcagggatcgagacgggcagcactcatgggtgccaaggggcaggggcagtgggggctcgggcaggagcaccccccagactccccgtgcccgcagccctgcagcaccccggctttcccgggtctccagccccagtccagagttgggcaccacaccggccagcatcttccgcacacccctgcagctcgacccgcagcaggagcagcagctgttccggcgcctggaagaggagttcctggccaatgcccgggcccttgaggctgttgctagcgtgacccccactggaccagcccctgacccagc

SEQ ID NO: 62148 - DNA, 698 bp, Homo Sapiens
  misc_feature (433)..(433): n is a, c, g, or t
  misc_feature (668)..(668): n is a, c, g, or t
cccggctgcagcatcctgtccaagtgctgccacgcgatggtgggctgatctaccccttcgcctggcagcacacctacatcccggtgctgccacccgccatggtcgacatcgtgtgctcgccgacgcccttcctcatcgggctgctctccagctcgctgccactgctcagggagtgccgctggaagaggtccttgtggttgacctcgtcaacagccggttcctcagacagatggacgatgaggactccatcctgccccggaagcttcaggtggccctggaacacattctggaacagaggaacgagctggcttgtgagcaggacgaagggcccctagacggcaggcacggtccagagtccagccccttgaacgaggtggtgtctgaagcctttgtccgcttcttcgtggagattgtgggacactactctttgttnctgacgtcgggcgagcgtgaggagagaaccctgcagcgggaggccttccgcaaagctgtctcctccaagagcctccgccacttcctggaggtcttcatggagactcagatgtttcggggcttcatccaaggagcgggactgcgccggcagaatgcaaaaggtctgtttgaggtccgagcccaagagtatctggaaacactccccagtggagaagcacagggttgtcaataagttnctgaagggacttaggcaataaaattaaatt

SEQ ID NO: 62149 - DNA, 552 bp, Homo Sapiens
  misc_feature (425)..(425): n is a, c, g, or t
  misc_feature (438)..(438): n is a, c, g, or t
  misc_feature (505)..(505): n is a, c, g, or t
  misc_feature (538)..(538): n is a, c, g, or t
ataagttaccaaaacccaagccccacaaaacacaagaaccccgcatgacgatacccatgaacacaagggctcattccagtaacagctcgcggagacgacagacaccagcactgccgacacacatggacgaggagcatgctgcacagcttccttctaccaggttctagaaaggtcttctttgccttcagtccgctggctagtgggaataattagtcccatcagccacagagggagtctgctcttcaagagtggcctctgcacacatggcgctgctttatgaaagggaggagcagctgtacacatctgggcagtgaggaaccagctgagccttctgtgggcttcctgcgtgtctgggaaggtgctgggtggggtctgaggctggggccagcgtgggggctactgcggcagtgttcatggaaggcttnaaggttcggaatncctccatttcggggaaggcctctgcagaaattccgcagcgctggcacggggctggaaagttatgtanttcttaaccagttcctgaaggttggaccacganatccggatttgggg

SEQ ID NO: 62150 - DNA, 1218 bp, Homo Sapiens
atgaatctggtgtgaaaaaccctgctgtagtagtgaaagagcatcaggagatactgactgtacctgagggccaaaacaggagcaggtaacgaaccgtaaaaaaaggagcaggtaatgaatcgtaaccaaaactacagttgatcctccgcaaaggaaagctctttacccagaatgtccttccagagtcattcaggaaggacaagggaacacccttgggaaatgggctagtggagggctgttgactgcagtgacacctgggtgctccggaggtatctgttctgttgacctgtaaggaagcagtcgatcctagagtgtcagaacagagccattctctcctcctgagtaggaacgtttctgttcagtttccctcacagcagcctgtgttagcatgcagttgaaaatactgccgtctaggagaacctgtggtcactgggaacgtgccccacagtgactggccatgcaaccaggtgatttttaggaatagatgtctctagactctgtctcctttcctacaaggcctcacacagatgcttgaggctaatggcccccattctgaggtcatttttgtgtagaactcctttccccaggagagagccttatctctgccctcctttaccctgaaggcttcaaacggaagacaggacctagatctaaacctagatactagcattttgtgggattgtctagaatttggggaagatttgggttcctaagatgcacaagcgttttacaccagtggtgattaactcaactaaaacccactgtaggaagttagcttccccagacagctaatgccgagatcttctaccagcgtagagttgacagaagcaggccagcgaggaggtgtgggacataatagcctgagtgcttgggttaccatggagactggagtgtgtgaggccacagcctgtgctaaagagccatggagccctcccctggccatgtctggggacagatagaacctgttgggggaaatattccctcaccccagggttctttctgcagagcaagggttgcctttgtcctatccctgagcttgctcaacaagagaaacaaggtttcttaagtgttttggttaaagttttcattcttatttgactatgtatatgtaattgtaaagaaacgatcctatgcattgtctttcttttatattcttgtaatattctgaaattaaaattgttttgtttcatatccagaaaaaaaaaaaaaaaaaaaaaa

SEQ ID NO: 62151 - DNA, 631 bp, Homo Sapiens
  misc_feature (499)..(499): n is a, c, g, or t
  misc_feature (535)..(535): n is a, c, g, or t
  misc_feature (557)..(557): n is a, c, g, or t
  misc_feature (613)..(613): n is a, c, g, or t
  misc_feature (628)..(628): n is a, c, g, or t
tttcctgtgaaaccaccatagagaatttatttttttctcaggtgaagtcagtaactaattcttcctattcccgttggacacaaggagtctgtgagggggtgtgaaggaaggaggctgcggctgcgtcctggactccgtcctgcggtagggagtccagcagggatggctcagcctccgcacctggtgtgcagccggatctccatcctgaggaaggccttgaggttctcatcagccacgtgctcctccagggcagccagggcccgctccccaccgtcctggaagtgctgcagcagcctgtccgcgtactccacccacacgcagttggggcagccactcatgcagcagtttgtgggcggctggagctcaggtggcagcgatgcctttgggcggcctggtgcgtccgcacctgcttgggagcccacctctacgtggtctgtcccgaattttctgcgcccatcaggggcttgcgctccgggatggtgcctttgaagaagctgcnacctccaggaagcctctggagcagtccgggctgganaaccggcgagccccaatttcantaattaactagtcctgcgaagggcatcatccggttcatgtcaaaggcaagtcccanagcccaggaggttgnaaa

SEQ ID NO: 62152 - DNA, 604 bp, Homo Sapiens
  misc_feature (2)..(2): n is a, c, g, or t
  misc_feature (13)..(13): n is a, c, g, or t
  misc_feature (24)..(24): n is a, c, g, or t
  misc_feature (35)..(35): n is a, c, g, or t
  misc_feature (43)..(43): n is a, c, g, or t
  misc_feature (58)..(58): n is a, c, g, or t
  misc_feature (88)..(88): n is a, c, g, or t
  misc_feature (179)..(179): n is a, c, g, or t
  misc_feature (490)..(490): n is a, c, g, or t
  misc_feature (523)..(523): n is a, c, g, or t
  misc_feature (535)..(535): n is a, c, g, or t
  misc_feature (567)..(567): n is a, c, g, or t
  misc_feature (583)..(583): n is a, c, g, or t
tnataaacatatngaaaactttantagaaatatanagaaaaanaaataacttgcctgngaggtttcctgtcccttcaggatggatgancaacagatggggcacctaggtccagtggggctgctcccgatctactgtttcttcctccaggagcaaggcatctagctccttccagccgctnctgagcagggggcccacatcagggctgggggccacattgggaggaacagtcctgccccctgcagcccggaccccacggacggtcttcgtgatcgaggaaggctgctgtcccgaaattccacagcccgccggagcttccttgagctggtgaaaatcagagtcccattgcgctcccggggttcctcaaagatggtctcaaaggtcctcctggttgtggggtgattggtaattcttggttggtgtaaatttcttccaagctgaactccttcttggttcaacctgattgggtcgaggcagtcccattggtgtaangtttaagctgaggacgggctggtgttctgcggnattctgaatcgngaacctttcccatggtcttggtctcaaggttngaaagcacctgggtcncttgaaggctcttggctcctt

SEQ ID NO: 62153 - DNA, 560 bp, Homo Sapiens
  misc_feature (494)..(494): n is a, c, g, or t
  misc_feature (511)..(511): n is a, c, g, or t
  misc_feature (552)..(552): n is a, c, g, or t
caaaacgagaacatttattatttgtttttttctcattaaagtttcacaaataaagcacagcaagacttgtctgcagacacacaggaggcacatggacagcccgtcaaccagagatggagacgaaggccagcgtggctctcacagggcagcgcttctcagaacccctggcccccctcgtgccaaggctggcctgtgtcaggctcgcccacgccgccttatgacaaatagaggccggtgccaaggaggtggctacagagcaggggcaaggaagttatcctcatgttctgataatgaccctgcaaatcccaccccaccctcaggcacctccgtctaaggtgtccggttactccaggtaaggaggttcccaggagggccgtgttttccctagggctgatgaaacttgctccgacaagccaggccactgggaggcacctcaggatggaaaagatgctggaggctttgctggctttcaggatgccgggagccccacgggnaaaaaaggggaaggaangaaagcgattctaaagacagattgctgctggtctgtccganccagggta

SEQ ID NO: 62154 - DNA, 2392 bp, Homo Sapiens
gcggagcgcgcgctcccagcgaaagcagcagggcagggatctgcgttggaggaagggactgctctggtgctagaatgctgtgcgtcggaaggctgggcggcttgggagccagagcagcagctctgccgccccgccgggcgggccggggaagcctcgaagccgggatccgggcccgaagggtcagcaccagctggtctcccgtgggcgccgccttcaatgtcaagccccagggcagccgcttggacctgttcggcgagcgggcgcgtctttttggagttcctgagctgagtgccccagaaggatttcatattgcacaagaaaaagccttgagaaagacagaattgcttgtggaccgtgcatgttccaccccacctgggccccagaccgtgctgatcttcgatgagctctcggattccttatgcagagtggccgacttggctgattttgtgaaaatcgctcaccctgagccagcattcagagaagctgcggaagaagcttgtagaagtattggcaccatggtagagaagttgaacacaaatgtggatttatatcaaagtttgcaaaaattactagctgataaaaaacttgtggattcccttgatccagaaacaaggcgagtggctgaactgtttatgtttgattttgaaattagtggaatccatctagacaaacaaaagcgtaaaagagcagtggacctcaatgttaaaatcttggatttgagtagtacatttcttatgggaaccaattttcccaacaagattgagaagcatctcttaccagaacacattcgtcgtaactttacatctgctggggatcatatcataattgatggtctccacgcagaatcaccagatgacttggtgcgagaagctgcttataaaatttttctttatcccaatgctggtcaattgaaatgtttagaagaattgctcagcagcagagatcttctggcaaagttggtggggtattccacgttttctcacagggctctccaaggaacgatagctaaaaatccagagactgtcatgcagttccttgaaaaactatctgacaaactttctgaaagaactctgaaagattttgagatgatacgagggatgaaaatgaaactgaatgctcaaaattccgaagtaatgccctgggaccccccttactacagtggtgtgattcgtgcagaaaggtataatattgagcccagcctatattgcccgtttttctctcttggagcatgcatggaaggcctgaatattttgcttaacagactgttggggatttcattatatgcagagcagcctgcaaaaggagaggtgtggagcgaagatgtccgaaaactggctgttgttcatgaatctgaaggattgttggggtacatttactgtgatttttttcagcgagcagacaaaccacatcaggattgccatttcactatccgtggaggcagactaaaggaagatggagactatcaactcccacttgtagttcttatgctgaatcttccccgttcctcaaggagttctccaactttgctaactcctggcatgatggaaaatcttttccatgaaatgggacatgccatgcattcaatgctaggacgtactcgttaccaacacgtcactgggaccaggtgccctactgattttgctgaggttccttctattctgatggagtactttgcaaatgattatcgagtagttaaccaatttgccagacattatcagactggacagccactgccaaaaaatatggtgtctcgtctttgtgaatctaaaaaggtttgtgctgcagctgatatgcaacttcaggtcttttatgccactctggatcaaatctaccatgggaagcatcccctgaggaattcaaccacagacattctcaaggaaacacaagagaaattctatggcctaccatatgttccaaatactgcctggcagctgcgattcagccacctcgtggggtatggtgctagatattactcttacctcatgtccagagcggtcgcctccatggtttggaaggagtgttttctacaggatcctttcaacagggctgccggggagcgctatcgcagggagatgctggcccacggtggaggcagggagcccatgctcatggttgaaggtatgcttcagaagtgtccttctgttgatgacttcgtaagtgccctcgtttccgacttggatctggacttcgaaactttcctcatggattctgaataaaagaaacactctacacctctaatcaaggtcatgtagtaatgactttgttataaatgctacagctgtgagagcttgtttctgattgtttcattgttcgcttctgtaattctgaaaaactttaaactggtagaacttggaataaataatttgttttaattaaaaaaaaaaaaaaaaaa

SEQ ID NO: 62155 - DNA, 626 bp, Homo Sapiens
  misc_feature (258)..(258): n is a, c, g, or t
  misc_feature (305)..(305): n is a, c, g, or t
agaacgaggagcgcacgatgattgaccccacttccaaggaagaccccaagttcaaggaactggtcaaggtcctcctcgactggattaatgacgtgctggtggaggagaggatcattgtgaagcagctggaggaagacctgtatgacggccaggtgctgcagaagctcttggaaaaactggcagggtgcaagctgaatgtggctgaggtgacacagtccgaaatagggcagaaacagaagctgcagacggtgctggaanagtacatgacctgctgcggccccgaggctgggcgctccggtggagtnggactcaattcacgggaagaacctggtggccatcctccacctgctggtctctctggccatgcacttcagggcccccatccgccttcctgagcatgtaacggtgcaggtggtggtcgtgcggaaacgggaaggcctgctgcattccagccacatctcggaggagctgaccacaactacagagatgatgatgggccggttcgagcgggatgccttcgacacgctgttcgaccacgccccggataagctcagcttggtgaagaagtctctcatcacttttgtgaacaagcacctgaacaagctgaatttggaagtgacggaatg

SEQ ID NO: 62156 - DNA, 531 bp, Homo Sapiens
  misc_feature (183)..(183): n is a, c, g, or t
  misc_feature (186)..(186): n is a, c, g, or t
  misc_feature (426)..(426): n is a, c, g, or t
  misc_feature (431)..(431): n is a, c, g, or t
  misc_feature (449)..(449): n is a, c, g, or t
  misc_feature (460)..(460): n is a, c, g, or t
  misc_feature (467)..(467): n is a, c, g, or t
ttttttttcaaactgcaaaacccgttttatttttaataaaaggcctcacttccaaggagagcccagcccaggagatccccggtgaatcgtcaagcctgggtcctcggggagccggcgttcctgctgagctgatgttgtacttctgaaggcctgtgatcgctaactgcaccatgaggcagaatncangggtgctctcaaccagctgggggttggggttcaggctttttttcatctttcggccaaggcagacaacaacggactcatcatcccacgcgactgagtgacgcgaggcttcaaacgcaagcacgagtgtttagaatcctgcattttcaaaggctcttgcccactgggaactacatggagaggagattaagaacaacaaccaaaagaggcagggggtggggcaggcttgaggtaggggtgggntgggntgacagtcaacacagctnggaccagaagnccatggnccctggctccctggaaaggcacagggcacagacggatgccgccttttcttgctgggacactcct

SEQ ID NO: 62157 - DNA, 799 bp, Homo Sapiens
  misc_feature (665)..(665): n is a, c, g, or t
  misc_feature (702)..(702): n is a, c, g, or t
  misc_feature (718)..(718): n is a, c, g, or t
  misc_feature (723)..(723): n is a, c, g, or t
  misc_feature (764)..(764): n is a, c, g, or t
  misc_feature (770)..(770): n is a, c, g, or t
ctcagctgtttttaaatgaatgtgtgtgaggaacagatgggaaagttgggagatctgtctacagagaagcaaagttgtggttctcttgctaacttcaaggtgagggacattgggcaccctaagtttgggaacttggttgataaatacgtatatggtccattccataaatcagtggtgagtgactggcctgggttctagacctctgggaaccagcacctgagtcacagctgtctaggcctcggtgctggcctgggttctagatctctgggaaccagtgcctgagtcacagctgtcagtgcagccatttgcccagggctgctcccgagggggatgatgggaaattcagcagtgtagactcactttaaacaagctccggtgatcctgaaatgctgaagatcgtgtaggtgggttgtggggtcagcagagctgccattctgcccacgtctggaaaacaacacacggtgagtcaccgttggccatgagatctccccacttaaaggtgctgtgagcttgtctctaagatatatacctcttccttttgtcttttgctgtaagtttgaccttttgcagatctgatgaaaatacaacctcttattgtatagtttgcctgattataagccatagtaaatcgagctgttcgcatttttgcaggccttgcattttcnactgggaggttcatcaaaccttccacttagcaatagncctgaactcaggcagnatgcncccataaattagccttccaaagaaaaatgcacgctcagaanaatttntgaaggggcagaaccttatgccgacaagg

SEQ ID NO: 62158 - DNA, 901 bp, Homo Sapiens
  misc_feature (639)..(639): n is a, c, g, or t
aagactttcacagtgagagtagaaggtagatttggaatcatgcattttagcaagtggacttgttgaaacaggaagcaagggccttcagtgtagcccattcttgatccagagctgttgcctgtgacagcggtttctctggatgtcaaaggcagctgcctggtgcccagcttgcttctcgactggtggcccctatgggtgggtgtgcgatggaaatgtgttcctgccggagtctgaggcaccagggtgtgctcaaaggctggccctggtggtggactggcacctgtgcagagtgccgtgtgcttgtggtgcgccatctgaagcaagagtccagcgttctgccgtgtctgtcccccaccatgccccctacaggcggtactgatggcgcttttttttttttttctgtcaggaaaacaatgttggcctgtgggcgcccacaacatatccttccctcactacctgtgtgaccaaggttggcttctgttgacctttaaaaaagaaaccctcaactcaaattgctataattagacacttgcttctgtcttgcctcctgtctgcagctgtgaatagtcattgactgtgactgttgccttagccagcagatgcgctgtgaacaaagcttgtgacatgtgttcgtaaagnttggacctcctgtgcttctgtccaggacacacagcagtgtcgatgcttgtggcttggggcgcccctcacagttgcagcaggtatatggcaaacattctaggcgggaaggacatgttttacaccctgggaatggcggtgaatggttcgtacaactccaaaaaaatatatcgagcctcttgttatttgggttatgtggaagctatttgcatcgtgtaggccttctgtacgcgagaggctgcacacttcggaggcgtgaagtcgt

SEQ ID NO: 62159 - DNA, 847 bp, Homo Sapiens
  misc_feature (541)..(541): n is a, c, g, or t
  misc_feature (706)..(706): n is a, c, g, or t
  misc_feature (805)..(805): n is a, c, g, or t
cttaaagactgtgccttggaagcctcttgcagaggactccccaccaggacaaaaggtccccagaaatcctatcatgggacttttgtatcactggaaaacctgttctccagtcacacgatacattctaggctacttcctgacttactggctcctgggactactcctacattgcaacttcctgccttggacatgacctggactctccagggacaggttggaagccaacttaacccaggggtctgaaagtaaaaatacacattggaactgcctctgctgccctgggatcattactgtgtccattataatctttctctttctctttgaaagctggtcaggaatgggagaagtgtcagacactagagagccccttctggtcctggctagggcaaattttagacaactattttctctgtaagtgaagattgtcgtattccaagtctaaaatacacctggatctgtctagtcaatcaacatagcagagacagtcttaaacctaccattgacctgtgtgtagatttaaatgtcaatttattgaagtgtnatttcatcgaaggattagctgcagctggtacagtccaccagatggtatagctgacagtgtgtggagtataagtggacatttttcaatgcgcatgttctgatgtttttatgatgtgaggatttattgaaaactcaagttcgatactctcagtacatgaaaaaaaanaagaagaaaaaaaaaaagtttttgccgggtcctttggttcttcctgggtctgggctcgcctagggacctcgggatggccgcctatcgagggctcgcggnggcggtccggtgtttgcccagggtccaaggtctgtccgcttg

SEQ ID NO: 62160 - DNA, 762 bp, Homo Sapiens
  misc_feature (497)..(497): n is a, c, g, or t
  misc_feature (610)..(610): n is a, c, g, or t
  misc_feature (616)..(616): n is a, c, g, or t
  misc_feature (695)..(695): n is a, c, g, or t
  misc_feature (733)..(733): n is a, c, g, or t
aaaaacctttccacctggtaggcacctccatgggtggccaggtgctggggtgtatgctgcttactacccatcggatgtctccagcctgtgtctcgtgtgtcctgctggcctgcagtactcaactgacaatcaatttgtacaacggctcaaagaactgcagggctctgcgccgtggagaagattcccttgatcccgtctaccccagaagagatgagtgaaatgcttcagctctgctcctatgtccgcttcaaggtgccccagcagatcctgcaaggccttgtcgatgtccgcatccctcataacaacttctaccgaaagttgtttttggaaatcgtcagtgagaagtccagatactctctccatcagaacatggacaagatcaaggttccgacgcagatcatctgggggaaacaagaccaggtgctggatgtgtctggggcagacaatgttggccaagtcaattgccaactgccaggtggagcttctggaaaactgtnggcatcagtagtgatggaaaaaacccggaagacagccaagctcataatcgactttttagcttctgtgcaaaacacagacaaacaacaagaagctggacttgaaggcccccaantgcagnctggaatttttgaacacagcattctgcttcccattcccccaagttttgacgcagccaaccatttttaagggattcctgnccccaaattgcggttggaagcgccaattgacccctganggaaagcccgtccccttattccccgggta

SEQ ID NO: 62161 - DNA, 533 bp, Homo Sapiens
  misc_feature (62)..(62): n is a, c, g, or t
  misc_feature (124)..(124): n is a, c, g, or t
  misc_feature (307)..(307): n is a, c, g, or t
  misc_feature (367)..(367): n is a, c, g, or t
  misc_feature (377)..(377): n is a, c, g, or t
  misc_feature (405)..(405): n is a, c, g, or t
  misc_feature (425)..(425): n is a, c, g, or t
  misc_feature (450)..(450): n is a, c, g, or t
  misc_feature (462)..(462): n is a, c, g, or t
  misc_feature (513)..(513): n is a, c, g, or t
tttttttctgttacaaacaggtctttattaaagatgagaagccaggtctttattaaagatanggagggggcaggaaaggggggcagtgctcctctacccactgcctttgcctgcccggggtganggagcccctctgctccacccatgccccccatgatggcacatctgtatgaggctgaggcatggggggcagtgtgaagaacaggggcaggttccaagaaaaagaagaaaaacccttcccacagccctaataaataacagaagggtttgggatgacctgggcacaggcaaggggagacacagcacnctgaaccccaaaacctctgaagtggggcaagccctacttaagtaggggattaggagagantgggtgagangtggagaggccgcacacgggaggggctnagaggaaaaggggtatcccnaggaccctgccatgggggaacctgncccccaccctanagctgggctcgctgattttgagagaagactccattggcaacatgactcatntcctcctctccttgcaaatg

SEQ ID NO: 62162 - DNA, 2880 bp, Homo Sapiens
gtttgccgcgcgagcagccggcctctcgcaggagccgagggacccgcgcggctgcggcccaggagcggcggccgcggagcccggagacccgcagccgcggcggcggcggcggcggcggcagcagctagagcagcgcctcccgccgccgcccgggaggagctcgccgcgcccgctcgccgcctcgtctcccagcggcggcgggaggcgcgtctccccggcccagtccgcgcccggccccgcgggaccgctccggcccgctccgaggaaaaactgcatagaaaatctaatggatgaagatgagaaagacagagccaagagagcttctcgaaacaagtctgagaagaagcgtcgggaccagttcaatgttctcatcaaagagctcagttccatgctccctggcaacacgcggaaaatggacaaaaccaccgtgttggaaaaggtcatcggatttttgcagaaacacaatgaagtctcagcgcaaacggaaatctgtgacattcagcaagactggaagccttcattcctcagtaatgaagaattcacccagctgatgttggaggcattagatggcttcattatcgcagtgacaacagacggcagcatcatctatgtctctgacagtatcacgcctctccttgggcatttaccgtcggatgtcatggatcagaatttgttaaatttcctcccagaacaagaacattcagaagtttataaaatcctttcttcccatatgcttgtgacggattccccctccccagaatacttaaaatctgacagcgatttagagttttattgccatcttctcagaggcagcttgaacccaaaggaatttccaacttatgaatacataaaatttgtaggaaattttcgctcttacaacaatgtgcctagcccctcctgtaatggttttgacaacaccctttcaagaccttgccgggtaccactaggaaaggaggtttgcttcattgccaccgttcgtctggcaacaccacaattcttaaaggaaatgtgcatagttgacgaacctttagaggaattcacttcaaggcatagcttggaatggaaatttttatttctggatcacagagcacctccaatcataggatacctgccttttgaagtgctgggaacctcaggctatgactactaccacattgatgacctggagctcctggccaggtgtcaccagcacctgatgcagtttggcacagggaagtcgtgttgctaccggtttctgaccaaaggtcagcagtggatctggctgcagactcactactacatcacctaccatcagtggaactccaagcccgagttcatcgtgtgcacacactcggtggtcagttacgcagatgtccgggtggaaaggaggcaggagctggctctggaagacccgccatccgaggccctccactcctcagcactaaaggacaagggctcaagcctggaacctcggcagcactttaacgcactcgacgtgggtgcctcgggccttaataccagtcattcgccatcggcgtcctcaagaagttcccacaaatcctcgcacacagccatgtcagaacccacctccactcccaccaagctgatggcagaggccagcaccccggctttgccaagatcagccaccctgccccaagagttacctgtccccgggctcagccaggcagccaccatgccggcccctctgccttccccattgtcctgcgacctcacacagcagctcctgcctcagaccgttctgcagagcacgcccgctcccatggcacagttttcggcacagttcagcatgttccagaccatcaaagaccagctagagcagcggacgcggatcctgcaggccaatatccggtggcaacaggaagagctccacaagatccaggagcagctctgcctggtccaggactccaacgtccagatgttcctgcagcagccagctgtatccctgagcttcagcagcacccagcgacctgaggctcagcagcagctacagcaaaggtcagctgcagtgactcagccccagctcggggcgggcccccaacttccagggcagatctcctctgcccaggtcacaagccagcacctgctcagagaatcaagtgtgatatcaacccaaggtccaaagccaatgagaagctcacagctaatgcagagcagcggccgctctggaagcagcctagtgtccccgttcagcagcgccacagctgcgctcccgccaagtctgaatctgaccacacctgcttccacctcccaggatgccagccagtgccagcccagcccagacttcagccatgatcggcagctcaggctgttgctgagccagcccatccagcccatgatgcccgggtcctgtgacgcaaggcagccctcggaagtcagcaggacgggacggcaagtcaagtacgcccagagccagaccgtgtttcaaaatccagacgcacaccccgccaacagcagcagcgccccgatgcccgtcctgctgatggggcaggcggtgctccaccccagcttccctgcctcccaaccatcgcccctgcagcctgcacaggcccggcagcagccaccgcagcactacctgcaggtacaggcaccaacctctttgcacagtgagcagcaggactcgctacttctctccacctactcacaacagccagggaccctgggctacccccaaccacccccagcacagccccagcccctacgtcctccccgaagggtcagcagtctgtctgagtcgtcaggcctccagcagccgccccgataatgccccggcactgaagtcgggacacaatcagctttaaccaatggatgaggggggtggccacaggagatggggagaggagtctgaactaaacccctggcttttgtgcacactgcatacgt

SEQ ID NO: 62163 - DNA, 539 bp, Homo Sapiens
  misc_feature (51)..(51): n is a, c, g, or t
  misc_feature (201)..(201): n is a, c, g, or t
ttttttttcagttgagcagacatttattaagcacctatcaagtgcaaggcntgttgctaggcgccgtgggaaatacagagaacacaggcggtccctgcccacgaggagctcacagtctagaaagggcagcaagacagtacacaatcagtggcagcagcaccagccagagtggcaagtgctcaaagcgagacacaaagtgcntgtgcggtcacaacatcatggggatgcttctggcagaagcacttggaaaggagacgaggactcaggctgggcttccaggagggaagccatttgggagaagggcatctctagcggagagaggtccatctgcagagcccacaggtcatgggaaacatgtggctgcagggagagtttggggacagtcaagtatggctgggaggtggacagccacggacactaagctcaggagatgtgaactttgtggtctggtcaacagccactgcagatcacttcgcaggaggaggggtgactagaagtatgttactggaaggtaaatctggccacactgcagcatctgg

SEQ ID NO: 62164 - DNA, 541 bp, Homo Sapiens
  misc_feature (330)..(330): n is a, c, g, or t
cacctgcggaggctgcaccttggcgcttgccccacggaggaatgcaaggcctgcaccaggtgcggctgtgtcaccatgctcaagtcgcccaacagaaccacggcggtgaagcagtgggagcagcgctggatcaagaactgcctgtgcggtgggctctggtggcgggtgcccctcagctacccctgagcccagctgcccctcagctactcctcagctacccctcagctgcccctgagcccggctgctgcaagagccaccgctcgccctggactctcctcggcgcggttaacctcagcccgccctgcagggctgttgaaggccgtgggcggnacgcctgcgtgaccagcagagcttctgaggaagcccctgcctttgtccagctgggcccgcagtccacacaccactctcccaggacccccagatccctggaccatctgcatccagaggaccgtccgtgaggcccgggggtccaggcggacttgtggtgacccggctcgggcgtctcctcggtttcttgctcaaccgcggagagcgctgaact

SEQ ID NO: 62165 - DNA, 584 bp, Homo Sapiens
aattttttttttttttttttttttttgaagggcaatctttcaattgcttaaaattaatcagtgcaaagtgaggtaaaagatccccgtttgtcagggccgaggcaggaggctcacacaagcctgcgtctcttggagtccctccccacgtccccctcctcgacatccacctcacagcccagtggggacaccaggttcagcagagggtcctcagaggcacgggcgtagagcgccacacggagggccacaccgaagcctgtggttcgctcaccagcatgcaccggtgcagcaatgtccaggtggacccagactccgggccagtcgaagccgatgtgtgaggcgatgaagaggccagcacaggagctggggctgttgtctcggtccgccactgagttcttcatgtccgccacagctgaggtgaactcgctgaagtgcagctcggggcagtagaccagcgggtgcaccaggtccccacactatctgcccgcctttaaacaagcggccttccactcagcgctgttggtgaacaccgcgtcgtggtacttccctgtggcaatgccctgaagcccggtcaaggtgggcatgtt

SEQ ID NO: 62166 - DNA, 579 bp, Homo Sapiens
  misc_feature (63)..(63): n is a, c, g, or t
ggaatctgaactcggatgatcaggctgttgtgctgaaggcctgagattggcgcccgaggtcantgcgaagggacgggctgcgggcctcagctccctgctcgtccatggcaacaacaaggtcatggctgctgtcagacccagctccggagcctgtcactgggccctaccttccgggagagggccctcctgtgcttcctggaccagctggaggatgaggacgtgcagactcgagtggctggctgcctggccctaggctgcatcaaggctcccgagggcattgagccctggtgtacctctgccaaactgacacagaagctgtgagggaagctgcccggcaaagcctacagcagtgtggagaagagggacagtctgcccatcgacggctggaggagtccctggacgccctgccccgcatctttgggcctggcagcatggccagcacagcattctaaactattcacccatgggttcctggtgcccctttccccccactttcagggctcaccaggcactggcagggagggtaagggctggctccagatacccctcccccacagattcctagcaatgaaaatctaa

SEQ ID NO: 62167 - DNA, 580 bp, Homo Sapiens
caagaagcagtaagagtgtaaagaggatgctgccctgggcaggccagtccagcctggccactagcagaataccaagcagtccagtggattaccctcgtggctaagcaagtgtctgcaggagcagagatggctggaaggggcctctgcacacggaagatggcttgttcagcccattcacctcctgaggatgtgggcagtctcctccaagaacacatggagctgcttcctgatcccaagcaggtcattgccactggaaggacatggccccggtgatccatgcttcatgcccacccagaaacacacccctcagtgtgtgcctcagtttactttggagatcagttgtcgtttttagtgctcctttaggcttactaaaacagttttggaaacaaagctattttgaagtattcaagcagaggaattccctaacactgacccccttgtctttttttaatattcaggctgttttatatgcctaaatttttttcttaagatctaaacgaaaaatagtttcttgtttaaattcacataaggcaatgagatatggaaagatgacaagatacgtataaacattggtttgcat

SEQ ID NO: 62168 - DNA, 668 bp, Homo Sapiens
ttttttttggtgtttccagaagagaaatttaatctaatttacatacttctaggtacatcgataaccaaaatgtggccactgaaaaaagttaaaaggtcaatcagctcctggcttctagctggcccaggattgcaaaataaaaagatccacgttccttattctctacacaaaacgcgtttttaaaaaagtgaaaggtctagggagctatacatagaaagcaacagtgaaaacggagagggagcaggagtaggggaggagagtcccactccccaaccccaccctccagggccccagagcccctgaggctctttggggggccttgacatggcaggaggcagctgtcagctctgagctcttcccagctgggaaggcccctctcggggcgagccaacaaggatttccgtggcattgtgggctcagtggggggctccaggcccagcaggccccacagagggagcgtggcttccctgagcaagcaccgtggcatgatgtggtcgttaacccaggaactgggggtccggggcatgtcccgggtctcacgagtcattgttgggttggttggaggagtgcctagcgcaaggcagcccagtttcgcgaggctgtcggcgcgcgcggcccgaagcacccgggaagggcttgccccgagcactcggaagcgctttccgcgc

SEQ ID NO: 62169 - DNA, 3984 bp, Homo Sapiens
taggaagaggcactgctgagggggcgcgaggggaacggaggccagagctgcgctgacagcagccatggcgagcggcagtggagacagcgtcacccgtcggagcgtggcatcacagtttttcactcaagaggaggggccgggcatcgatggcatgaccacctcagagagggtggtggatcttctgaaccaggcggcgctgatcaccaatgactcaaagatcacagtgctcaaacaggtccaggagctgatcatcaacaaagacccacactactggacaacttcctggatgagatcatcgcattccaagcagacaagtcaatcgaagtgcgaaaatttgtcatcggcttcatcgaggaggcatgcaagcgagacattgagttgctgctgaaactcattgcaaacctcaacatgctcttgagggacgagaatgtgaacgtggtgaagaaggctatcctcaccatgacccagctctacaaggtggccctgcagtggatggtaaagtcacgggtaattagcgagctacaggaggcctgctgggacatggtatctgccatggcgggggacatcatcctgctattggactctgacaatgacggcatccgcacccacgccatcaagtttgtggagggcctcattgtcaccctgtcaccccgcatggctgactcagagataccccgacgccaggagcatgatatcagcctggaccgcatccctcgtgaccacccctacatccagtacaacgtgctatgggaagagggcaaggcagccttggagcagctgcttaagttcatggtgcaccctgccatctcctccatcaacctgaccacagcgctgggctcccttgccaatatcgcccgccagagacccatgttcatgtctgaggtgatccaggcctatgaaactctgcatgccaacctgcccccgacgctggccaaatcgcaggtgagcagtgtgcgtaagaatctgaagctgcacctgttgagtgtgctgaagcacccggcttccttggagttccaggcccagatcaccaccctgctggtggacctgggcacacctcaggccgagatcgcccgcaacatgccgagcagcaaggacacccgcaagcggccccgcgatgactcggactccacactcaagaagatgaagctggagcccaacctgggggaggacgatgaggacaaagacttggagccaggcccgtcggggacctcgaaggcctcagcgcagatctccggccagtcagacacggacatcacagctgagttcctgcagcctctgctgacgcctgataatgtggctaatctggtcctcatcagcatggtgtacctacccgaggccatgccagcctccttccaggccatctacacccccgtggagtcagcaggcacggaagcccagatcaagcacctggctcggctcatggccacacagatgacagctgccggactgggaccaggtgtagagcagaccaaacagtgcaaggaggagcccaaggaggagaaggtggtgaagacagagagcgtcctgatcaagcggcgcctgtcagcccagggccaagccatctcggtggtgggttccctgagctccatgtcccccctggaggaagaggcaccgcaggccaagaggaggccagagcccattatccctgtcactcagccccggctggcaggcgctggtgggcgcaagaaaattttccgtctcagcgacgtgctgaagccccttaccgatgcccaggtggaagccatgaagctgggcgctgtgaagcggatcctgcgggctgagaaggctgtggcctgcagcggggcagcccaggtccgcataaagatcctggccagcctggtgacacagttcaactcgggcctgaaggcggaggtcctgtccttcatcctggaggatgtgcgggcccgcctggacctggccttcgcctggctctaccaggagtacaacgcctacctggccgcaggtgcctcgggctccctggacaagtatgaggactgcctcatccgcctgttgtctggcctgcaggagaaaccagaccagaaggatgggatcttcaccaaggttgtgctggaggcgccactcatcacagagagtgccctggaggtggtccgcaagtactgcgaggatgagagtcgcacctatctgggcatgtccacacttcgagacctgatcttcaagcgcccgtcccgccagttccagtacctgcatgtcctcctcgacctcagctcccatgagaaggacaaggtgcgctcccaggccctgctgttcatcaaacgcatgtatgagaaggagcagctgcgggagtatgtggagaaatttgccctcaactacctgcagctcctggtgcaccccaacccaccgtctgtgctgtttggagctgacaaggacacagaggtggcagcaccctggacggaggagacagtgaagcagtgtctgtacctctacctggccctcctgcctcagaaccacaagctgatccacgaactggcggccgtgtacactgaagccatcgccgacatcaagcggacggtgctgagggtcattgagcagccgatccgaggaatgggcatgaactccccggagctgctcctgctggtggaaaattgtcccaagggagcagagacactggtcacgagatgtctgcacagcctcacagacaaagtcccaccctccccagagctggtgaagcgggtccgggatctctaccacaagcgactgccagacgtccgcttcctcatcccggtgctcaatgggctggagaagaaagaggtgatccaggccctgcctaaactcatcaaactcaaccccatcgtggtgaaggaagtcttcaaccgcctgctgggcacccagcatggtgagggaaactcagccttgtccccgctgaaccctggagagctcctgatcgcattacacaacattgactccgtgaagtgcgacatgaaatccatcatcaaagccaccaacctgtgctttgcggagcggaacgtgtacacgtcagaggtgctggccgtggtgatgcagcagctgatggagcagagccccctgcccatgctgctcatgaggaccgtcatccagtccctgaccatgtacccccgcctggggggcttcgtcatgaacatcctgtcccgcctcatcatgaagcaggtgtggaagtaccccaaggtgtgggagggcttcatcaagtgctgccagcgcacaaagccccagagcttccaggtcatcctgcagctgccgccccagcagctgggagccgtctttgacaagtgcccagagctccgggagcccctgctggcccatgtccgctccttcaccccccaccagcaagctcacatccctaactccatcatgaccatcttggaggccagcggcaagcaggagccagaggccaaggaggcgcctgcggggcccttggaggaggatgatctggagcccctgaccttggccccggccccagcaccccggccccctcaggacctcatcggcctgcgactggcccaggagaaggccttaaagcggcagctggaggaggaacagaagctgaagccgggaggagtgggagccccctcctcttcctccccctctccctctccgtcggcccggccaggcccgcccccgtctgaggaagccatggatttccgggaggaggggcctgagtgcgagaccccgggcatcttcatcagcatggatgacgactcggggctgaccgaggccgcgctgttggactctagtctcgagggccccctacccaaggagacggcagcgggcgggctgaccttgaaggaggagcggagcccccagaccctcgcacctgttggagaagatgctatgaagactcccagcccggctgccgaggacgccagggaacccgaggccaaggggaacagctgacggggctcgagggggaaagggggtgggacagggactcggggctgggggacggggcggggcttgacctgcgggtgctttgccttaaaaagaaataaa

SEQ ID NO: 62170 - DNA, 2004 bp, Homo Sapiens
gtcagagacagaaaactcactacatatgggctatagtgcactagaaataaagagtaaaatgttagccctagagaaagcagatacctgtatttacaaccctttgggtggatcagatcttcagtatacaaatcgggtagataaagtggtaataaatccatactttggtctaggagctccagactactcaaaaatccaaatacctaaacaggaaaaatggcagagaagcatgagcagtgtcacagaagacaaggaacgacagtgggtagatgattttcctctccaccgaagcgcctgtgaaggagattcagaattactaagccgtcttctcagtgaaagattttcagtcaaccagttagatagtgaccactgggcacccattcattatgcatgctggtatggaaaagttgaggccactcgcatattgttagagaaaggaaagtgcaatccaaaccttttaaatggacaacttagttctcctcttcattttgctgctggaggaggacatgctgaaatagtacagattctcctaaaccacccagaaacggatagacatataacagaccaacaaggaagatctccattaaatatttgtgaagaaaacaaacaaaacaactgggaagaagctgcaaaattgttgaaggaagcaattaacaaaccatatgaaaaagttcgaatatacagaatggatgggtcatatcgttctgttgaattgaagcatggaaataataccacagtgcagcagataatggaaggaatgcgtctctctcaagaaactcagcaatatttcactatatggatttgttcagaaaacctcagccttcaactcaaaccatatcataaacccttgcaacatgttcgtgactggccagaaatacttgctgaattgactaatctggatcctcaaagggaaacacctcagctttttctaagaagagatgtgagacttcccttggaagttgaaaaacagattgaagacccactagctattcttattctctttgatgaagccagatataatttattgaagggcttttatacagctcctgatgctaagctgataacattggcaagtctgcttttgcaaatagtctatggaaattatgagagtaaaaaacacaagcaaggtttcctaaatgaagaaaatctaaaatccatcgtacctgttaccaaactgaaaagtaaggcacctcactggacaaatcgcatacttcatgaatacaagaatctcagtacaagtgaaggtgtcagtaaagaaatgcatcaccttcagcgcatgttcttacagaattgctgggaaattcctacttatggagcagcatttttcacaggacagatatttacaaaggcaagccccagcaatcataaagtcatccctgtgtatgtaggagtgaatataaaaggacttcatctcctcaacatggaaactaaggctttactcatcagtcttaagtatggttgttttatgtggcaattgggagatactgatacttgttttcagatccatagcatggaaaataaaatgagctttatagtacatacaaaacaggctggtctcgtggtaaaactgttaatgaagctaaatggacagttaatggccactgaaagaaattcatgaaagagaagtaactgttactcaagccaccacattttggtgatgcagagtttcctttccgcgaaagatttcttaaaatattacttttgggccctagcatggcgggtcaaccctgtaattccagcactttgggagggtgggggcagggcgggatcaactgaagtcagagttcaagacagcctgggcaacatggtgaaacctgtctctacaaaaatacaaaaattaggtgggtgtggtggggggcgcctattcatcctagctactaggggagggcaaggtgggggagatcgcttaaccccaggaggtgggggttgttgtgagccaagattgcaccacggcacgctagcctgggtgacacaggaagactccatctcaaaaaaaaaaaaaaaaaa

SEQ ID NO: 62171 - DNA, 758 bp, Homo Sapiens
  misc_feature (464)..(464): n is a, c, g, or t
tcgagaagcattattttaatgtaggaccagttataatcttaaagaactgactaggttctaaaataatagaactgagaaataggactgagaaatgaccaacatcaagtataatacggtacacttagcacttgtttctatagaaaacatttcaaatcaagttctttatgatgtgaaccagattttccaaatgcctaaaccacttctgagctttaagcaaggcctcagaaattcagcgggtgcctgggaggcttcattcacattcacctctgaggagaggctaaaagaggaatttccagatggcagctactggctcagaaccagggggtcccttgccaagtctgtctctatgtggctcccggaattgctgaggtctcacttctcagatggctttgatggaacatatagcaacagctgacgctcactgtgcatcggaactctggcatgcttcctgatgggtgcatcgntagtagactgaaaaattgattggagcgtttgctttatccttacacccggatgtctttgtgatggatagcagttgttgaaatatatataaattctcgtcagccgaaatttgccagaacatatttgtgcaccgaggggcaatttcttaaatggggtcgtttataatgtgatactagtgaggaggactcgctttgatgtaaatatgtgttggccctgttgtgtaaacccgcctgaataatatggtggtattcttctaaagagccctgtcgattacacgtgggtggcgcctttttgct

SEQ ID NO: 62172 - DNA, 534 bp, Homo Sapiens
gccgacagtccctccttgtctgtctccgggattcaggcctccctccctgacatggagagtaacctgtctggcctggtgcctgctgccgggctggtgcctgcgctgccacctgctgtgaccctggggctgacagctgcctacaccaccctgtatgccctgctcttcttctccgtctatgcccagctctggctggtgcttctgtatgggcacaagcgtctcagctatcagacggtgttcctggccctctgtctgctctgggccgccttgcgtaccaccctcttctccttctacttccgagatactccccgcgccaaccgcctggggcccttgcccttctggcttctctactgctgccccgtctgcctgcagttcttcaccttgacgcttatgaacctctactttgcccaggtggtgttcaaggccaaggtgaagcgtcggccggagatgagccgaggcttgctcgctgtcagaggggcctttgtgggggcctcgctgctctttctgctggtgaacgtgctgtgtgctgtgctctcc

SEQ ID NO: 62173 - DNA, 6648 bp, Homo Sapiens
gttgttggctcccacctcttcacatgttccagggttgaactcaaccgtggccccagcatgctcacctgtcctggtgccagcttcggctctggccagtccttttccgtcagcaccaaatccagctcctcctctggctcctcttccggtcctggcaccatcgccaggtgctgctcctgtcctggcttcatcacagactccggttccagttatggctccatcgtctactccaggaacctctttagcctcagcttcaccggtaccagctccaacccctgtgttggctccatcatcaactcaaactatgctaccagccccggttccgtcacctctcccgagcccggcttctacgcagacactggccctagccccagctttagcacccactcttggaggctcatctccatctcagacactctctttgggaacggggaacccccagggaccctttccaactcagacattgtcattaactccagcatcatccctggtaccaactccagcccagacactgtctttggcaccaggaccaccactgggtccaactcagacgctgtctctggctccagcaccccctctggctccagcttctccagtgggcccagccccagctcacacgctgactttggctccagcatcgtcatctgcttcactcctggccccagcttcagtgcagacactgaccttgagccctgccccagttcctaccctgggcccggccgcagctcagaccttggcgctggccccagcctccacacagtccccagcttcccaggcatcttcccttgtggtttcggcatctggtgccgctcccttgcctgtcaccatggtatcccggctgcctgtttccaaggatgagcctgacacactgacattgcgctctggtccccccagccctccctccactgctacctcgtttggtggcccccggcctcgacgccagccccccccaccacctcgttcccctttttatctggactccctggaggaaaagcggaagcggcagcggtctgaacgcctggaacggattttccaacttagtgaggctcatggggccctggcacctgtgtatgggactgaagtcctggatttctgtaccctgccccaacctgttgccagccccatcggccctcgttctcctggccccagccaccccaccttttggacttataccgaggctgcccaccgggctgtactgtttccccagcagcgactagaccagctgtcagaaatcattgagaggttcatctttgtcatgcctcctgtggaggcacctcccccttccctgcatgcctgccacccacctccttggctggccccacgtcaggcagccttccaggagcaattggcctctgagctctggccccgggctcgtcctttgcaccgtattgtgtgtaacatgcgcacccagttccctgacttaagactcatccagtatgattgcggaaagttgcagacgttggcagtgctgttgcggcagctcaaggcagagggccaccgagtgctcatcttcacccagatgacccgaatgctggatgtattggagcagtttctcacctaccatggccatctctacctgcgcctggatggatctactagagttgaacagagacaggccttgatggaacggttcaatgcagacaaacgcatattctgcttcatcctttcaactcggagtgggggtgtgggcgtgaacctgacaggagcagacactgttgttttttatgacagcgactggaatcccaccatggatgctcaggcccaggaccgctgtcaccgaattggccagacccgggatgtccacatatataggcttatcagtgaacggacagtggaggagaacatcctaaaaaaggcaaatcagaagagaatgttgggggacatggccattgagggaggcaacttcaccacagcctatttcaaacagcagaccatccgagagctgtttgatatgcccctggaggaaccttctagctcatccgtgccctctgcccctgaagaggaggaagagactgtggccagcaagcagactcatattctggagcaggcattgtgtcgggcagaagatgaagaggatatccgtgcagccacccaggccaaggctgaacaggtggctgagcttgcagaatttaatgagaacgatgggtttcctgctggtgagggagaggaagctggccggcctggggctgaggatgaggagatgtcccgggctgagcaggaaattgctgccctcgtagaacagctgacccccattgagcgctatgccatgaaattcctggaggcctcactggaggaggtgagccgagaggagctcaaacaggcagaagagcaagtggaagctgcccgcaaagacctggaccaagccaaggaggaggtgttccgcctaccccaagaggaggaggaggggccgggggctggggatgagagttcctgtgggactggtggaggcacccaccggcgcagtaaaaaggccaaagcccctgagaggccggggactcgtgtcagtgagcgtcttcgtggagcccgggctgagactcaaggggcaaaccacactcctgtcatatccgcccatcaaactcgcagcaccaccacaccaccccgctgcagtcctgccagggagcgagttcccaggccagcacctaggcctcgacccactccagcttcagctccggctgcaattcctgcccttgttcctgtcccagtttctgccccagtacccatttcagccccaaatccaataaccattctccctgtccatatcttgccttctcctccccctccttcacagattcctccttgttcttctcctgcctgcacccctcctcctgcctgtacccctccaccagctcatacaccgcctccagcccaaacctgtcttgtaactccttcctctcctctcttgcttggtccaccttctgtgcccatctctgcctcagtcactaatctccccttgggcttgaggcctgaggcagagctgtgtgcccaggcattggcatctccagagtccctggagctggcttctgtggccagttcagaaacctcctcactttctcttgtgccccctaaagatctgttgccagttgctgtggagatcctgcctgtgtcagagaagaacctttctctcaccccttctgcacccagcctgaccttggaggctggcagcatccccaatggtcaagagcaggaggcaccagattctgctgaggggaccacccttacagtgctgcctgaaggtgaggagttgcccctgtgtgtgagtgagagcaatggcctggagctcccaccctcagcagcatctgatgagccacttcaggagccactggaggctgacaggacctcggaagagctgacagaggccaagaccccaacctccagcccagagaagccacaggaactcgttacagctgaggttgcagctccatccacctcatcttcagccacttcctcgcctgagggtccttcacctgcccgacctcctcggcgtcgcaccagtgctgatgtggaaattaggggtcaagggactggtcggccaggacaaccaccaggccccaaagtgcttcgaaagctgccaggacggctggtaactgtggtagaggaaaaggaactggtgcggcggcggcggcagcagcggggagctgccagcaccctagtgcctggggtctctgagactagtgccagcccgggaagcccgtctgtccgcagcatgtcagggccagaatcctcccctcccattggtgggccctgtgaagctgctccttcatcctcactgcccactccaccccagcagcccttcattgctcgccgtcacattgagctgggggtgactggtggtggcagccccgagaatggagacggagcactgctcgccatcaccccacctgctgtgaaacgtcggagggggaggccccccaagaagaacaggtctccagcagatgctgggagaggtgtggatgaggcaccctcatccaccttgaagggaaaaaccaatggggctgacccagtccctgggcctgagaccctaattgttgcagatcctgtcctggaaccacagcttattcctgggccccagcctcttggaccccagccagttcacagacccaatcccctcctgtcacctgtggagaaaagaaggcgaggacgaccccctaaagcacgagatttgcccatccctgggaccatttcctctgcaggggatggcaactccgaaagtcggacacagccacccccacacccatcacccctaaccccactcccaccactgctagtttgtcccactgctactgttgccaacactgtcaccactgtcaccatttcaacgtccccacccaaacggaagaggggccgacctcccaagaatcctccatcacctcggcccagccagctccccgtcttggaccgtgacagcacttctgttctcgagagctgtggattggggaggcgacggcaaccccagggccaaggggagagtgagggtagttcctctgatgaggatggaagccgccccctcacccgcctggcccgccttcggcttgaagcagaaggaatgcgaggacggaagagtggagggtccatggtggtggctgtaattcaggatgacctggacttagcagatagcgggccaggcgggttggaattgacaccacctgtggtctcactaaccccaaaactgcgctcgacccggctgcgtccagggtctctagtccccccactagagactgagaagttgcctcgcaaacgagcaggggccccagttggtgggagtcctgggctggcaaagcggggccgcctacagcccccaagtcccctggggcctgagggttcagtagaggagtctgaggctgaagcctcaggtgaggaggaggaaggggatgggaccccacgccgacgtcctggcccccgccggcttgttgggaccaccaaccaaggggaccagcgcatcctgcgcagcagcgcccctccctccctggctggccctgctgttagtcacagaggccgcaaggccaagacgtgagtgggctgcccctccacctaggctttccaccgtggccactccctccatgaccaggcctgactctgttaaccactacttgaagtcttgagggggaaagcctccagggagacataggggccttctcccttcttcccaccaaagtagggggtaggcaactggttgtcatggaaatggggatcatcacagtccccttccccttcaccccacgtggctgggcagtgttaagggtggcaagatagtctctgtccccacccccttgtacttgattccccagctgtctttcacacagccccccacccttaggggaagggggaggggcttctctacaatgaggtttttttcttttttttttttttttaagaagaaaaaataataaacttagtttctgtatgagcatccgcgtaaggaggcttctgattttctggtctggtggagggttgggtgggaacttgggcatcgtttttctcctccctcttgttcttgcaaagatcctagcacctgatctctagcccaggactatatgttccaggcagaaatctacccaagaagagggaagattggtgaatttgatgtggtagggtgcctttccccagtcagtttgaagtcacagatatccttttcctctcatttcttttccctcggttcctagacgttcctcggagctctttgatgcctcagacctttcccttttatccctcttgctcaggtgcttcctttcacaactttttccagagggcaggcgtcctagctccagttgctccatcccttgggccctcccctggctcttcatctagccaaactggtttgagtcagccacaccccttcccagctccctgggctcttcacgtggtggctggccactcaaccccacccctgggcttggcttggagccctgagtcagctccatcaccacccaagccaaaccaaagctgaggcaggagccgaaactcagagtccttcaaggcctatagccaggtgatggaggacgaggagaaggcagtggagatcttgggcaacacggaagctgctcatcctccatcccccatccgctgctgctggctccgcctccgctgcttggcagctactagcattatctgtggctgctcttgcctgggagtcatggctctggtgtttgccatcaaggcggaagagcggcataaagcaggccggtccgaggaggcagtgcgctggggggcccgggcccggaaactcatcctggccagctttgctgtctggcttgctgtcctcattctgggtcccctgctgctgtggttgctctcctacgccatcgctcaggctgagtgaccctggatggcctctgctgagagccagccgagacctcctggatcctgcaatgcggcattgctaaggtcctgtgacagcagtggttggaaggatcctggttggaaggatggggactctctcaaggggctttggaagagctcttctagccctttataaaaggagggcagcagctgagactgatgagaggagggcagcctgctctgttctttcagggccccccacccccatctcccctaccctagcccaccctagggcctctacccagcgggaggggttgaagaccaggcctggttttattagaattcattttgtaataaaagccttttttagtggtg

SEQ ID NO: 62174 - DNA, 6540 bp, Homo Sapiens
cgtttgaatagtagccttgaaaggcggggtcgacggatagaccacgtactcctaaatgctgatggcattcgaggttttccagttgttcttcagcaaatcagtaagagtctcaattatctgcttatgtcagccagtcaaaccaaatcagagagtgtggaagaaaagggaggaggccctccacggtgcagcatcactgaactgcttcagatgtgctggcccagcctaagcgaggactgtgttgccagccacaccaccctctcccagcagctagatcaggtccttcagtcactgagagaggcactagagctgccagagcccaggactcctccactgtcttccctggtggagcaggcagcccagaaagctccagaggcagaggcccaccctgtgcagatccagactcagctcctccagaagaacctgggcaaacagaccccatcaggcagcaggcagatggactacttgggcaccttcttcagttactgcagcacccttgctgcagttctccttcaaagtttgagctctgagcctgatcatgtggaggtcaaggtaggaaatccctttgttctgctgcaacagagctcttcccaactggtgtcacatctcctgtttgagagacaagttcccccagagagactggcagcccttctggcccaagagaatctcagcctaagtgtgccacaggtcatcgtcagctgctgctgtgagccccttgctctttgctcatcccggcaaagccagcagacctcctccctcctgactcgtctgggtactctggcccagctacacgcctctcactgcctggatgacctcccactttctacaccgagctccccgaggacaactgagaaccctacattggaaagaaagccctactcctccccaagggactcatcactcccagccctcacctcctctgccttggcctttcttaagtcacgctcaaagctcctagctacggtggcctgcctgggggcttccccgaggttaaaggtcagcaaacccagcttgtcatggaaggaacttcgtggccgcagggaggtgcctctggctgcagagcaggtagcccgggagtgtgagcgccttctggaacaattccctctgtttgaggccttcctcctggctgcctgggagcccctgcgagggtctttgcagcaggggcagagtctggcagtgaatctctgtggttgggccagtctttctaccgttctcctgggcctacattctcccattgccctagatgtactgagtgaggcttttgaggaatccttggtggccagagattggtcccgggcccttcagctcactgaagtgtacgggcgagatgtggacgatttgagcagcataaaggatgcagtcctgagctgtgctgtggcatatgacaaagaaggttggcaatacctgtttcccgtgaaggatgcatctctgagaagtcggctggccctacagtttgtggacaggtggcccctggagtcatgcctggagattctggcctactgcatttcagacacggctgtccaagaaggactaaagtgtgagctacagaggaagctggcggagctgcaggtgtatcagaagattctgggtttgcagtctcccccagtgtggtgtgactggcagaccttgaggagctgttgtgttgaggacccatcaactgtcatgaacatgattctagaagcacaggagtatgaactgtgtgaagagtggggctgcctgtaccccattccaagagaacatttaatcagccttcatcaaaagcatcttctccaccttctagaaagaagagatcatgacaaggctctgcaactcctgcgaagaatccctgaccccaccatgtgccttgaagtgacagagcaatccctcgaccagcacactagcttggccacttctcacttcttggccaactacctcaccacccacttctatggacaactgactgctgtccgacaccgtgaaatccaggcgctgtatgtgggatccaagattctgctgaccctgcctgagcagcaccgggccagctattcccacttgtcctctaaccccctgttcatgctggagcagctgcttatgaacatgaaggtggattgggccactgtggctgtgcagactctccagcagctgctggttggacaggagattggcttcactatggacgaggtggactcactgctttccagatacgcagagaaagccctggactttccataccctcagagggagaaacgatcagattctgtgattcacctccaagaaattgtccaccaggctgcagatcccgagaccctccctagatcaccatcagcagagttctctcctgctgctcctcctggtatctccagtatacattcccctagtctaagggaaaggagtttcccaccaacccagccctcacaggaatttgtgcccccagcgacaccccctgccaggcaccagtgggtaccggatgagactgagagtatctgcatggtctgctgcagggagcacttcaccatgtttaacaggcgtcatcattgtcgccgctgtggccggctagtgtgcagctcctgctccactaagaaaatggtggttgaaggctgcagagagaaccctgctcgtgtgtgtgatcagtgctatagttactgcaacaaagatgtaccagaggagccttcagaaaaaccagaagctctagacagctccaagagtgaaagccctccatactcgtttgtggtgagagtccccaaagcagatgaggtggaatggattttggatctcaaagaggaggaaaatgagctggtgcggagtgaattttactatgagcaggcccccagcgcctccttgtgcattgccatcctgaatctgcaccgggacagcattgcctgtggtcaccagctgattgagcactgctgcaggctctccaagggcctcaccaacccagaggtggatgccgggctgctcacggacatcatgaagcagctgctgttcagcgccaagatgatgttcgtcaaagccggccagagccaagacttggctctttgtgacagctacatcagcaaggtagatgtgctgaatattttagttgctgctgcctatcgccacgtgccatctttggatcagatcttgcagccagctgcagtaaccaggctaaggaaccagcttttggaagccgagtactaccaactgggcgttgaggtctccacaaagactgggcttgataccaccggggcgtggcatgcttggggcatggcctgcctcaaagccgggaacctcactgctgcacgggagaagttcagtcgctgtctgaagcccccatttgacctcaatcagctgaatcatggctcaaggctggtgcaggatgtggttgagtacctagagtccacagtgaggccctttgtatccttgcaagatgacgattactttgccaccctgagggaactggaagctacccttcggacgcagagcctttctctggcagtgattcctgaagggaaaatcatgaacaacacctactaccaggaatgcctcttctacctgcacaactatagcaccaacctggccatcatcagcttctacgtgaggcacagctgcctgcgggaagctcttctgcaccttctcaacaaggagagtcctccagaagtttttatagaaggcattttccaaccaagctataaaagtgggaagctacacactttggagaacttgctagaatccattgatccaaccttggagagctggggaaagtacttgattgctgcctgccaacatttacagaagaagaactactaccacattctgtatgagctgcagcagtttatgaaggaccaagttcgggccgccatgacctgtattcggttcttcagtcacaaagcaaagtcatatacagaactgggagagaagctctcatggctacttaaggccaaggaccacctgaagatctacctccaagaaacatcccgcagctctggaaggaagaaaaccacattcttcagaaagaagatgactgcagctgatgtgtcaaggcacatgaacacacttcagctgcagatggaagtgaccaggttcttgcatcggtgcgaaagtgctgggacctctcaaatcaccactttgcctctgccaaccctgtttggaaataaccacatgaaaatggatgttgcctgcaaggtcatgctgggagggaaaaatgtagaagatggttttggaattgctttccgtgttctgcaggacttccagctggatgctgccatgacctactgcagagctgcccgccagttggtggagaaagagaagtacagtgagatccagcaactgctcaaatgtgtcagtgagtcaggcatggcagccaaaagtgacggggacaccatcctcctcaactgcctggaagcgttcaagagaattccgccccaggagctggagggcctgatccaggcaatacacaatgatgacaacaaggttcgggcctacctgatatgttgcaaactgcgttctgcctacttgattgctgtgaagcaagaacactcacgggccacagcccttgtccagcaggtgcagcaggccgccaagagcagcggggatgcagtagtgcaagacatctgtgcccagtggcttctgacaagccacccccggggtgcccatggcccaggctccaggaagtgaccttgggcagtggggccaggaacacgtggcctgagagctgggcaacagcagtgatggcgatgccctccacctctttcctccagtggagtgggacttctctggctctgccctaggttggaaagagttggattggaccctacttgccttcccgggcaaggataggacctttcacgcaagtgccatgtttctctaaaattgtggaatctatgtgtgtttgtctggagatggccagttctttctacctcagagtgagtgagtgagtatgtgtgcacacacgtgtgcatgttcctgtgcgctgatgtttacgcccaagcatttctgaacaaatgaaactcttctccatttaaaagaggcactttactttagacttgccactctgaaaaccttccctgcgttttggttcttgacccgggttgtcctgtttgtatagtcccccctctgtggacgtgctttagtagctcctcttacctagagggcttttacagagaattagagcaacaccaaaaggattgcctcttttccttccttcccattccaaaattcagagatggctttggggcaagtgctacctgtggaataaacctgttttccaggtgtctcttctcccaagcacaagaagtcctggagtctttggaaggtagtctgaatagaagggttttcaggtgcaggcatctgaaagctgtgggtatgtgtataaatgatcaggtctgtgaggctaacacgggcaagagggaaagaaaggctaaccatccaaacagggatacaggggaggcggtggggggtggtggggggagcgggtgctcacaagcacagagctgcctgttgtgaatgtccctgctgcaaagttggtgggtgagagaatgggacttcctctttgagagtctggggagagaaaaggtggccaggatcctaggactgaatgactcgattttacctatttgagctgcagtcctgtttgcgctccttgaattggttaggaagctgcttccttttccctcctgcttcccttcagtctcttcaggaccacaggatggatatgcagacatgtggggtcattgggaagggagtgcgcttcttttctctgtcttagaaaagggagtcaagggttggctttggaattgggcctctggacagagtcagaatgagggaataatgaataggtcacatctggttggtggaaaactaggtgaagtgcttctttaatatgcactgtcttgtcttcccacgcaagatgtgacaatgtttgagaaaaggtgtgtcatactcagtgacttcaatttgcaaatgtggggcctaaagaaagctctgcagctctgaacctctcactggccagagctcagcctattggtcccatccatgacgctgagacaaacagaaactggaagctgaagtcagtgtctctggtgcttagaaaccctgtggatttccctctgaaccaagatttttagtagtaaaataaacaactcatggacatctgtcagatgagaagttttggtcctgttagagaggagaaagactgtaatgaaactactagacccatttgggctaaagtttggcttttccttccttgagtcatagaacatatccatctcccaggaaatgtccttctctggcgtctgcttgcccttctgagtctgccttttttgcactgaacataagcactttatactaatgggtcacaaatcttgcagcccttaatttgggataagaccagattttcctgacattttcctctaactcattgaactatcaaattataggcaaccactgactagactgatatgagatgaggctaaaagcctttgaacaccacgctgtagtctccaacagaaaaacaccaccaaaacagatacccatgttgaggggttgaatgttttactacaaacaagccacaataaagtgtctatcaac

SEQ ID NO: 62175 - DNA, 6143 bp, Homo Sapiens
cagttaacgtgatccagccaagcactgtcagcaccaacccagctgtggctgtcgccgagcctgtggtctcctacacctctgtggctacaaccagcttcccactgcacagtcctggtctgttggagacaggcgctcctgtgggtgatatttctgggggagataaatccaagaaaggggtaaaacggaagaagatttcagaagagagtggagaaacagcaaagcggcggtctgcccgtgtccgaaacaccaagtgcaaaaaagaagagaaagtagacttccaggagcttctgatgaagttcttgccgtccaggttaagaaagctggaccctgaggaggaagatgattcctttaataactatgaagtccagtcagaagccaaactggaaagcttcccaagcattgggcctcaaaggctgtcatttgactcagccacattcatggaatctgaaaagcaggacgtgcatgagttcctgctggagaacctaaccaacgggggcatcctggagctgatgatgcgctacctgaaagccatgggccacaagttcttggtaaggtggcctccaggcttggcggaggtcgtgctcagcgtctaccacagctggaggaggcacagcaccagcctgcccaacccgctgctgagggactgcagcaacaagcacatcaaggacatgatgctgatgtctctctcctgcatggaactccagctggaccagtggctgctgaccaaaggcagaagctctgcagtgtctcctcggaactgccctgctggtatggtgaatggcagatttggacctgacttcccagggacccactgcctgggtgacctcctacagctgtcatttgcctcgtcccagcgcgacctgttcgaggatggttggctggagtttgtggtccgtgtttactggctgaaggctcgcttcctggcgctgcagggagacatggagcaggccctggagaactatgacatctgcacagaaatgctccagagttccaccgccatccaggtggaggcaggggctgaacgaagagacattgtcatccggctgcccaacctccataatgactctgtggtttccctggaggagattgataagaacctgaagtcgctggagcggtgccagtccctggaggagattcagcggctgtatgaagcaggcgactacaaggctgttgtgcatctgctccgccccactttgtgcaccagtgggtttgaccgggccaaacacctggagtttatgacttccattcctgagaggccagcccagctgcttcttctgcaggactccttgctccggctgaaggactatcggcagtgttttgagtgttccgatgtggctctgaacgaggctgtccagcagatggtgaactcaggtgaggctgccgccaaggaggagtgggtggccacagtgacccaactgctgatgggcatcgagcaggccctctctgcggacagcagtggtagcatcctgaaggtatcatcctccaccactggccttgtgcggctcaccaacaacctcatccaggtcattgactgcagcatggctgtgcaggaggaggccaaggagccccacgtctcttcagtgctaccctggatcattctacaccggatcatctggcaggaggaagacaccttccattctctgtgccaccagcagcagctccaaaacccagcggaggaagggatgtcagagacgcccatgctcccatcctccctcatgctgctgaacacagcccacgagtatttgggcagaaggtcctggtgctgcaattcagatggggctctgctgcgattctatgtgcgagtactccagaaggaactggctgcatccacctctgaagacacgcacccttacaaggaggagctggagacagccttggagcagtgcttctactgcctgtacagcttccccagcaagaagagtaaggccaggtacctggaggaacactcggcccagcaggtggatcttatatgggaggatgcactgttcatgtttgagtattttaagcccaagacccttcctgaatttgacagctataagaccagcaccgtgtctgctgacttggccaacctactgaagagaattgccaccattgtgcctcgcacagagaggccagcccttagcctggacaaagtctctgcctacattgagggaacttcaactgaggtaccctgcctcccagagggggctgacccctcccctccagtggtgaacgagctttactacctcctggctgattatcatttcaaaaacaaggagcagtccaaggccatcaagttctacatgcatgacatctgcatctgccccaataggtttgattcctgggcaggcatggctctggcccgggccagccgcattcaggacaagctgaactccaatgagctgaagagtgatgggcccatttggaagcatgccacgcccgtcttgaactgcttccgtcgggccctggagattgacagctccaacttgtccctatggattgagtatggcaccatgtcctatgccttgcactcattcgcctcacgtcaattgaagcagtggagaggcgagctgccccctgagctcgtgcagcagatggagggccggcgcgacagcatgctagagacagccaagcactgtttcacatcagcagcccgctgcgagggtgatggtgacgaggaggagtggctcatccactacatgctgggcaaggtggctgagaagcagcagcagccacccaccgtttacttgctgcactacaggcaggctggccactacctgcacgaggaggctgcccgctaccccaagaagatccactaccacaacccacctgagctggccatggaggccctggaggtgtactttcggctccatgcttccatcctgaagctcctggggaagcccgattctggggttggtgcagaggtcctggtcaactttatgaaggaggctgcagaaggaccctttgccaggggcgaggagaagaacacacccaaagcttcagaaaaggagaaggcctgcctggtggacgaggactcccactcttcagctgggacactgccgggccccggagcctccctcccctcctcctctggcccaggtctgacatccccaccttacacagccactccgattgaccacgattacgtcaaatgtaaaaaaccccaccagcaggcaacgccggacgaccgaagccaggacagcacagccgtagcactctcagactctagctcaacgcaggacttctttaatgagcccaccagcttactggaaggctccaggaaatcctacacagagaagaggctgcccattctcagttcccaagcaggagcgacgggtaaagatcttcagggggccacagaagaaagaggaaaaaacgaggagtcattggagagtacagaaggcttccgggctgcagagcaaggtgtccagaagcctgctgcagaaaccccagcctctgcttgcatccctggcaagccctcagcatccacacccaccctgtgggatgggaagaagagaggggacctcccaggggagccagtggccttcccccaggggctgccggctggtgctgaggagcagcggcagtttctcacagagcagtgcatcgcctccttccgcctgtgcctgagccgcttcccccagcactataagagtctctaccgtctggccttcctctacacctacagcaagacccaccggaacctccagtgggcccgcgacgtgttgctaggcagcagtatcccgtggcaacaactgcagcacatgccggcacaggggctcttctgcgagaggaacaagaccaatttcttcaacggcatctggcggatccccgtggacgagattgaccggccgggcagctttgcctggcacatgaaccgctccatcgtgctgctgctcaaggtgctggcccagctgcgggaccacagcaccctgctgaaggtgtcctccatgcttcagcggaccccagaccagggcaagaagtatctgcgagatgctgaccgccaggtcctggcgcagcgggccttcatcctcactgtgaaggtgctcgaagacacgctgagcgagctcgcagaggggtcagaacgcccagggcccaaggtctgtggcctccccggagccaggatgaccaccgatgtctcacacaaggccagtcctgaggatggccaggagggcctcccccagccgaagaagccccctctggctgatggctcagggccagggcccgagccaggaggcaaagtgggcctcctcaaccaccggcctgtggccatggatgcaggagacagtgcagaccaaagcggggagcggaaggataaagagagcccacgggcagggcccactgagcccatggacacgagtgaggccactgtttgccactcagacttggagcggacaccacccctgctgccaggtcgccccgcaagggaccggggccccgagagccggcccactgagctgtccctggaggagctgagcatcagtgcccggcagcagcccaccccgctcaccccagcccagccagcccccgcccccgcccccgccaccaccacagggaccagggcagggggccacccggaggagccgctctcccggctcagccgcaagaggaagctcctggaggacacagagtcaggcaagacacttctgttggatgcctaccgtgtgtggcagcagggccagaagggtgtggcctatgacctgggccgtgtggagaggatcatgtcggagacctacatgctcatcaagcaggtggatgaggaggctgcgctggagcaggctgtgaagttctgccaggtccatcttggggctgccgcccagagacaggcctcgggggacacccccaccactccaaagcaccccaaagacagccgagagaacttctttcctgtgacagtggtgcccacagcccctgaccctgtgccagctgactctgtccagcggcccagtgatgctcacaccaagcctcgccctgcactagctgccgccacaactattatcacctgccctccgtcagcatcagcttccaccctggaccagtccaaggaccctgggcctccccggccacacaggcctgaagctacccccagcatggcctctctgggcccagagggagaagagctggcgagagtggcagagggcaccagcttcccgcctcaggagccacggcacagtccgcaggtgaagatggcccccacaagttccccggcagagccacactgctggccggcagaggctgccctgggcacaggcgctgagcccacctgcagccaggaggggaaactgaggcctgagccgagaagggatggggaggctcaggaggctgcgagtgagactcagcccctgagctctcccccaacagctgccagctccaaggcccccagcagtgggagtgcccagccaccagagggtcacccaggcaagcctgagcccagccgggctaagtcccgccccctgcccaacatgccaaagctggtcatcccctccgccgccaccaagttcccccctgagatcaccgtcacgccacccaccccaaccctgctctcccccaaaggcagcatctcggaggagaccaagcagaagctgaagtcagccatcctttctgcccagtctgctgccaacgtgaggaaggagagcctatgccagccagccctggaggtcctggagacatccagccaggagtcctcgctggagagcgagacagacgaggacgacgactacatggacatttgaggggccactgcagccccaccgccacgccccaggggaccagccaggcctggaatgccccctgggcaggaccctgggcaggaccagaggcccacatggatgccactccccacacagcccccaggcctgcccagcccacctcctcatggcatcctccctgtacccaggtcaggctgtccacaccacatgggagcccagaggaggaggggcccgccttagccatgtgaaggtggattggtcgccatctgcacgccaggcggcatccttttctatgaagtgttgactttgtaaatctgcccacacccagctggccatatccacccctcgacgccgggatgagccggctctgcctgtgtcacagtggaggggtcctttagggccaggctcacccctcaccctttttttggttgcttttctaataaagatggaacagtt

SEQ ID NO: 62176 - DNA, 5391 bp, Homo Sapiens
cgcttccctcactgggtcctgcgtccttgggcaggcgatgcccctgcggggaggggctggtccatccccggccagccacggacccacgcatggacccagcgacccacggacctgcttacctgggcgcggcgcgggtggcatgcggccacacggaaggggcgcgctgggctgctgcggcctctgcagcttctacacctgccacggggcggccggagatgaaatcatgcaccaggacatcgtcccgctctgtgctgccgacatccaggaccagctaaagaagcgctttgcttacctgtccggtgggcgggggcaggacggaagcccggttatcaccttccctgactacccggccttcagcgagattccggacaaggagttccagaatgtcatgacctacctcaccagcatccccagcctgcaggacgctggcatcggattcatcctggtgatagaccggcgacgggacaaatggacctccgtgaaggcgtccgtcctgcgcatcgcagcatctttcccggcaaacctgcagctcgtcctcgtgcttcgcccgacgggttttttccaaaggactctctccgacatcgctttcaaattcaatagagatgactttaagatgaaggtgccggtcataatgctgagctccgtaccagacttacacggttacatcgataagtcgcagctgaccgaggacctgggtgggaccctggactactgccactcccggtggctgtgccagcgcacggccatcgaaagtttcgccctcatggtgaagcagacggctcagatgctgcagtccttcgggaccgagctggctgaaacagagctgcccaatgacgtccagtcgacaagctcagtgctgtgtgcgcacacagagaagaaggacaaggcgaaggaggatttgaggctggcactgaaagaggggcacagtgtcctggagagcctcagggagctgcaggctgagggctcagagcccagtgtgaaccaggaccagcttgacaaccaggccaccgtgcagaggctcctggcccagctgaacgaaaccgaggctgccttcgatgagttctgggcaaagcatcagcagaaactggagcagtgtctgcagctccggcactttgagcagggcttccgggaggtcaaagccatcttggacgcagcgtcccagaagatagcaaccttcacagacatcggcaacagcctggcgcatgtggagcacctgctgagggacctggccagcttcgaggagaaatcaggcgtggccgtggagagggcccgggccctgtctctggacggcgagcagctcattgggaacaagcactacgcggtagactccatccgcccaaagtgccaggagctccggcacctctgtgaccagttctctgcggagatcgcaaggaggagggggctgctcagcaagtccctggagctgcaccgccgcctggagacgtccatgaagtggtgtgatgaagggatttacctgctggcctcacaacctgtggacaagtgccagtcccaggacggcgcggaggctgccctccaggaaatcgagaagtttttggagaccggtgcggaaaataagatccaggagctcaacgcgatttacaaggaatacgaatccatcctcaaccaagatctcatggagcacgtgcgaaaggtcttccagaagcaggcaagcatggaggaggtgttccaccgcaggcaggccagcctgaagaagctggcggccaggcagacgcggcccgtgcagccggtggcccccagacccgaggcactggcaaagtcgccctgcccctccccaggcattcggcgaggctctgagaactccagctccgagggcggtgcgctccggagagggccctaccggagggccaagagtgagatgagtgagagccggcagggccgcggctcagcgggggaggaggaggaaagcctggccatcctgcgcaggcacgtgatgagcgagctcctggacacagaacgggcctacgtggaggagctgctgtgcgtcctggagggctacgccgcggagatggataacccactgatggctcacctcctgtcaacaggccttcacaacaagaaggatgttttgtttggaaacatggaggaaatctatcacttccacaacaggatattcctcagggagctggaaaactacactgactgcccagaactggttggaagatgctttctggagaggatggaagatttccagatctatgagaagtactgtcagaacaagccccgctctgagagcctgtggagacagtgctccgactgcccgtttttccaggaatgccagagaaagctggaccacaagctgagcctggactcctacctgctgaagccagtgcagaggatcaccaagtaccagctgctgctcaaggaaatgctgaaatacagcaggaactgcgagggggctgaggacctgcaggaggcgctgagctccatcctgggcatcctgaaggccgtgaacgactccatgcacctcatcgctatcaccggctatgacgggaatctcggcgacctgggcaagctgctgatgcagggctcattcagcgtctggaccgaccacaagaggggccacaccaaggtgaaggagctggccaggttcaagcccatgcagcggcacctgttcctgcacgagaaggcagtgctcttctgcaagaagagggaggagaatggggaggggtatgagaaagctccctcctacagctacaagcagtccttaaacatggctgccgttggcattacggagaacgtgaagggagatgctaagaagttcgagatctggtacaacgcgcgcgaggaggtctacatcgtccaggcgccaactcctgagattaaagccgcgtgggtgaatgaaattcggaaagtgctgaccagccagctgcaggcttgtagagaagccagccagcaccgggcgctggagcagtcacagagcctgcccctgccggccccgaccagcaccagtccctcaagaggaaactcaaggaacatcaagaagctggaagaaaggaaaacagaccccctaagcctggagggatacgtcagctcagcgccactgacaaagccccccgaaaagggcaaaggttggagcaaaacgtcccactcactggaggcacctgaggacgacgggggctggtcaagtgcagaggagcagattaactcgtccgacgcagaggaggacggcgggttgggccccaagaagctggttccaggtaaatacacggtcgtggcggaccacgagaagggaggccccgatgcgctgcgcgtgaggagcggggacgtggtggagctggtgcaggagggcgacgagggcctctggtaagaccccgcgctcagccccggactgccccgcacgtggctgccgctgaccctcgccccttgcaggtacgtcagggacccgaccactggcaaggagggctgggtgccggccagcagcctgtccgtccggctcggcccgtccggctcggcccagtgcctgagcagctcaggtaaggcccacgtgccccgagcccacccgtgacgctgccaagggcccgggcgaggaagctgccccgtgtgtgcccggcagagccgacgccgaagcccgtccccgcctgatctccccgcagagtcgagcccggggtcggccgtgctgagcaactcgtccagctgcagcgagggcggccaggcccccttctccgacctgcaggggtagcgcggcctcggcgccggagacccgcgcgctgtctggggctgcggtggcgtggggagggcgcggcccccggacgccccgaggaaggggcacctcaccgccccgacccagagcgcctggccgtgcgggctgcagaggacccctccggggcagaggcaggttccacggaagaccccggcccgctggggcttccccggagactccagagcccacagaggaggggccgcagggaacagccccgggcggcaggcgccgggcagcggcatctcgtcctggctccaccgtgctgcttctgcctccggacggtgctttcaggggacgcgcggaccgtggtggagctgcttccggagaagtggaggatcctctggccaacggcctgaggagagcggggcacggggtctctttagcttttacaagttttaggattttttcaagcagggatcaatcccgtggccattttttgtggtactttggcctcaattcttcaccaggaatcactgtgtttacatgaaatgacaatttgatactgtatttgatagaaaactatttttttgttaccggggtttacatagaagcacgttgtttataccactaagtgactttggcggggctctcccatggaaacggatggcactccctgaagctccctggtcacaggtggatgaaaacgtgtccgtgggtgacatcaggtggtgtctccaccaccaaaagcagttagaagccaaggagattcctttatctacctagggttcattttcaaaagaaaatttaaactataatttaaacaattaacgttcttttctacaaaaaaaaatgcagggacttgatttttttaaagagcttcactgaattaggatatttttattgcttttaaagaaaatacaaagttgcagtttctgcagggtgtggcgtggaccagtgctgccgaccatagctcagagagccctgcccctgcctcactgcactgcagcctcctcggaggccgcacctccactccactccccacgcgccccctgcctcccacccaggtccacctgccacctggtgaccaccttgagtacagaagtgaaagtggggagagtattttattcaagtcacagcagaactggaaaaaaactcttctgttttaccaacttcttgtgtttcagaaacatattctgttcaaaacttttgaagccctttcggtgtctagtctgcagatgtttttgtatgtgtgcacctctgaccatgtgtgtacatatgtgtcttgctggaaaggacatattcgctgtccccgtgctgctgggagggccgcctcacagcctcacggttcccagccccagcacagtggaggcaggcgtggctgcattcccctcacgctaccctcccagcggcttgtagccgtcactggccagacctccagggtgcggaatcaaataggaagcatgcagagactcggcagcttttcctctgatgtgtaagttatttggaacgcgtgctgtgtcccgcgatgtccctgatgtactgtgcaggcgcggtgcctccgtctcgtcgcacagctgcgcgcccttgtgtgaccctccccataaaggcactttacagcttcatgtttcatccactgtcacttttttttaactgctgatgtaaatggaattttaaaagcagagttctttattgtatggatgacgtttgaataaatatcagcaactcctgcc

SEQ ID NO: 62177 - DNA, 4606 bp, Homo Sapiens
ggacacctgttctgctgttgtgtcctgccattctcctgaagaacagaggcacactgtaaaacccaacacttccccttgcattctataagattacagcaagatggaaataccaaatccccctacctccaaatgtatcacttactggaaaagaaaagtgaaatctgaatacatgcgacttcgacaacttaaacggcttcaggcaaatatgggtgcaaaggctttgtatgtggcaaattttgcaaaggttcaagaaaaaacccagatcctcaatgaagaatggaagaagcttcgtgtccaacctgttcagtcaatgaagcctgtgagtggacacccttttctcaaaaagtgtaccatagagagcattttcccgggatttgcaagccaacatatgttaatgaggtcactgaacacagttgcattggttcccatcatgtattcctggtcccctctccaacagaactttatggtagaagatgagacggttttgtgcaatattccctacatgggagatgaagtgaaagaagaagatgagacttttattgaggagctgatcaataactatgatgggaaagtccatggtgaagaagagatgatccctggatccgttctgattagtgatgctgtttttctggagttggtcgatgccctgaatcagtactcagatgaggaggaggaagggcacaatgacacctcagatggaaagcaggatgacagcaaagaagatctgccagtaacaagaaagagaaagcgacatgctattgaaggcaacaaaaagagttccaagaaacagttcccaaatgacatgatcttcagtgcaattgcctcaatgttccctgagaatggtgtcccagatgacatgaaggagaggtatcgagaactaacagagatgtcagaccccaatgcacttccccctcagtgcacacccaacatcgatggccccaatgccaagtctgtgcagcgggagcaatctctgcactccttccacacacttttttgccggcgctgctttaaatacgactgcttccttcacccttttcatgccacccctaatgtatataaacgcaagaataaagaaatcaagattgaaccagaaccatgtggcacagactgcttccttttgctggaaggagcaaaggagtatgccatgctccacaacccccgctccaagtgctctggtcgtcgccggagaaggcaccacatagtcagtgcttcctgctccaatgcctcagcctctgctgtggctgagactaaagaaggagacagtgacagggacacaggcaatgactgggcctccagttcttcagaggctaactctcgctgtcagactcccacaaaacagaaggctagtccagccccacctcaactctgcgtagtggaagcaccctcggagcctgtggaatggactggggctgaagaatctctttttcgagtcttccatggcacctacttcaacaacttctgttcaatagccaggcttctggggaccaagacgtgcaagcaggtctttcagtttgcagtcaaagaatcacttatcctgaagctgccaacagatgagctcatgaacccctcacagaagaagaaaagaaagcacagattgtgggctgcacactgcaggaagattcagctgaagaaagataactcttccacacaagtgtacaactaccaaccctgcgaccacccagaccgcccctgtgacagcacctgcccctgcatcatgactcagaatttctgtgagaagttctgccagtgcaacccagactgtcagaatcgtttccctggctgtcgctgtaagacccagtgcaataccaagcaatgtccttgctatctggcagtgcgagaatgtgaccctgacctgtgtctcacctgtggggcctcagagcactgggactgcaaggtggtttcctgtaaaaactgcagcatccagcgtggacttaagaagcacctgctgctggccccctctgatgtggccggatggggcaccttcataaaggagtctgtgcagaagaacgaattcatttctgaatactgtggtgagctcatctctcaggatgaggctgatcgacgcggaaaggtctatgacaaatacatgtccagcttcctcttcaacctcaataatgattttgtagtggatgctactcggaaaggaaacaaaattcgatttgcaaatcattcagtgaatcccaactgttatgccaaagtggtcatggtgaatggagaccatcggattgggatctttgccaagagggcaattcaagctggcgaagagctcttctttgattacaggtacagccaagctgatgctctcaagtacgtggggatcgagagggagaccgacgtcctttagccctcccaggccccacggcagcacttatggtagcggcactgtcttggctttcgtgctcacaccactgctgctcgagtctcctgcactgtgtctcccacactgagaaaccccccaacccactccctctgtagtgaggcctctgccatgtccagagggcacaaaactgtctcaatgagaggggagacagaggcagctagggcttggtctcccaggacagagagttacagaaatgggagactgtttctctggcctcagaagaagcgagcacaggctggggtggatgacttatgcgtgatttcgtgtcggctccccaggctgtggcctcaggaatcaacttaggcagttcccaacaagcgctagcctgtaattgtagctttccacatcaagagtccttatgttattgggatgcaggcaaacctctgtggtcctaagacctggagaggacaggctaagtgaagtgtggtccctggagcctacaagtggtctgggttagaggcgagcctggcaggcagcacagactgaactcagaggtagacaggtcaccttactacctcctccctcgtggcagggctcaaactgaaagagtgtgggttctaagtacaggcattcaaggctgggggaaggaaagctacgccatccttccttagccagagagggagaaccagccagatgatagtagttaaactgctaagcttgggcccaggaggctttgagaaagccttctctgtgtactctggagatagatggagaagtgttttcagattcctgggaacagacaccagtgctccagctcctccaaagttctggcttagcagctgcaggcaagcattatgctgctattgaagaagcattaggggtatgcctggcaggtgtgagcatcctggctcgctggatttgtgggtgttttcaggccttccattccccatagaggcaaggcccaatggccagtgttgcttatcgcttcagggtaggtgggcacaggcttggactagagaggagaaagattggtgtaatctgctttcctgtctgtagtgcctgctgtttggaaagggtgagttagaatatgttccaaggttggtgaggggctaaattgcacgcgtttaggctggcaccccgtgtgcagggcacactggcagagggtatctgaagtgggagaagaagcaggtagaccacctgtcccaggctgtggtgccaccctctctggcattcatgcagagcaaagcactttaaccatttcttttaaaaggtctatagattggggtagagtttggcctaaggtctctagggtccctgcctaaatcccactcctgagggagggggaagaagagagggtgggagattctcctccagtcctgtctcatctcctgggagaggcagacgagtgagtttcacacagaagaatttcatgtgaatggggccagcaagagctgccctgtgtccatggtgggtgtgccgggctggctgggaacaaggagcagtatgttgagtagaaagggtgtgggcgggtatagattggcctgggagtgttacagtagggagcaggcttctcccttctttctgggactcagagccccgcttcttcccactccacttgttgtcccatgaaggaagaagtggggttcctcctgacccagctgcctcttacggtttggtatgggacatgcacacacactcacatgctctcactcaccacactggagggcacacacgtaccccgcacccagcaactcctgacagaaagctcctcccacccaaatgggccaggccccagcatgatcctgaaatctgcatccgccgtggtttgtattcattgtgcatatcagggataccctcaagctggactgtgggttccaaattactcatagaggagaaaaccagagaaagatgaagaggaggagttaggtctatttgaaatgccaggggctcgctgtgaggaataggtaaaaaaaaacttttcaccagcctttgagagactagactgaccccacccttccttcagtgagcagaatcactgtggtcagtctcctgtcccagcttcagttcatgaatactcctgttcctccagtttcccatcctttgtccctgctgtcccccacttttaaagatgggtctcaacccctccccaccacgtcatgatggatggggcaaggtggtggggactaggggagcctggtatacatgcggcttcattgccaataaatttcatgcactttaaagtcctgtggcttgtgacctcttaataaagtgttagaatccattttg

SEQ ID NO: 62178 - DNA, 444 bp, Homo Sapiens
ttttttttttttttttttgatttgcctgctgctgctgccaccaacgtaggattgtcaggagcctgggaagcaagagatgaaggcaaaaaagaaaatagaaaaaaacctaacagacagccgggcgtgccggggcgccgtgtaatcccggcactttggggaactttgtttttaaacgtttacaaacaaaaagattttcgatgcataggccagtcctaatgcatcccataatggggaccaaggcaaaaacacacacacacaactacaaaatattccctaaaaaaatgcaagatcctccgaaaatcaagatctctctaccaaacaacataccaagtcatcacagaagaggtgaagatgcctctcaaaagacatgtgccacagaaatagagcttgaaatactgaacacgatttctcgaagatccttctcaccaccccaagagaagcgcc

SEQ ID NO: 62179 - DNA, 2730 bp, Homo Sapiens; identical to SEQ ID NO: 32058

SEQ ID NO: 62180 - DNA, 564 bp, Homo Sapiens
acagcagcaagaacgtttattataaaaataggtgaataaaataagtgtgctttaacttccggctggatgacaaatgctactgaaatgcagtttctcagtgcagacatgtggctcgcaatggcgggggtggccaccctagtgtgacgtgcagccgcaatactccatttgactggttcgaggcagagaggcgacgctttattccatagaacaggatggggctcccaccctggggaccatacaagtgactccctcaggcagccacccctttctaggcaggctgggggaagggctggcacaccagcaccgagatagctctggcttaagcttgatggagacacagactgggacctccctctgccagatgttcctgaccccatctccacctccagcctccagcctcactggcagttccctgtgacccagcctgttccatagccaaagggaccaaagtgaacgatcagagtgccccgaactattctaggggccttgctctcagtagagctaaaccatggcatctgagagcacccacctgtccctgaggcagctgcacgggccaggaggcaa

SEQ ID NO: 62181 - DNA, 594 bp, Homo Sapiens
  misc_feature (421)..(421): n is a, c, g, or t
ttcgctgccggagtcagttttattagggaagaggggctccctgcccatcccctccccacaccctccttccgggaggtctgtcagccccaactgtagaagtagattttctgccaggtgggcaagtaatccatgagcggccttgtgaccaggccaacgccagggacgtggtcggccagcaactggagcaggaagaggatcctggcctcggagaagcggtcgtagaaaggagagcgcacaggtagtagagcagcaggatggtccggcgccgcagctcccgccgctccctccgggtcaggccctttctgtcactcaggaggctcaggctggtcacgttcacaacacaagccaagagccagggtttccacgacctctgaccccacaggcccaggctgagcaagtgcagcagcggccgtggcgcggntcgacgagtcacgtactcctggtagcggaggcccaggagccgcagcttctccatcctgccctcggcaccgacagacccacagaaggaccgtacgacaggctgcggcgccctgcttcctgcggcctccttcctgcttccggtcttaggcccgcctcttggttgcttaacttccg

SEQ ID NO: 62182 - DNA, 718 bp, Homo Sapiens
  misc_feature (590)..(590): n is a, c, g, or t
ttttttttttttttttttttttttttttttgaccagtttcaccatcttttttattggatacagagccataaattctctgatgcccatgtgagtccttttaaatacatacactcaggtacattcagcaaagggcatcttacgggtgacatggagcaaagtgctgggatggcgatcctgggtggggcagagaagtgtggccggggaaggcccctggggtgtgaggtacaggcaccacttcagaaacaaaaataaaaccaaaaattgctctccacccctctgcctgtgcttggggctggggaagctaccctctcactcaggcccattatagcctagctgtgtaggaaggtagggcctaagggcacgttatggaggttgcccaccagtggtgcccactagaaccaagcctgctggcatcagcctacaaagcaagcctgggtcacctcaggcctctgccctggatacaagacccttgtcagggcagactgaggctggcagccaaggtcaagccccctgggccatgctgcagtgcagaggagctggccacggtgggagctgctgatgtcaggcagcttggactgctagtctaggtnttgggagatcgtgcctactgcccggatcgattttctatctacctatctaggaaggtgcaatacactttccagaactttcccatccagatttcagatcagctgcaagctgtaaacagcatgtttaaaag

SEQ ID NO: 62183 - DNA, 603 bp, Homo Sapiens
  misc_feature (235)..(235): n is a, c, g, or t
  misc_feature (525)..(525): n is a, c, g, or t
acagtttggcagaagacatgtttaataacattttcatatttaaaaaatacagcaacaattctctatctgtccaccatcttgccttgcccttcctggggctgaggcagacaaaggaaaggtaatgaggttagggcccccaggcgggctaagtgctattggcctgctcctgctcaaagagagccatagccagctgggcacggccccctagcccctccaggttgctgaggcggcacgngtggtagagttcttcactgagccgtgggctgcagtctcgcagggagaacttctgcaccagccctggctctacggcccgaaagaggtggagccctgagaaccggagaaaacatccatcacctccagcccctccagggcttcctcctcttcctggcctgccagttcacctgccagccgggctcgggacgccaggtagtcagcgttgtagaagcagccctccgcagaagcctgccggtcaaatctcccccctataggagcccccgggagggtcagcaccaggaagggaagggnggtcacgggcaaccccgggggcctgggggtgatctctttgtgacaggcagattgacttctggaattgatggaagaagc

SEQ ID NO: 62184 - DNA, 510 bp, Homo Sapiens
  misc_feature (454)..(454): n is a, c, g, or t
  misc_feature (456)..(456): n is a, c, g, or t
tttgacactgtgatgaaatcactttaatgtccttgccaaggaaatgcccaagacactggcaggtgggcaagtaagtgtccagatgggaccccgcagctctgtctccactcagcagtgtccgcacgccccaggccagcagcgatcccctcctcgggcaacactggtcttcctgagggcagcccgtgctggggtcccacgcttcgtccatagtgcttgtggggtctctagaactcagtcatcttcttgtgggtgtctgccttcctctgctcctgctgcaggccggcttcctgagcccggagctgccccagctggcgctgggctcctgccagcttctcctgcagctgggctgacgccacgctatgccggccagcgttgcggcgagactccatggatgctcctgatgtcccgctgggttcgctcgatcttctcctcagtctggaagagccgcataagngngcccgcttggcactcttgctggcatggtaatgtccttgctctcctcccgctggg

SEQ ID NO: 62185 - DNA, 5787 bp, Homo Sapiens; identical to SEQ ID NO: 58474

SEQ ID NO: 62186 - DNA, 6121 bp, Homo Sapiens
ctgggcaccccagcaaaccatattatgctccaggggcgcccactccaagacccctccatgggaagctggaatccctgcatggctgtgtgcaggcattgctccgggagccagcccagccagggctttgggaacagcttgggcaactgtacgagtcagagcacgatagtgaggaggccacacgctgctaccacagcgcccttcgatacggaggaagcttcgctgagctggggccccgcattggccgactgcagcaggcccagctctggaactttcatactggctcctgccagcaccgagccaaggtcctgcccccactggagcaagtgtggaacttgctacaccttgagcacaaacggaactatggagccaagcggggaggtcccccggtgaagcgagctgctgaacccccagtggtgcagcctgtgcctcctgcagcactctcaggcccctcaggggaggagggcctcagccctggaggcaagcgaaggagaggctgcaactctgaacagactggccttcccccagggctgccactgcctccaccaccattaccaccaccaccaccaccaccaccaccaccaccaccaccaccacccctgcctggcctggctaccagccccccatttcagctaaccaagccagggctgtggagtaccctgcatggagatgcctggggcccagagcgcaagggttcagcacccccagagcgccaggagcagcggcactcgctgcctcacccatatccatacccagctccagcgtacaccgcgcacccccctggccaccggctggtcccggctgctcccccaggcccaggcccccgccccccaggagcagagagccatggctgcctgcctgccacccgtccccccggaagtgaccttagagagagcagagttcagaggtcgcggatggactccagcgtttcaccagcagcaaccaccgcctgcgtgccttacgccccttcccggccccctggcctccccggcaccaccaccagcagcagcagtagcagcagcagcaacactggtctccggggcgtggagccgaacccaggcattcccggcgctgaccattaccaaactcccgcgctggaggtctctcaccatggccgcctggggccctcggcacacagcagtcggaaaccgttcttgggggctcccgctgccactccccacctatccctgccacctggaccttcctcaccccctccacccccctgtccccgcctcttacgccccccaccaccccctgcctggttgaagggtccggcctgccgggcagcccgagaggatggagagatcttagaagagctcttctttgggactgagggacccccccgccctgccccaccacccctcccccatcgcgagggcttcttggggcctccggcctcccgcttttctgtgggcactcaggattctcacacccctcccactcccccaaccccaaccaccagcagtagcaacagcaacagtggcagccacagcagcagctctgctgggcctgtgtcctttcccccaccaccctatctggccagaagtatagacccccttccccggcctcccagcccagcacagaacccccaggacccacctcttgtacccctgactcttgccctgcctccagcccctccttcctcctgccaccaaaatacctcaggaagcttcaggcgcccggagagcccccggcccagggtctccttcccaaagacccccgaggtggggccggggccacccccaggccccctgagtaaagccccccagcctgtgccgcccggggttggggagctgcctgcccgaggccctcgactctttgattttccccccactccgctggaggaccagtttgaggagccagccgaattcaagatcctacctgatgggctggccaacatcatgaagatgctggacgaatccattcgcaaggaagaggaacagcaacaacacgaagcaggcgtggccccccaacccccgctgaaggagccctttgcatctctgcagtctcctttccccaccgacacagcccccaccactactgctcctgctgtcgccgtcaccaccaccaccaccaccaccaccaccaccacggccacccaggaagaggagaagaagccaccaccagccctaccaccaccaccgcctctagccaagttccctccaccctctcagccacagccaccaccacccccaccccccagcccggccagcctgctcaaatccttggcctccgtgctggagggacaaaagtactgttatcgggggactggagcagctgtttccacccggcctgggcccttgcccaccactcagtattcccctggccccccatcaggtgctaccgccctgccgcccacctcagcggcccctagcgcccagggctccccacagccctctgcttcctcgtcatctcagttctctacctcaggcgggccctgggcccgggagcgcagggcgggcgaagagccagtcccgggccccatgacccccacccaaccgcccccacccctatctctgccccctgctcgctctgagtctgaggtgctagaagagatcagccgggcttgcgagacccttgtggagcgggtgggccggagtgccactgacccagccgacccagtggacacagcagagccagcggacagtgggactgagcgactgctgccccccgcacaggccaaggaggaggctggcggggtggcggcagtgtcaggcagctgtaagcggcgacagaaggagcatcagaaggagcatcggcggcacaggcgggcctgtaaggacagtgtgggtcgtcggccccgtgagggcagggcaaaggccaaggccaaggtccccaaagaaaagagccgccgggtgctggggaacctggacctgcagagcgaggagatccagggtcgtgagaagtcccggcccgatcttggcggggcctccaaggccaagccacccacagctccagcccctccatcagctcctgcaccttctgcccagcccacacccccgtcagcctctgtccctggaaagaaggctcgggaggaagccccagggccaccgggtgtcagccgggccgacatgctgaagctgcgctcacttagtgaggggccccccaaggagctgaagatccggctcatcaaggtagagagtggtgacaaggagacctttatcgcctctgaggtggaagagcggcggctgcgcatggcagacctcaccatcagccactgtgctgctgacgtcgtgcgcgccagcaggaatgccaaggtgaaagggaagtttcgagagtcctacctttcccctgcccagtctgtgaaaccgaagatcaacactgaggagaagctgccccgggaaaaactcaacccccctacacccagcatctatctggagagcaaacgggatgccttctcacctgtcctgctgcagttctgtacagaccctcgaaatcccatcacagtgatccggggcctggcgggctccctgcggctcaacttgggcctcttctccaccaagaccctggtggaagcgagtggcgaacacaccgtggaagttcgcacccaggtgcagcagccctcagatgagaactgggatctgacaggcactcggcagatctggccttgtgagagctcccgttcccacaccaccattgccaagtacgcacagtaccaggcctcatccttccaggagtctctgcaggaggagaaggagagtgaggatgaggagtcagaggagccagacagcaccactggaacccctcctagcagcgcaccagacccgaagaaccatcacatcatcaagtttggcaccaacatcgacttgtctgatgctaagcggtggaagccccagctgcaggagctgctaaagctgcccgccttcatgcgggtaacatccacgggcaacatgctgagccacgtgggccacaccatcctgggcatgaacacggtgcagctgtacatgaaggtgcccggcagccgaacgccaggccaccaggagaataacaacttctgctccgtcaacatcaacattggcccaggcgactgcgagtggttcgcggtgcacgagcactactgggagaccatcagcgctttctgtgatcggcacggcgtggactacttgacgggttcctggtggccaatcctggatgatctctatgcatccaatattcctgtgtaccgcttcgtgcagcgacccggagacctcgtgtggattaatgcggggactgtgcactgggtgcaggccaccggctggtgcaacaacattgcctggaacgtggggcccctcaccgcctatcagtaccagctggccctggaacgatacgagtggaatgaggtgaagaacgtcaaatccatcgtgcccatgattcacgtgtcatggaacgtggctcgcacggtcaaaatcagcgaccccgacttgttcaagatgatcaagttctgcctgctgcagtccatgaagcactgccaggtgcaacgcgagagcctggtgcgggcagggaagaaaatcgcttaccagggccgtgtcaaggacgagccagcctactactgcaacgagtgcgatgtggaggtgtttaacatcctgttcgtgacaagtgagaatggcagccgcaacacgtacctggtacactgcgagggctgtgcccggcgccgcagcgcaggcctgcagggcgtggtggtgctggagcagtaccgcactgaggagctggctcaggcctacgacgccttcacgctggtgagggcccggcgggcgcgcgggcagcggaggagggcactggggcaggctgcagggacgggcttcgggagcccggccgcgcctttccctgagcccccgccggctttctccccccaggccccagccagcacgtcgcgatgaggccggacgccccgcccgcctgcctgcccgcgcaaggcgccgcggggccaccagcacatgcctgggctggacctaggtcccgcctgtggccgagaagggggtcgggcccagcccttccaccccattggcagctcccctcacttaatttattaagaaaaactttttttttttttttagcaaatatgaggaaaaaaggaaaaaaaatgggagacgggggagggggctggcagcccctcgcccaccagcgcctcccctcaccgactttggcctttttagcaacagacacaaggaccaggctccggcggcggcgggggtcacatacgggttccctcaccctgccagccgcccgcccgcccggcgcagatgcacgcggctcgtgtatgtacatagacgttacggcagccgaggtttttaatgagattctttctatgggctttacccctcccccggaacctccttttttacttccaatgctagctgtgacccctgtacatgtctctttattcacttggttatgatttgtattttttgttcttttcttgtttttttgtttttaatttataacagtcccactcacctctatttattcatttttgggaaaacccgacctcccacacccccaagccatcctgcccgcccctccagggaccgcccgtcgccgggctctccccgcgccccagtgtgtgtccgggcccggcccgaccgtctccacccgtccgcccgcggctccagccgggttctcatggtgctcaaacccgctcccctcccctacgtcctgcactttctcggaccagtccccccactcccgacccgaccccagccccacctgagggtgagcaactcctgtactgtaggggaagaagtgggaactgaaatggtattttgtaaaaaaaaataaataaaataaaaaaattaaaggttttaaagaaagaactatgaggaaaaggaaccccgtccttcccagccccggccaactttaaaaaacacagaccttcacccccacccccttttctttttaagtgtgaaacaacccagggccagggcctcactggggcagggacaccccggggtgagtttctctggggctttattttcgttttgttggttgttttttctccacgctggggctgcggaggggtggggggtttacagtcccgcaccctcgcactgcactgtctctctgccccaggggcagaggggtcttcccaaccctacccctattttcggtgatttttgtgtgagaatattaatattaaaaataaacggag

SEQ ID NO: 62187 - DNA, 638 bp, Homo Sapiens
ttatttttcgttagtttattacaaaactacagatacaatacacaaaattctaattccgaaatccttctacattttttttttctgagactaaatgccctcaaagcccgtctgcttggcctgtattacaacctgactcctcggctcctggatgcacaggtcagatgttccaacaaccctgaccatggccagtgctatggagtcactccaaaggtggttgagccctctgtgaaaatttaaatggctgctaagtcattctaaataaatagtgaacggattgtttctgcccctaagatgaaatcccacagatcttatgctcaagctcaggtcttcctactgccgccttcgacatctagaaagtatggtgggatcttcactgatttgttaaccctgggagtgcccctctgtgatccagatgagtcaaaacaaacggccaggatctcttctaaaaagcccatgatggcccttctggctgtgtctccagttggtgcctggatgctgcccatgtgtttaagggccattctgaccatctggtctctttcctgtgggctgtggggtgctccagtgtcatctccctctgctcctgattttaaaaactgtagaatataggactggaccatattcccactcagttcaagggt

SEQ ID NO: 62188 - DNA, 803 bp, Homo Sapiens
ccggcacgagaggagttgtgagtttccaagccccagctcactctgaccacttctctgcctgcccagcatcatgaagggccttgcagctgccctccttgtcctcgtctgcaccatggccctctgctcctgtgcacaagttggtaccaacaaagagctctgctgcctcgtctatacctcctggcagattccacaaaagttcatagttgactattctgaaaccagcccccagtgccccaagccaggtgtcatcctcctaaccaagagaggccggcagatctgtgctgaccccaataagaagtgggtccagaaatacatcagcgacctgaagctgaatgcctgaggggcctggaagctgcgagggcccagtgaacttggtgggcccaggagggaacaggagcctgagccagggcaatggccctgccaccctggaggccacctcttctaagagtcccatctgctatgcccagccacattaactaactttaatcttagtttatgcatcatatttcattttgaaattgatttctattgttgagctgcattatgaaattagtattttctctgacatctcatgacattgtctttatcatcctttcccctttcccttcaactcttcgtacattcaatgcatggatcaatcagtgtgattagctttctcagcagacattgtgccatatgtatcaaatgacaaatctttattgaatggttttgctcagcaccaccttttaatatattggcagtacttattatataaaaggtaaaccagcattctcactgtgaaaaaaaaaaaaaaaaaaaaaaaa

SEQ ID NO: 62189 - DNA, 1891 bp, Homo Sapiens
ccgcttcggggaggaggacgctgaggaggcgccgagccgcgcagcgctgcgggggaggcgcccgcgccgacgcggggcccatggccaggaccaccagccagctgtatgacgccgtgcccatccagtccagcgtggtgttatgttcctgcccatccccatcaatggtgaggacccagactgagtccagcacgccccctggcattcctggtggcagcaggcagggccccgccatggacggcactgcagccgagcctcggcccggcgccggctccctgcagcatgcccagcctccgccgcagcctcggaagaagcggcctgaggacttcaagtttgggaaaatccttggggaaggctctttttccacggttgtcctggctcgagaactggcaacctccagagaatatgcgattaaaattctggagaagcgacatatcataaaagagaacaaggtcccctatgtaaccagagagcgggatgtcatgtcgcgcctggatcaccccttctttgttaagctttacttcacatttcaggacgacgagaagctgtatttcggccttagttatgccaaaaatggagaactacttaaatatattcgcaaaatcggttcattcgatgagacctgtacccgattttacacggctgagatcgtgtctgctttagagtacttgcacggcaagggcatcattcacagggaccttaaaccggaaaacattttgttaaatgaagatatgcacatccagatcacagattttggaacagcaaaagtcttatccccagagagcaaacaagccagggccaactcattcgtgggaacagcgcagtacgtttctccagagctgctcacggagaagtccgcctgtaagagttcagacctttgggctcttggatgcataatataccagcttgtggcaggactcccaccattccgagctggaaacgagtatcttatatttcagaagatcattaagttggaatatgactttccagaaaaattcttccctaaggcaagagacctcgtggagaaacttttggttttagatgccacaaagcggttaggctgtgaggaaatggaaggatacggacctcttaaagcacacccgttcttcgagtccgtcacgtgggagaacctgcaccagcagacgcctccgaagctcaccgcttacctgccggctatgtcggaagacgacgaggactgctatggcaattatgacaatctcctgagccagtttggctgcatgcaggtgtcttcgtcctcctcctcacactccctgtcagcctccgacacgggcctgccccagaggtcaggcagcaacatagagcagtacattcacgatctggactcgaactcctttgaactggacttacagttttccgaagatgagaagaggttgttgttggagaagcaggctggcggaaacccttggcaccagtttgtagaaaataatttaatactaaagatgggcccagtggataagcggaagggtttatttgcaagacgacgacagctgttgctcacagaaggaccacatttatattatgtggatcctgtcaacaaagttctgaaaggtgaaattccttggtcacaagaacttcgaccagaggccaagaattttaaaactttctttgtccacacgcctaacaggacgtattatctgatggaccccagcgggaacgcacacaagtggtgcaggaagatccaggaggtttggaggcagcgataccagagccacccggacgccgctgtgcagtgacgtggcctgcggccgggctgcccttcgctgccaggacacctgccccagcgcggcttggccgccatccgggacgcttccagaccacctgccagccatcacaaggggaacgcagaggcggaaaccttgcagcatttttattt

SEQ ID NO: 62190 - DNA, 488 bp, Homo Sapiens
gatcccagcagtgtccagaagaagaccaaggacagaacagagactaggtttggtgagatgggacagattttgggaaagatcatgatgagccatcaaccgcagccccaggaagagcggacgccccagcggcgcctcagggtaccccctccaggaggtggtggatgatgaagtgttgggaccatcaggtgaggggactggagaaagaagaggtggcataggattgactaagatgaaggaagggggccaggcgtggtggctcacccctgtaaccccaacactttgggaggctgaggcgggcagatcacctgaggtcaggaattcaagaccagcctggccaacatggtgaaaccccatctctactaaaagtacaaaaattagccaggcggtagtggtgtgtgcctataatcccagctacttgggaggctaagacaggagaatcacttgagcctgggaggaagaggttgcagtgagccgagatcgtgctactg

SEQ ID NO: 62191 - DNA, 2618 bp, Homo Sapiens
tgcagctagtgtgtcaactcagcgtttctcctctcgtccctggaagagctaaagatggctgaatttctagatgaccaggaaactcgactgtgtgacaactgcaaaaaagaaattcctgtgtttaactttaccatccatgagatccactgtcaaaggaacattggtatgtgtcctacctgtaaggaaccatttcccaaatctgacatggagactcacatggctgcagaacactgtcaggtgacctgcaaatgtaacaagaagttggagaagaggctgttaaagaagcatgaggagactgagtgccctttgcggcttgctgtctgccagcactgtgatttagaactttccattctcaaactgaaggaacatgaagattattgtggtgcccggacggaactatgtggcaactgtggtcgcaatgtccttgtgaaagatctgaagactcaccctgaagtttgtgggagagagggggaggaaaagagaaatgaggttgccatacctcctaatgcatatgatgaatcttggggtcaggatggaatctggattgcatcccaactcctcagacaaattgaggctctggacccacccatgaggctgccgcgaaggcccctgagagcctttgaatcagatgttttccacaatagaactaccaaccaaaggaacattacagcccaggtttcaattcagaataatctgtttgaagaacaagagaggcaggaaaggaatagaggccaacagccccccaaagagggtggtgaagagagtgcaaacttggacttcatgttggccctaagtctgcaaaatgaaggccaagcctccagtgtggcagagcaggacttctggagggccgtatgtgaggccgaccagtctcatggcggtcccaggtctctcagtgacataaagggtgcagctgacgagatcatgttgccttgtgaattttgtgaggagctctacccagaggaactgctgattgaccatcagacaagctgtaacccttcacgtgccttaccttcactcaatactggcagctcttcccccagaggggtggaggaacctgatgtcatcttccagaacttcttgcaacaggctgcaagtaaccagttagactctttgatgggcctgagcaattcacaccctgtggaggagagcatcattatcccatgtgaattctgtggggtacagctggaagaggaggtgctgttccatcaccaggaccagtgtgaccaacgcccagccactgcaaccaaccatgtgacagaggggattcctagactggattcccagcctcaagagacctcaccagagctgcccaggaggcgtgtcagacaccagggagacctgtcttctggttacctggatgatactaagcaggaaacagctaatgggcccacctcctgtctgcctcccagccgacccattaacaatatgacagctacctataaccagctatcgagatcaacatcaggccccagacctgggtgccagcccagctctccttgtgtgccgaagctcagcaactcagacagccaggacatccaggggcggaatcgagacagccagaatggggccatagcccctgggcacgtttcagtgattcgccctcctcaaaatctctacccagaaaacattgtgccctctttctcccctgggccttcagggagatacggagctagtggtaggagtgaaggtggcaggaattcccgggtcacccctgcagctgccaactaccgcagcagaactgcaaaggcaaagccttccaagcaacagggagctggggatgcagaagaggaagaggaggagtaatggtgtctccagagactttacatcggttcctgtcttctgtgcacagcagcacttgccgctgtgcaggcccacctctttggctctttgggtgggagagtttttccagattttagatttttctaggttatggccattttgtgtcttttgaggttgtgctgtgggggtttgggtttgagggaagggagcagggtggcggttgaggaacgcttcagccttagctgctacctttcggcagcagtgaaatacaagctgcagcctcggctgccagggctcccttttgacttattgtcgccactgccccttggtgctgtgtggtcccagtggaaggaggggaagattttggaaacctggtagccaccagtaaggtgattctctgccctgttggggcctaaatttgggggcttttgggcaacctctccgtgtactgcgtctgtccacactcgattgggccccaggtgtgtatgaggcgctctggtaaggtgctcaggccagttgcaatgtctgtcagtaacgaggcttttgatgtgttgagctggaggtgagtggaccgggggctgtgttttaagctgcttccttggcatttgcatcactgccttctgttcccgggggagcatggatcttttgtcctcactgctttctaatggggagggctgagggctccctgtccccacagcaggtatgtttgctctgccccagccccacacttgctctgaaaaccaagtgtcagagccccttccccttgtttttattttactgttataataattattaacttccttgtaatagaaataaagtttgtacttggagttcagctc

SEQ ID NO: 62192 - DNA, 4974 bp, Homo Sapiens
ctcatgcatatgcaggtgcgcgggtgacgaatgggcgagcgagctgtcagtctcgttccgaacttgttggctgcggtgccgggagcgcgggcgcgcagagcccgaggccgggacccgctgccttcaccgccgccgccgtcgccgccgggtgggagccgggccgggcagccggagcgcggccgccagcgagccggagctgccgccgcccctgcacgcccgccgcccaggcccgcgcgccggacgctgcgctcgaccccgcccgcgccgccgccgccgccgcctctgccgctgccgctgcctctgcgggcgctcggagggcgggcgggcgctgggaggccggcgcggcggctgggagccgggcgcgggcggcggcggcggggccgggcgggcgggtcgcgggggcaatgcgggcgcagggccgggggcgccttccccggcggctgctgctgctgctggcgctctgggtgcaggcggcgcggcccatgggctatttcgagctgcagctgagcgcgctgcggaacgtgaacggggagctgctgagcggcgcctgctgtgacggcgacggccggacaacgcgcgcggggggctgcggccacgacgagtgcgacacgtacgtgcgcgtgtgccttaaggagtaccaggccaaggtgacgcccacggggccctgcagctacggccacggcgccacgcccgtgctgggcggcaactccttctacctgccgccggcgggcgctgcgggggaccgagcgcgggcgcgggcccgggccggcggcgaccaggacccgggcctcgtcgtcatccccttccagttcgcctggccgcgctcctttaccctcatcgtggaggcctgggactgggacaacgataccaccccgaatgaggagctgctgatcgagcgagtgtcgcatgccggcatgatcaacccggaggaccgctggaagagcctgcacttcagcggccacgtggcgcacctggagctgcagatccgcgtgcgctgcgacgagaactactacagcgccacttgcaacaagttctgccggccccgcaacgactttttcggccactacacctgcgaccagtacggcaacaaggcctgcatggacggctggatgggcaaggagtgcaaggaagctgtgtgtaaacaagggtgtaatttgctccacgggggatgcaccgtgcctggggagtgcaggtgcagctacggctggcaagggaggttctgcgatgagtgtgtcccctaccccggctgcgtgcatggcagttgtgtggagccctggcagtgcaactgtgagaccaactggggcggcctgctctgtgacaaagacctgaactactgtggcagccaccacccctgcaccaacggaggcacgtgcatcaacgccgagcctgaccagtaccgctgcacctgccctgacggctactcgggcaggaactgtgagaaggctgagcacgcctgcacctccaacccgtgtgccaacgggggctcttgccatgaggtgccgtccggcttcgaatgccactgcccatcgggctggagcgggcccacctgtgcccttgacatcgatgagtgtgcttcgaacccgtgtgcggccggtggcacctgtgtggaccaggtggacggctttgagtgcatctgccccgagcagtgggtgggggccacctgccagctggacgccaatgagtgtgaagggaagccatgccttaacgctttttcttgcaaaaacctgattggcggctattactgtgattgcatcccgggctggaagggcatcaactgccatatcaacgtcaacgactgtcgcgggcagtgtcagcatgggggcacctgcaaggacctggtgaacgggtaccagtgtgtgtgcccacggggcttcggaggccggcattgcgagctggaacgagacaagtgtgccagcagcccctgccacagcggcggcctctgcgaggacctggccgacggcttccactgccactgcccccagggcttctccgggcctctctgtgaggtggatgtcgacctttgtgagccaagcccctgccggaacggcgctcgctgctataacctggagggtgactattactgcgcctgccctgatgactttggtggcaagaactgctccgtgccccgcgagccgtgccctggcggggcctgcagagtgatcgatggctgcgggtcagacgcggggcctgggatgcctggcacagcagcctccggcgtgtgtggcccccatggacgctgcgtcagccagccagggggcaacttttcctgcatctgtgacagtggctttactggcacctactgccatgagaacattgacgactgcctgggccagccctgccgcaatgggggcacatgcatcgatgaggtggacgccttccgctgcttctgccccagcggctgggagggcgagctctgcgacaccaatcccaacgactgccttcccgatccctgccacagccgcggccgctgctacgacctggtcaatgacttctactgtgcgtgcgacgacggctggaagggcaagacctgccactcacgcgagttccagtgcgatgcctacacctgcagcaacggtggcacctgctacgacagcggcgacaccttccgctgcgcctgcccccccggctggaagggcagcacctgcgccgtcgccaagaacagcagctgcctgcccaacccctgtgtgaatggtggcacctgcgtgggcagcggggcctccttctcctgcatctgccgggacggctgggagggtcgtacttgcactcacaataccaacgactgcaaccctctgccttgctacaatggtggcatctgtgttgacggcgtcaactggttccgctgcgagtgtgcacctggcttcgcggggcctgactgccgcatcaacatcgacgagtgccagtcctcgccctgtgcctacggggccacgtgtgtggatgagatcaacgggtatcgctgtagctgcccacccggccgagccggcccccggtgccaggaagtgatcgggttcgggagatcctgctggtcccggggcactccgttcccacacggaagctcctgggtggaagactgcaacagctgccgctgcctggatggccgccgtgactgcagcaaggtgtggtgcggatggaagccttgtctgctggccggccagcccgaggccctgagcgcccagtgcccactggggcaaaggtgcctggagaaggccccaggccagtgtctgcgaccaccctgtgaggcctggggggagtgcggcgcagaagagccaccgagcaccccctgcctgccacgctccggccacctggacaataactgtgcccgcctcaccttgcatttcaaccgtgaccacgtgccccagggcaccacggtgggcgccatttgctccgggatccgctccctgccagccacaagggctgtggcacgggaccgcctgctggtgttgctttgcgaccgggcgtcctcgggggccagtgccgtggaggtggccgtgtccttcagccctgccagggacctgcctgacagcagcctgatccagggcgcggcccacgccatcgtggccgccatcacccagcgggggaacagctcactgctcctggctgtcaccgaggtcaaggtggagacggttgttacgggcggctcttccacaggtctgctggtgcctgtgctgtgtggtgccttcagcgtgctgtggctggcgtgcgtggtcctgtgcgtgtggtggacacgcaagcgcaggaaagagcgggagaggagccggctgccgcgggaggagagcgccaacaaccagtgggccccgctcaaccccatccgcaaccccatcgagcggccggggggccacaaggacgtgctctaccagtgcaagaacttcacgccgccgccgcgcagggcggacgaggcgctgcccgggccggccggccacgcggccgtcagggaggatgaggaggacgaggatctgggccgcggtgaggaggactccctggaggcggagaagttcctctcacacaaattcaccaaagatcctggccgctcgccggggaggccggcccactgggcctcaggccccaaagtggacaaccgcgcggtcaggagcatcaatgaggcccgctacgccggcaaggagtaggggcggctgccagctgggccgggacccagggccctcggtgggagccatgccgtctgccggacccggaggccgaggccatgtgcatagtttctttattttgtgtaaaaaaaccaccaaaaacaaaaaccaaatgtttattttctacgtttctttaaccttgtataaattattcagtaactgtcaggctgaaaacaatggagtattctcggatagttgctatttttgtaaagtttccgtgcgtggcactcgctgtatgaaaggagagagcaaagggtgtctgcgtcgtcaccaaatcgtagcgtttgttaccagaggttgtgcactgtttacagaatcttccttttattcctcactcgggtttctctgtggctccaggccaaagtgccggtgagacccatggctgtgttggtgtggcccatggctgttggtgggacccgtggctgatggtgtggcctgtggctgtcggtgggactcgtggctgtcaatgggacctgtggctgtcggtgggacctacggtggtcggtgggaccctggttattgatgtggccctggctgccggcacggcccgtggctgttgacgcacctgtggttgttagtggggcctgaggtcatcggcgtggcccaaggccggcaggtcaacctcgcgcttgctggccagtccaccctgcctgccgtctgtgcttcctcctgcccagaacgcccgctccagcgatctctccactgtgctttcagaagtgcccttcctgctgcgaagttctcccatcctgggacggcggcagtattgaagctcgtgacaagtgccttcacacagaaccctcggaactgtccacgcgttccgtgggaacaaggggtt

SEQ ID NO: 62193 - DNA, 679 bp, Homo Sapiens
  misc_feature (506)..(506): n is a, c, g, or t
  misc_feature (605)..(605): n is a, c, g, or t
tggcttttgctttctttattcagtcacgacctacacgctcctatgtgactgtcctatggtacttggggaccgggcggtcacctgcagcctgggggaggacatccctataatgaacatgctgcctgggcttcagggggccactttggtgcgaagatggcatccaggacaccccccaagtgcaccacctgcacctggtggaagccgtgcagctccagcaagcactgatactcgcccaggctccgctccttgccttcagtctgcaccagcatgttcagtgactgcatcagggcgcgctgcagccctcttctcctcatccaggagcgtctccaccagcagcaggccggcccctggcttgcagctctcggcgaccttgctgagtaacttgtggactttgtcgtctggccagtcatgcaggatccggcacaggacgtacagctcagcgctggggagggggttcctgaaaaagtcgactgctgcgaagtggatctgcactagctgcggtccgnggggttgcaagtgggcggccagctcgataatgtctgggaggtcaaacacagtcacgtgcatacgagggtagtcgacggccagctctttcggcagtgcanccgtcagcgtccacgtgccagcggaagagaagcggacagttgaacgcctgcacctggcagcagtaagttctctt

SEQ ID NO: 62194 - DNA, 3237 bp, Homo Sapiens
cgacgttgaggccgcgttgggcggttcagactcagggtgatggcaggagagctggctgacaaaaaggaccgtgatgcatcaccttccaaggaggaaaggaagcgatcacggactcctgacagagagcgggatagagaccgggaccggaagtcttccccatctaaagatagaaagcggcatcgttcaagggatagacgtcgaggaggcagccgttctcgctctcgttcccgttccaaatctgcagaaagagaacgacggcacaaagaacgagaacgagataaggagcgggatcggaataagaaggaccgagatcgagacaaggatgggcacagacgggacaaggaccgtaaacgatccagcttatctcctggtcgaggaaaagactttaaatctcggaaggacagagactctaagaaggatgaagaggatgaacatggtgataagaagcttaaggcccagccattatccctggaggagcttctggccaagaaaaaggctgaggaagaagctgaggctaagcccaagttcctctctaaagcagaacgagaggctgaagctctaaagcgacggcagcaggaggtggaagagcggcagaggatgcttgaagaagagaggaagaaaaggaaacagttccaagacttgggcaggaagatgttggaagatcctcaggaacgggaacgtcgggaacgcagggagaggatggaacgggagaccaatggaaatgaggatgaggaagggcggcagaagatccgggaagagaaggataagagcaaggaactgcatgccattaaggagcgttacctgggtggcatcaaaaagcggcgccgaacgagacatctcaatgaccggaaatttgtttttgagtgggatgcatctgaggagacatccattgactacaaccccctgtacaaagaacggcaccaggtgcagttgttagggcgaggcttcattgcaggcattgacttcaagcagcagaagcgagagcagtcacgtttctatggagacctaatggagaagaggcgaaccctggaagaaaaggagcaggaggaggcaagactccgcaaacttcgtaagaaggaagccaagcagcgctgggatgatcgtcattggtctcagaaaaagttagatgagatgacggacagggactggcggatcttccgtgaggactacagcatcaccaccaaaggtggcaagatccccaatcccatccgatcctggaaagactcttctctgcccccacacatcttggaggtcattgataagtgtggctacaaggaaccaacacctatccagcgtcaggcaattcccattgggctacagaatcgtgacatcattggtgtggctgagactggcagtggcaagacagcagccttcctcatccctctgctggtctggatcaccacacttcccaaaattgacaggatcgaagagtcagaccaaggcccttatgccatcatcctggctcccacccgtgagttggctcaacagattgaggaagagaccatcaagtttgggaaaccgctaggtatccgcactgtggctgtcattggtggcatctccagagaagaccagggcttcaggctgcgcatgggttgtgagattgtgattgctacccctgggcgtttgattgatgtgctggagaaccgctacctggtgctgagccgctgtacctatgtggttctggatgaggcagataggatgattgacatgggctttgagccagatgtccagaagatcctggagcacatgcctgtcagcaaccagaagccagacacggatgaggctgaggaccctgagaagatgctggccaactttgagtcgggaaaacataagtaccgccaaacagtcatgttcacggccaccatgcccccagcggtggagcgtctggccaggagctatcttcggcgacctgctgtggtgtacattggctccgcaggcaagccccatgagcgtgtggaacagaaggtcttcctcatgtcagagtcagaaaagaggaaaaagctgctggcaatcttggagcaaggctttgacccacccatcattatttttgtcaaccagaagaagggctgcgacgtgttggccaaatccctggagaagatggggtacaatgcttgcacactgcacggtggaaaaggccaggagcagcgagagtttgcgttgtccaacctcaaggctggggccaaggatattttggtggctacagatgtggctggtcgtggtattgacatccaagatgtgtctatggttgtcaactatgatatggccaaaaatattgaagattacatccaccgcattggccgcacgggacgagcaggcaagagtggggtggccatcaccttcctcacaaaagaggactctgctgtgttctacgagctgaagcaagctatcctggaaagcccagtgtcttcctgtccccccgaactagccaaccacccagatgcccagcataagccaggcaccatcctcaccaagaagcgccgggaagagaccatctttgcctgacacagcactcttcctgtgggctgagggcatctccaaagctggcctgatgcctgtttttcagaaccctcacatccctctttccaggtcctcactcttgggatatgggggcttaggaaaacaatccaactccctagcccagaccctcaggtcaggaggcctgcgtgtggggctgcaaaaggagaggacgacgctgtcggaggcagggagagcaaattaccacagcttcttggcccagttctgcccttctttgctttgggattgcactgggccatcagctcatgccaggctatgggggcagccagttggcattgctccccagactgaacagaaacctggccgccggatgggacctcctttggcacagacttgactgtgtaactgcataaactgcagtagcatcattgccctagatgccccaggagacctggcaccatgaggattacagacagtggaatcttactgtcatctggacagctgttttcctgtttggatggtaaaggaagttgagagtctttagacctgtgcacagccccgcaccaaggggtgctgtatgctctaggcatcccctcccccaggggattttttaagtagatggggggacacggtgaactggctgtgtccatctttgtcactgagtgaaatctctgttttctattttctgagaagataagtttgtatgttctgagaataaatacatgaatattaagactgttaaaaaaaaaaaaaaaaaaaaaa

SEQ ID NO: 62195 - DNA, 1506 bp, Homo Sapiens
tcgacgcaggaggaaaccgactgctgcctggtctgcaaagaagtcctttcaagtctctaggactggactcttcctaagcaagtccgagaaggaagcaccctcactatgtggctctacctggcggccttcgtgggcctgtactaccttctgcactggtaccgggagaggcaggtggtgagccacctccaagacaagtatgtctttatcacgggctgtgactcgggctttgggaacctgctggccagacagctggatgcacgaggcttgagagtgctggctgcgtgtctgacggataagggggccgagcagctgaggggccagacgtctgacaggctggagacggtgaccctggatgttaccaagatggagagcatcgctgcagctactcagtgggtgaaggagcatgtgggggacagaagactctggggactggtgaacaatgcaggcattcttacaccaattaccttatgtgagtggctgaacactgaggactctatgaatatgctcaaagtgaacctcattggtgtgatccaggtgaccttgagcatgcttcctttggtgaggagagcacgggggaagaattgtcaatgtctccagcattctgggaagagttgctttctttgtagaggctactgtgtctccaagtatggagtggaagccttttcagatattctgaggcgtgagattcaacattttggggtgaaaatcagcatagttgaacctggctacttcagaacgggaatgacaaacatgacacagtccttagagcgaatgaagcaaagttggaaagaagcccccaagcatattaaggagacctatggacagcagtattttgatgccctttacaatatcatgaaggaagggctgttgaattgtagcacaaacctgaacctggtcactgactgcatggaacatgctctgacatcggtgcatccgcgaactcgatattcagctggctgggatgctaaatttttcttcatccctctatcttatttacctacatcactggcagactacattttgactagatcttggcccaaaccagcccaggcagtctaaagaaaactgggttggtgcttcttggaatgaaggcaaaaatctgaaattgttagtgtctcagtaatcctgatttagaacccaggctttttgtaacaatgtgttttcttgcctaaattcatttatctggcatcatcagagtactaacatgtttatatttcagatatccaaagcttaccactttaggtgatgaatctttactattttagcccttttttgatgagactatttgtctaaagtgaatcatttgttcttgccttattaaacagagtagatggaaaacaatttaacctattttgaagtcatttctttatgaatatgaataattgttctatgctttaataatctattgtgaggaaactactaagaaatatgttggtgtgtttgtccttacttgaaatgggtctgtattatggtacttttaataaatatttgatttttctttgtcga

SEQ ID NO: 62196 - DNA, 6629 bp, Homo Sapiens
gcggcgagggcgcgggggctctgaggaccgctcggcgccgcctcctgccacaccatgggcagcgcagaggacgcagtcaaagagaaactgctgtggaacgtgaagaaggaggtgaagcaaatcatggaggaggctgtcaccaggaagtttgtgcatgaagacagcagccacatcattgctttatgtggtgcagtggaggcttgcctcttgcatcagctgagacgccgtgccgctggcttcctgcgcagtgacaagatggcagccctgttcaccaaggtggggaagacgtgcccagtggcgggggagatttgccacaaggtacaggagctgcagcaacaagcagagggcaggaaaccctcaggggtcagccaggaggccctgcggagacagggctcagccagcgggaaggccccggccctcagccctcaggccttgaaacacgtatgggtacgcacggcgctcatcgagaaagttctggacaaggtcgtgcaatacctggcggaaaactgcagcaagtactacgagaaggaggcactgctggcagaccctgtgttcggcccgatcctggcctctcttctagtgggaccctgtgccttggaatacactaagctcaagacagccgatcactactggactgacccctctgctgatgagctggtccagcggcaccgcatccggggtccacctactcgccaggactcccctgcaaagcgcccagccctggggatccggaaacggcactcaagcggcagcgcgtcggaggacaagctggctgcctgcgcccgcgagtgtgtggagtccctgcaccagaactcacggacgcggctgctctatggcaagaaccacgtgctggtgcagccgaaggaggatatggaggcggtccctggctacctctccctgcaccagtctgcagagagcctgactctgaagtggacccccaaccagctcatgaatgggactctgggggactccgagctggaaaagagcgtttactgggactatgccctcgtggtgcccttcagccaggtcgtgtgcatccactgccaccagcaaaagagcggtggcacgcttgtgctggtgagccaggatggcatccagaggccgccgctgcatttcccacagggaggacacctgctgtcctttctgtcctgtctggagaatgggctgctgcctcagggacagctagagcccccgctgtggacccagcaagggaaggggaaagtgttccccaagctacggaaacgaagcagcattcgctccgtggatatggaggagatgggcacggggcgggccaccgactatgtgttccggatcatctaccccggccacaggcacgagcacaacgctggtgacatgatcgagatgcagggctttgggcccagcctgccagcctggcacctggagcccctgtgcagtcagggctcctcctgcctctcctgctcctccagcagctccccacatgcaacccccagccactgtagctgcatccccgaccgaggggccgcagcccctccctgctgagcccggttgttgccacaggttgccgctcaggctactgtgtgagagtatgaagaggcagatcgtgtcccgggccttctacggctggctggcacactgccgccacctgtccacggtgcggacccacctgtcggcgctggtgcaccatagcgttatcccacctgaccggcccccgggggcctccgcgggcctcaccaaggacgtgtggagcaagtatcagaaggacaaaaagaactacaaagagctggagctgctgcggcaagtttactacggaggcatagagcacgagatccgcaaggacgtctggccctttctgcttggccactacaagttcggcatgagcaagaaggagatggagcaggtggacgcagtggtggcagcaaggtaccagcaggtgttggcagagtggaaggcctgcgaggtggtggtgaggcagcgggagcgggaggcccacccagccacacgcaccaagttctcctcaggcagcagcatcgacagccacgtgcagcgcctcatccaccgagactccaccatcagcaacgatgtgagccagacgggacctggagggttgggggtctcgggggccacccgcgttttatgcacagtggtcctgagcaccagcctgacctctgggaactggtggggccctgcgagaaaggcctaaggtgcctgtgtctcattttctccaactggaaatggctaactgtgcctctgctgcctacttctctgggtattgtaggaataaagtgagagagtgcattgtgctcagttttagccaactatagggaaagatggacttactgggatttagggaagccctcctccttgtagaaagacctcaaagctagcaacaggcagcgctgggttctagtcccagatccactactgacaagctgaatgtctctgggcaagcacttcccgtctctgggtctcagtttcccctctccacccatatcctctgactgcagaggcttcctgagatctgtgggcctgagaataggggagcccgtagagcagccccattggtgtcgactggcgagatccttcctccccgcgatgttgcctgtcactgtacagaactgactatggcaggcttgttcggagcacgggagggtagctctttctggcatcactcctgccttttgaacagcaagttctaaactgtgactgcctggcccaaccaacactgataagtttcaattttaaggacgctttattaatttttctttaaaattgcctctttagataatgtgtattcttgttactttactaaatccttaccaacattaacagaaaatgtaagttgaagtaagttaaatataactggctgggtgtgatggctcatgcctgtaattccaacactttgggaggcagaggtgggaggattgcttcagttcaagagttcgagaccagcctgggtaacatggcgaaaccctgtctttacaaaaaatgcaaaactttgccgcatgtgttggggtgcgcctgtagtcccagcttctcgggaggctgaggtggggggaccacctgagccatggaggttgaggctgcagtgagccgtgataccaccactgtactctagcctgggccatagagtgagacaccctgcctcagaaataaaataaaaaaaaagaaatagaacaaacaaggcacattgtcatttcccacgtgctttgttcttaatcccctatccaggaacacattctccctctctctggctttgggttttgtaaaaatctgtctgtgccagtgcccagctgctgagctcatggacagcagtagctcctcgctggcgtattagatggccacagaaccgtggccttacccagcacttcatgcttcctgcccaaagtagaaactacttttagcattgctttccctacgtggtgaaaacagagagagaaaaatcccaaacagtctctgtatgtgtctcttcttttcctcgtgccttgtccatggtggtggactgtatctaggaggcagaatgtttgcttttccttcctacatctccccaccttgcctgagggctaatggaactgactaggtgcttgctacagaacgttcctgtcttgtcctgctgaacactcagtactgaaaataaggcaaaacttgtttttcctaaaacctctagccttctctccacccagccacaccaaaacactaaggccattctcccggtctcatgacttcaggcgtttctagaatgagactgagttcaaactggccattgagcgttcagccccctggctcccctacttcccttcagtagccacaggaagacctggggctgttccttcaagcagggctgaagacgtgtcttcatgtttggccagaggcttgtttctctctgcctggctggctgggtcagaagctggcttggtgctccgtggccacagtgttggaggctgtggtgggagagggggtgtgaagagttttgcattccagctcccttctggcccgaggaggcggtgggctgcgggaaggtgctggagtgcaggtggagccgccctgtgttcaccccccaggtgtttatctcagtggatgatctggaacccccggagccccaggaccctgaagattccagaccaaaacctgagcaggaagcaggacccgggactccgggcaccgccgtggtggagcagcagcattccgtggagttcgactctccagactcaggactgccctcctctcgcaattactccgtggcctcgggcatccagtcaagcctagatgaggggcagagcgtgggcttcgaagaggaggacggcggtggggaggaaggctccagtgggcccggccctgcagctcacactttgagggagccccaggatcccagccaggagaagcctcaggccggagaactggaggccggagaggagcttgcggctgtgtgtgcggctgcctacactatagaattactggacactgtggccttaaacctgcaccgcatagacaaggatgtgcagaggtgtgaccgcaactactggtacttcacgccccccaacctcgagaggctcagagacgtcatgtgcagctacgtgtgggagcacctggacgtgggctatgtgcagggcatgtgcgatctgctggcgcctctcctggtcaccctcgacaatgatcagctggcctacagctgcttcagccacctcatgaagaggatgagccagaacttccccaacgggggtgccatggacacccactttgccaacatgcgctccctcatccagatcctggactcagagctgtttgagctgatgcatcagaatggagactacacccacttctacttctgttatcgctggttcctgctggattttaagagagaactgctgtatgaggatgtgtttgctgtgtgggaggtgatctgggcagccaggcacatctcatcggagcactttgtcctgttcatcgccctcgccctggtggaggcctaccgagagatcatccgtgacaacaacatggacttcactgacatcatcaagtttttcaatgaacgtgctgagcatcacgatgcccaggagatcctgcggattgcccgggacctcgtccacaaggtgcagatgctcatagagaacaagtgagctggggccaggaggcagcagccgtgcagagcctgggctccggcagggagaggtgcaggggagtcaccgcccagacctccccagccaccaaccgaccccacctctgttcctaacaaagcggttgtgagcctggatccgactcccggcagtgctgaccctgcagggcaagtcaggggccaggatgccctcggatcagggccgggatgggaggggtcagcctcagggagcagctgccttgggggacacacctactctgctcccctctcacacatctgggagtagccccactgccacctgcagccgcagcctggactgctgcccacgagtgaacctggggccccacaggattaacaggggctatagcggcctgggccctactcagctggggtggcagagggcgagaggctctgtgctgtgtcccttctgagggtccctttgcagtcccagtatattgtgcgtgcaccagccccagctggagcaaccaaaactgcttctggtttaggcacacgtcacgggtgcgggagacccgggcacgggagacccgggccgccttcaggccgctcccccgagattctggggcagtcggaagatgtgggccctgggtgggagcagcccacttcagcagcactgccactgcctttggccacctgaggtgacccccaggcctccccggccttgtacagtgtacctctgtgtatctgtacagcctcgctcctgccaccccacccttgcgttctgcattaggtacttccctgaaaaccacgtgtaagaagtgatgcttttgccagtggatgatctggaatgcgaccggagcacttgctctgaggaatcccagggtgactctgtcggggaagaatccggtcacagcctcccctcagagacaggcctcagttcgagggcagcccattatctgtcgcagacatctgccatgtccctgagactgcgggaggcaggggatgcatgggtgtccccatctgtccctggtgagaagcaaggctagctctgccttccacatgcttctcaggatgccaagaggcctaggaacccagaaacccccttggaggagctgtgtatgcgggggtgccaggaagggcatagctcctgcccccaggcctaggcatgctgcttgctcggccatccccacttcctcctctaccccaacacatgcaggctaggccttgccctggaacgtggaggccctgcccggggctggggcctagtccagcagccaccaaagtctggcagactttctgcatttgagaaacatgacaaagggccccgcagcccttctgcacccagcacagcctgcccagcccagccctgcccccgggcactgcacagcctgtctgggggccagaccaccccattgtccatccttgttgtccgtgagtccttggcctccaccaagcacgtgtggccattgtgtgcctgccttagtgactccgtggttttgtgaggagcagagtgtgtatgatttttgcctcagaaactatactcttctgtgtaacagaccaataaacaacatttgtcaac

SEQ ID NO: 62197 - DNA, 5347 bp, Homo Sapiens
cgaatatatcagatttaaccatatgaaattgccattttgtaggtgataataaacagttgactatcatcaatttcataggcctgatgtcaatttcatatttcattctttaaagaccgccactcattgttggaaataaaaggacaaaggtaggctggcatagcctctccaagagagcagatcgctgcacttacaaagggttttggggatgtgtggagttcaaggactggtgaggttttggaggcatacatgggttgatggcatctgtataggtggttacttgaaaagcctgttattcatcagttgcccctcaagtctgcagtgagtcggctaactctcagaagccaggggttgtcatggactggctgccttacaaaagctgtgcactgaggggtgtttacatgatggaataggttcaaagctggttctagtggccacttgttaccatggctgcagatgatccgagaactttcattctcatggttcaacctaagaaaggtctataagagtataccccactcttgaaagcaggtggtggagacgttgactactcaccaccatttcctgaaatcaatttgaagagaaagatacctttgtggacactgttctcaagttctgaaagtgggtagcattacattggcagtttaaacacttgcttttttttttttgagtcttgctctgtcacccagtttggagtgcagtggtgcagtctcggctcactgcgacctcggcctcctggattcaagttcagcctcccgggtggctgggattgtaggagtgtgccaccacgcatggctaatctttttgtgtttttggtggagatggagtttcacactgtttgcggactggtaccaagttcctgacttcaaatgctctgcctgcctcggcctccctaggtgttgggattacaggcgtgagccaccgtgctcagcctaaatacttgctttgattttgcagatctggtgctccaaattgattaagacacaagaccgttctctccaaatcagagagctactcatctctcccttccatgtgtttcttgtactgctccctctatctcttatcatgagactcctctcttcctgcagtgtggtaaaactacagcaatcgtcttaacctgtgagatctgtcacctttgcattttccactcatgcagctggttctataaaccaactcttctgcttggggggatctaatcatgaccttttacccttttgtggcctcttctagtacaaggcgagtggataattccaacacaagactggcagtccaaattgaaagagatccagggaatgatgacaacaatctcaattccattttttatgaacacttgacaaggaccctccaggagtccctctgtggagacttagttcttggacgttggggcaactacagctctggcgattgctttattttggcttcagatgacctcaatgcctttgttcacctgattgaaattggaaatggtcttgtcacctttcaacttcgaggactggaattccgaggaacctactgccagcagagggaggtagaagccatcatggagggcgacgaggaggacagaggctgctgctgctgcaaaccaggccacttgcctcacctgctgtcctgcaacgctgcctttcacctccgctggctcacctgggaaatcacgcagacccagtacatcctggagggctacagcatcctggacaacaacgcggccaccatgctgcaggtgtttgacctccgaaggatcctcatccgctactacatcaagagtataatatactatatggtaacgtctcccaaactcctctcctggatcaaaaatgaatcacttctgaagtccctgcagccctttgccaagtggcattacattgagcgtgaccttgcaatgttcaacattaacattgatgatgactacgtcccgtgtctccaggggatcacacgagctagcttctgcaatgtttatctagaatggattcaacactgtgcacggaaaagacaagagccttcaacgaccctggacagtgacgaggactctcccttggtgactctgtccttcgccctgtgcaccctggggaggagagctctgggaacagccgctcacaatatggccatcagcctggattctttcctgtatggcctccatgtcctcttcaaaggtgacttcagaataacagcacgtgacgagtgggtatttgctgacatggacctactgcataaagttgtagctccagctatcaggatgtccctgaaacttcaccaggaccagttcacttgccctgacgagtatgaagacccagcagtcctctacgaggccatccagtccttcgagaagaaggtggtcatctgccacgagggcgacccggcctggcggggcgcagtgctgtccaacaaggaagagctgctcaccctgcggcacgtggtggacgagggtgccgacgagtacaaggtcatcatgctccacagaagcttcctgagcttcaaggtgatcaaggttaacaaagaatgcgtccgaggactttgggccgggcagcagcaggagcttatatttcttcgcaaccgcaatccggagcgcggcagtatccagaacaataagcaggtcctgcggaacttgattaactcctcctgcgatcagcccctggggtaccccatgtatgtctccccactaaccacatcctacctagggacacacaggcagctgaagaacatctggggtggacccatcactttggacagaattaggacctggttctggaccaagtgggtaaggatgcggaaggattgcaatgcccgccagcacagtggcggcaacattgaagacgtggacggaggaggggccccgacgacaggtggcaacaatgccccgaatggtggcagccaggagagcagcgcagaacagcccagaaaaggcggtgctcagcacggggtgtcatcctgtgaagggacacagagaacaggcaggaggaaaggcaggagccagtccgtgcaggcacactcagcgctaagccaaaggccgcccatgctgagctcatctggccccatcttagagagccgccaaacattcctccagacgtccacctcagtgcacgagctggcccagaggctctcgggcagccggctctccttgcacgcctcggccacgtccctgcactctcagcccccgcccgtcaccaccaccggccacctgagtgtccgtgagcgggccgaggcgctcatcaggtccagcctgggctcctccaccagctccaccctgagcttcctcttcggcaagaggagcttttccagcgcgctcgtcatttccggactctctgctgcggaggggggcaataccagtgacacccagtcatccagcagcgtcaacatcgtgatgggcccctcagccagggctgccagccaggccactcgggtaaggggctgggcagggctcaccaggacaggctgggatggtggcacgggctcctggcctgagcgtggcacctgccttgcgttcccacccttctgcctgcagaaccccatccccttctctatggggctcccagagtgacaaaggacagtgattagacacgaagtggcttagctgctcttgaaagcagacaagatacagagcagatatcctgtaaacgataatgcccaggcaggcactgaaaggagtcaccggatacagaggttctgcagaactgtggccatctgccctacaccggggcatgacggagaatgccctccacccattcacacagcaggactcttctcacatgattctggcctgagggagaggaaaggacacctgtcaatgctggagttagagcttcactgcttctcagccaatcgatttgactttaaagctgctgagatggcccactgcttttaggtatttaaatactagacaaggagagttctaaggacttcacccaaataagctgttacttgtccagaatcccaaaccagctgagatgaaatgaatacttgagcttcttcagtgagaaaaaagtaaataaatacccagcagtgctcctatgtgacctggtagacagggaaaatcgatggtgtcaaggcaaaaatgggtcaggtttggagagttcccccactccttttgagtgttcaggttttccttaccatggctcatgctttccatcaagcaccagagttgcagtggcttggcctctggttctgggtgaggttatttgcaggtggagacggggggctgcacctgaacatttctagtgtcaccctccctctccttcatgggaaacagctctccagggaagtaccttcctgccaggggaagccaaggctgggccggccgccctacaaggagccacaggattgcagccatgggtgccacctttcatggaaggggagatttatgggctttcctggaacccccaggctgtcctggccaagaggaaagaggtggttacttcaggagtttgaccttagttagataactaaaagaatacatttcccctcccttttctttatttcctcaataaaaatgtacaaagtatcacccttctccatgccccaatctgtgttaaagtcacaatctatgggtgtagttctgggattctgtcaaattctccttcctgctctccaaaatggacaattgtcgtagggaccacatgcccccagaatacaatggcctctgtgttctactggggtcaagcctgctagaactcagcattcatgacaggggctaagtgtgcatgaagtgacactgactacagctagaaagccaggcgcacaaatgccccttccccccagggccgctctttccagcgcagtcatccagaaaggcccacgtgcagagcccctgtgtctcagatgctgcttcagttgcccgtcctgtcctcagaggccactgtgctggccctctatcatttgacctgactttagaacctgacctcaaggatatggcagcgctagcctttagctcccacagcacggatgggggtgatgccagttagaagtgggtagtgaacgtttgctgagctgttcactgtttctctcttctctttggaagcacctctccgagccatgtgagccccctgatgccaccgagcaggggcagcttcatgaccgatgtctggctgaggctgtggcggacactctcggggttgtctgcaggagagcaagccaggaggacatgggcctggacgacacggcctcgcagcaaagtgtgtcagacgagcagtgacgggcgtgcggccgggcggggaggctggctcccccacacctcccacctgcattgctctccctcgtgctccccaaatcaccacaaccaaccaataccgcgatccatgagggactcctcctgtggaaaaggagagctgttccagaacacagaactgatctcaggtttttg

SEQ ID NO: 62198 - DNA, 1531 bp, Homo Sapiens
tcgtgtgagcccagtgaacatcgaccgtcaggcctggcttggcgaggaggtgctggccgagccccggccggacatgtttcgggcacagcagcttcagatcttcaacttgatgaagttcgacagctatgcgcgcttcgtcaagtccccgctgtaccgcgagtgcctgctagccgaagccgagggacgccctctgcgggaacctggctcctcgcgcctcggcagccctgacgccacgaggaagaagccgaagctgaagcccgggaagtcgctgccgctgggtgtggaggagctggggcagctgccacccgttgagggtcctgggggccgccctctccgcaagtccttccgccgggagctgggcgggactgcaaacgccgccttgcgccgagagtctcagggctccctcaactcctccgccagcctggaccttggcttcctagccttcgtcagcagcaaatctgagagccaccggaagagccttgggagcacggagggtgaaagtgaaagccggccagggaagtactgctgtgtgtacctgcccgatggcacagcctccttggccctggccagacctggcctcaccatccgagacatgctggcagggatctgtgagaaacgaggctctctctacctgacatcaagtctacctggtggcaatgaacagaaggccctggtcctggatcaggactgcaccgtgctggcggatcaggaagtgcggctggaaaacaggatcaccttcgagctggagctgacggcgctggagcgcgtggtacgaatctcagccaagcccaccaagcggctgcaggaggcgctgcagcccattctggagaagcacggcttgagcccgctagaggtggtgctgcaccggccaggcgagaaacagcctctggatctggggaagctagtgagctcggtggcggcccagagactggttttggacactcttccaggtgtgaagatctccaaagcccgtgacaaatctccctgccgcagccagggctgcccacctagaactcaggataaggccacccatccccctccagcgtcccccagttctctggtgaaggtgcccagtagtgccactggaaagcggcagacctgtgacatcgaaggcctggagctgctgaaccgggtgcagagcagcggggcccacgaccagaggggccttctgaggaaagaggacctggtacttccagaatttctgcagctgcccgcccaagggccagctccgaggagacccaccacagaccaaatcagcagcccagcccatcgggggatccttgaactccaccaccgactcagccctctgacagctacccaacagtccaggacagctgcatggcacccggcgggccgagcatgccatgggtccgctctgcatgccctgtctgtgccatgagtgtccctggcccttcctgccatgggcaggcccgcaggaagagccggtaggggtggaaaggggactcagatgagacacaccccacagctgccaccgccttgtcctcaacaagctcacccccaatcccttgca

SEQ ID NO: 62199 - DNA, 644 bp, Homo Sapiens
gcgcgggcggctggggaatggctgctgccatggtgccggggcgcagcgagagctgggagcgcggggagcctggccgcccggccctgtacttctgcgggagcattcgcggcggacgcgaggacaggacgctgtacgagcggatcgtgtctcggctgcggcgattcgggacagtgctcaccgagcacgtggcggccgccgagctgggcgcgcgcggggaagaggctgctgggggtgacaggctcatccatgagcaggacctggagtggctgcagcaggcggacgtggtcgtggcagaagtgacacagccatccttgggtgtaggctatgagctgggccgggccgtggcctttaacaagcggatcctgtgcctgttccgcccgcagtctggccgcgtgctttcggccatgatccggggagcagcagatggctctcggttccaggtgtgggactatgaggagggagaggtggaggccctgctggatcgatacttcgaggctgatcctccagggcaggtggctgcctcccctgacccaaccacttgacttaatctcactttcttaaattcttctattctcagacactgctctagtaccattccttcctcttagccccaggagcaaattaaaaggtacagttaaaatcct

SEQ ID NO: 62200 - DNA, 439 bp, Homo Sapiens
ttttttttttatatctctttgttaagtttattaatgtatacgtttttcaaataaacattttgaacagcccaaatcaatcaaagccatgagatcacaaagtgttgcttctcgacacaacattagcttgttcagaaaatccaaaagccacatccaaagatcaatgatgctaccttaaagacatgagggaggctccttaagaccctagagacaccaaggaccccacagggccagtcatatgaacaggctcagaagccggcttgatcctcagcacctctgcaaagccatcaccaaaccagcaagtgacatgcgctatgtctacagtaaagtagaaaaggcggtcctggcaaagcttccggcggtacacagaccgaggatccgctgacagcacagcctcaatggcacgctttgcttcctctgctgactgaaaatatttaaatga

SEQ ID NO: 62201 - DNA, 1387 bp, Homo Sapiens
cctcgtgccaagttccttcctgtgtatcaccccagccctgaggagagcagggaccccaccctctatgccaacaatgttcagagggtcatggcacaggctctgggcattccagccaccgaatgtgagtttgtagggagcttacctgtgattgtggtgggccggctgaaggtggcgttggaaccacagctctggggaactgggaaaagtgcttcggaaggctgggctgtccgctggctatgtggacgctggggcagagccaggccggagtcgaatgatcagccaggaagagtttgccaggcagctacagctctctgatcctcagacggtggctggtgcctttggctacttccagcaggataccaagggtttggtggacttccgagatgtggcccttgcactagcagctctggatgggggcaggagcctggaagagctaactcgtctggcctttgaggtaatggggggtggcggtggtggggggtgcttagtggctatgctcaccccgctccaggaggcctattttggtatgctgtttccagtagcttctagatactaggcatttggtatccaacctagtgccacagtgcctaaaactgcagacccccggcctctatgttgagacctagctgggcacaagaagaaggaagaagaaggaaaaagctataaagtctacagttctgcagaaagggcactggagggtcagggaaggcttgtgcaccacccttttggaagaggaggagcctgtcaggccagtctgtggggcagggtgaggccatggcatgaggagagaacttgactcttatccctttctctcccaagctctttgctgaagagcaagcagagggtcccaaccgcctgctgtacaaagacggcttcagcaccatcctgcacctgctgctgggttcaccccaccctgctgccacagctttgcatgctgagctgtgccaggcaggatccagccaaggcctctccctctgtcagttccagaacttctccctccatgacccactctatgggaaactcttcagcacctacctgcgccccccacacacctctcgaggcacctcccagacaccaaatgcctcatccccaggcaaccccactgctctggccaatgggactgtgcaagcacccaagcagaagggagactgagtgcctcagcctctcaccccctcctcctcagggcagcgctaggggcctcccctatgcctcagccccatctctgctcctgtttgaattttgttattgttgtttggttgttgtttttttaagttgattttaattttttgtttggttgatttttttgtaaaaaactattttatatataaatataaatctatatctatatctattaaaaaaaatgaagtccaaaaaaaaaaaaaaaaaa

SEQ ID NO: 62202 - DNA, 554 bp, Homo Sapiens
tttttttttgctaataaaacagttaagacaattgtccattttatttgttaaattgctaaaaagtcatcaggggaaaacattaacaaaaaatgaaattgacagatttaaatatcaatgaaatccatgtttcattcctacactgttatgtgcccaaaatgactatctcagggtaagccacctggcatccctgagttgtatgggaaacatcactcacagcaccagcttcgccagggcacatggggtgtgactgacatgaaccctggttggtgggaggggagcagacaagtagagtgtacaatggagccaacacctaaagtttgctctcatttgacaatgaacacggtgagagggagccacttactggtaaccatgcagaacatgccttctgcagttcatggagaggctacatgggacgcaggcatggaaattcagcttcctcaccaccaggcgtggttagatcctccccactgacttgtgcgctggtaagagaccatggataatgcaaagtggagcatatcaccatgccaggatcaccacaatgacaaggacagaca

SEQ ID NO: 62203 - DNA, 481 bp, Homo Sapiens
ttttcaagagggagtcctttaatagagatcggcacagacaggagacacaacagcccaggcgccctgcttgcacaggctggggcctgagccaacagatgcagtggcttcctcctcccccacctgggtgtgggcccatggggtggagacagagaggtggctttaaaaaacacagctgtactaattcttcactttcacagagaaggggaacttgggagcgccgccgctagagaatctttacacagagctgaatctgagagcccacccacccacctcggccaggccgaagctcactgtcccccacccattggaggttcctccctgatctgtctgcacatgggaaggagcagagcgcgcagggagaccgggctgtacaacaggaacatgctggctggacagctggctcccctctcccagctgttagtgtttctacactatgtacattgttgtgctttgtagctcccccaccccgaggcctctgctt

SEQ ID NO: 62204 - DNA, 5238 bp, Homo Sapiens
gaattcggcacgaggtcttcctgtcccggagctaccagcggctcgccgatgcctgtaggggcctcctggcactgctgtttcctctcagatacagcttcacctatgtgcccatcctgccggctcagctgctggaggtcctcagcacacccacgcccttcatcattggggtcaacgcggccttccaggcagagacccaggagctgctcgatgtgattgttgctgatctggatggagggacggtcaccattcctgagtgtgtgcacattccacccttgccagagccactgcagagtcagacgcacagtgtgctgagcatggtcctggacccggagctggagttggctgacctcgccttccctccgcccacgacatccacctcctccctgaagatgcaggacaaggagctgcgcgcggtcttcctgcggctgttcgctcagctgctgcagggctatcgctggtgcctgcacgtcgtgcgcatccacccggagcctgtcatccgcttccataaggcagccttcctggggcagcgtgggctggtagaggacgatttcctgatgaaggtgctggagggcatggcctttgctggctttgtgtcagagcgtggggtcccataccgccctacggacctgttcgatgagctggtggcccacgaggtggcaaggatgcgggcggatgagaaccacccccagcgtgtcctgcgtcacgtccaggaactggcagagcagctctacaagaacgagaacccgtacccagccgtggcgatgcacaaggtacagaggcccggtgagagcagccacctgcgacgggtgccccgacccttcccccggctggatgagggcaccgtgcagtggatcgtggaccaggctgcagccaagatgcagggtgcacccccagctgtgaaggccgagaggaggaccaccgtgccctcagggccccccatgactgccatactggagcggtgcagtgggctgcatgtcaacagcgcccggcggctggaggttgtgcgcaactgcatctcctacgtgtttgaggggaaaatgcttgaggccaagaagctgctcccagccgtgttgagggccctgaaggggcgagttgcccgccgctgcctcgcccaggagctgcacctgcatgtgcagcagaaccgtgcggtcctggaccaccagcagtttgactttgtcgtccgtatgatgaactgctgcctgcaggactgcacttctctggacgagcatggcattgcggcggctctgctgcctctggtcacagccttctgccggaagctgagcccgggggtgacgcagtttgcatacagctgtgtgcaggagcacgtggtgtggagcacgccacagttctgggaggccatgttctatggggatgtgcagactcacatccgggccctctacctggagcccacggaggacctggcccccgcccaggaggttggggaggcaccttcccaggaggacgagcgctctgccctagacgtggcttctgagcagcggcgcttgtggccaactctgagtcgtgagaagcagcaggagctggtgcagaaggaggagagcacggtgttcagccaggccatccactatgccaaccgcatgagctacctcctcctgcccctggacagcagcaagagccgcctacttcgggagcgtgccgggctgggcgacctggagagcgccagcaacagcctggtcaccaacagcatggctggcagtgtggccgagagctatgacacggagagcggcttcgaggatgcagagacctgcgacgtagctggggctgtggtccgcttcatcaaccgctttgtggacaaggtctgcacggagagtggggtcaccagcgaccacctcaaggggctgcatgtcatggtgccagacattgtccagatgcacatcgagaccctggaggccgtgcagcgggagagccggaggctgccgcccatccagaagcccaagctgctgcggccgcgcctgctgccgggtgaggagtgtgtgctggacggcctgcgcgtctacctgctgccggatgggcgtgaggagggcgcggggggcagtgctgggggaccagcattgctcccagctgagggcgccgtcttcctcaccacgtaccgggtcatcttcacggggatgcccacggaccccctggttggggagcaggtggtggtccgctccttcccggtggctgcgctgaccaaggagaagcgcatcagcgtccagacccctgtggaccagctcctgcaggacgggctccagctgcgctcctgcacattccagctgctgaaaatggcctttgacgaggaggtggggtctgacagcgccgagctcttccgtaagcagctgcataagctgcggtacccgccggacatcagggccacctttgcgttcaccttgggctctgcccacacacctggccggccaccgcgagtcaccaaggacaagggtccttccctcagaaccctgtcccggaacctggtcaagaacgccaagaagaccatcgggcggcagcatgtcactcgcaagaagtacaacccccccagctgggagcaccggggccagccgccccctgaggaccaggaggacgagatctcagtgtcggaggagctggagcccagcacgctgaccccgtcctcagccctgaagccctccgaccgcatgaccatgagcagcctggtggaaagggcttgctgtcgcgactaccagcgcctcggtctgggcaccctgagcagcagcctgagccgggccaagtctgagcccttccgcatttctccggtcaaccgcatgtatgccatctgccgcagctacccagggctgctgatcgtgcgccagagtgtccaggacaacgccctgcagcgcgtgtcccgctgctaccgccagaaccgcttccccgtggtctgctggcgcagcgggcggtccaaggcggtgctgctgcgctctggaggcctgcatggcaaaggtgtcgtcggcctcttcaaggcccagaacgcaccttctccaggccagtcccaggcggactcgagtagcctggagcaggagaagtacctgcaggctgtggtcagctccatgccccgctacgccgacgcgtcgggacgcaacacgcttagcggcttctcctcagcccacatgggcagtcacggtaagtggggcagtgtccggaccagtggacgcagcagtggccttggcaccgatgtgggctcccggctagctggcagagacgcgctggccccaccccaggccaacgggggccctcccgacccgggcttcctgcgtccgcagcgagcagccctctatatccttggggacaaagcccagctcaagggtgtgcggtcagaccccctgcagcagtgggagctggtgcccattgaggtattcgaggcacggcaggtgaaggctagcttcaagaagctgctgaaagcatgtgtcccaggctgccccgctgctgagcccagcccagcctccttcctgcgctcactggaggactcagagtggctgatccagatccacaagctgctgcaggtgtctgtgctggtggtggagctcctggattcaggctcctccgtgctggtgggcctggaggatggctgggacatcaccacccaggtggtatccttggtgcagctgctctcagaccccttctaccgcacgctggagggctttcgcctgctggtggagaaggagtggctgtccttcggccatcgcttcagccaccgtggagctcacaccctggccgggcagagcagcggcttcacacccgtcttcctgcagttcctggactgcgtacaccaggtccacctgcagttccccatggagtttgagttcagccagttctacctcaagttcctcggctaccaccatgtgtcccgccgtttccggaccttcctgctcgactctgactatgagcgcattgagctggggctgctgtatgaggagaagggggaacgcaggggccaggtgccgtgcaggtctgtgtgggagtatgtggaccggctgagcaagaggacgcctgtgttccacaattacatgtatgcgcccgaggacgcagaggtcctgcggccctacagcaacgtgtccaacctgaaggtgtgggacttctacactgaggagacgctggccgaggccctccctatgactgggaactggcccaggggccccctgaacccccagaggaagaacggtctgatggaggcgtccccagagcagcgccgcgtggtgtggccctgttacgacagctgcccgcgggcccagcctgacgccatctcacgcctgctggaggagctgcagaggctggagacagagttgggccaacccgctgagcgctggaaggacacctgggaccgggtgaaggctgcacagcgcctcgagggccggccagacggccgtggcacccctagctccctccttgtgtccaccgcaccccaccaccgtcgctcgctgggtgtgtacctgcaggaggggcccgtgggctccaccctgagcctcagcctggacagcgaccagagtagtggctcaaccacatccggctcccgtcaggctgcccgccgcagcaccagcaccctgtacagccagttccagacagcagagagtgagaacaggtcctacgagggcactctgtacaagaagggggccttcatgaagccttggaaggcccgctggttcgtgctggacaagaccaagcaccagctgcgctactacgaccaccgtgtggacacagagtgcaagggtgtcatcgacttggcggaggtggaggctgtggcacctggcacgcccactatgggtgcccctaagactgtggacgagaaggccttctttgacgtgaagacaacgcgtcgcgtttacaacttctgtgcccaggacgtgccctcggcccagcagtgggtggaccggatccagagctgctgtcggacgcctgagcctcccagccctgcccggctgctctgctctcgttaccgaccactaggggtggcagggccgccccggccatgtttacagccccggccctcgacagtactgagccccgagcccccagcacttgtgtgtacagcccccgtccccgccccgccccgcccggccggccctaacttattttggcgtcacagctgagcaccgtgccgggaggtggccaaggtacagcccgcaatgggcctgtaaatagtccggccccgtcagcgtgtgctggtccacgggctcaggcgagtttctagaaagagtctatataaagagagaactaacgccaaaaaaaaaa

SEQ ID NO: 62205 - DNA, 2611 bp, Homo Sapiens; identical to SEQ ID NO: 29556

SEQ ID NO: 62206 - DNA, 5280 bp, Homo Sapiens
agcaagctgagctcagagcgaagctggcgagccaaggagataaagaaccctcggtggggatgcccagagggtgcatgctccacgcccctcgaaaccgattctcattgctgctgctgcaaagcaacccgaagtgcgccacctacccgactgaggctgcgcaagccccggggtctgggcggggtggtcctcgtgcgcgccgcgtcgccgtggagacgagggcgggcccgcgcgagactggcgtctagaggcgcgcgaagcgctgaggcgggcgtggaccgcgcgggagttaagaagcaggtcccggatcgccgtataccgccgggttttctcccaacgtcaggcccgatggctcggcttccccagttagaaggggaagataaaagactttgattcatgaagaatctgctcactgagaagtgtatatcaagccacaatttccatcaaaaagtgattaagcagagaatggagaagaaggttgattccaggtattttaaggatggtgcagttaagaaaccttattctgcaaagacactgtccaacaagaagtcttctgcatcctttgggatccggagggagttacctagtaccagtcatctagtgcagtatcgtggcacacatacttgtacccgacagggccggttaagagaactgcgcatcagatgcgtggccagaaagttcttatatttatggattcgaatgacttttggaagagtatttccctctaaagccagattttactatgagcagcgattactacggaaggtcttcgaagaatggaaagaggagtggtgggttttccagcacgagtggaaactctgtgttcgagctgactgtcactacaggtattacctgtacaacctgatgttccagacgtggaagacctatgtgcgtcagcagcaggagatgaggaacaagtacattagagccgaggttcatgatgcaaagcaaaagatgcgacaggcctggaagtcctggttgatctacgtggttgttcgtaggaccaaacttcagatgcagactacagctctggagtttaggcaacggattatcttacgggtgtggtggagcacgtggaggcagcgactaggacaggtccgtgtgagccgtgccctccatgcctctgctttgaagcacagggccctgagcctccaggtgcaggcttggtcacagtggcgggaacagctcctgtatgtccagaaggagaaacaaaaggttgtctctgcagtgaaacatcatcagcactggcaaaaacggagatttctaaaggcctggcttgaatacctgcaagtccgcagagtgaagagacagcagaatgagatggctgagcgattccatcatgtcactgtgctccagatacacttctgtgactggcagcaggcctgggagcggagggagagcttgtacgctcaccatgcccaggtggagaaactggccaggaagatggccctgcggcgcgcctttactcactggaaacactacatgctgctgtgtgcagaagaagctgcccagtttgagatggcagaagagcaccacaggcacagccagctgctgctgcacaggttctggaacctctggcggtctcagattgagcagaaaaaggaaagagagctgctccccttactgcatgctgcctgggaccactacagaatagcactgctgtgcaaatgtatcgaattgtggctacagtatactcagaagaggcggtacaagcagctgctacaggccagagcggatggtcatttccagcagagagccctgcctgctgccttccacacatggaacagactctggcgatggcgccaccaggaaaatgtcctcagtgcaagagcaacacgtttccacagggagacattagagaagcaagtattttctctctggaggcagaagatgtttcagcatcgagaaaaccgcctggcagagagaatggccatccttcacgcagagcgacagcttctgtataggtcttggttcatgtggcaccagcaggcagcagcacgtcaccaggagcaggagtggcaaacagtggcctgtgcccaccaccgccacgggcggctcaagaaagctttctgcctctggagggaaagtgcccaagggctcagaacagagaggacgggcagggtgcgggcagcagaattccacatggcccagctcctgcgttgggcctggagccagtggagggagtgcctggccctgcggggagcggagcggcagaagctgatgcgagcagacctgcaccaccagcacagcgtgctgcacagggcgctgcaggcatgggtgacttaccagggcagggtgcgaagcatcctccgggaggtggcagccagggagagccagcacaacaggcagctgctgcgcggggcattacgtcgctggaaagagaacaccatggcccgagtggatgaagccaaaaaaacctttcaagcaagtactcattacagaaggaccatatgttccaaggtcctggtccagtggcgggaagctgtgtcagtgcagatgtattaccgacagcaggaggactgtgccatctgggaggcccagaaggtgctggacaggggctgtctgcggacctggtttcagcgctggtgggactgcagccggaggtcagcccagcagagactgcagctggagagggcagtgcaacaccaccaccggcagctgctgctggaggggctggcccggtggaagacgcaccatctgcagtgtgtcaggaagaggctcctgcacaggcagagcacccaactgctggcacagagactcagccggacctgcttccgccagtggagacaacagctggcagccaggaggcaggagcagcgggcgacagtgcgggccctgtggttctgggccttctcgctgcaggcaaaggtgtgggccacgtggctggcctttgtactggaaaggaggagaaagaaggcgcggctgcagtgggcgctccaggcctaccaggggcagctcctccaggagggtgccacgcggctcctgcgctttgcagccagcatgaaggcctcccggcagcagctgcaggcccagcagcaggtccaggcggctcacagtctccatcgtgccgtccgccgctgtgccacgctctggaaacagaaagtgctgggccggggcgggaagcctcagcccctggcagccatcgcacccagcaggaaagtgacgtttgagggtccccttctcaaccgcattgctgctggggctggggatggcacccttgagaccaagaggccacaggcttctcggcctctgggagctctgggccgcctggctgctgaggagccccacgccctggagctgtgagtagcctgtgctcaccttgtcctcgcttccaccctgggcaaaaggttggatggcatagcagggaggaaaacagccctgacgggatgggacgggctggtcacggccttgtcacagctgagctgctgggaaccccctcttctccagccagatcccatccctcccacggcaagagggagagaatggagtgggatttccaaaccctctctcctttgcctgccaaagctcaggaaataggtgtcccctcctctgcaacaccttcctaccctctctcccgtcctgctgacacgatcttttccggagtcatacacgtagttgacaaagggaacaagctcagctcctacccgtgcctgccggcctctcttctgctccatcacagccaagacactggctttttgtcagaagcccctctttcttgtgtgagctggcacctgtccctctgcccacccctactatggtctcctcaaaccctaacctgccctgccccatgctgatgaagctggtggctcccacagcaaccagcactacccgagagccttgggcctcgggggagatgtcaggtgggtgcatggggcctgggtcccggtccctgctgtgctcctcactgtttgactgaccttgatgggatcctgaacgtctcagaggctgctcccctgtgacatggaccctggcgacctgtacaccagcgtcaccagggttgttctgcaggtcaaaagagacaatgtgggtgaagcagtcccctggcgtcaggtaccttttgtcggaactgctgggagctctatggcccaggcccaccccagcttacttgctgaccttggcctcgcctttcctgactttcagtctccctataaaattggagatcccacagagatctcagacccccctgcagcccctggtcagcccaggggaacagaccccatgtttctttccagcaacactgcccactcagcgaggaagcagccgcgacgcccacacttcctgttggagcctgcgcagagccagaggtccctggggtgcagcaccgtgggcaggcagggggagatggtcaggggtccccaaaggcagcgggcacctccatgtggggcctgtgttttggcagccctggggtgggtggccccctttccttcttgttctttggtcccagaggagggtcctgtggcctgaccaggctcttgccttccctgtgctcaggcctcagaagccacaggaacatggcctaggcatggctcagccagcagccccctccctgacgcggcccttcctggcagaggccccgacagcactggtcccacacagccccctgcctggggccctgtcaagcgcccctggcccgaagcagcccccgacggcaagcacaggcccggagctgctgctgctgcctccttcctccttcatgccctgcggggcggctgcaccagccagggtgtcagcacagcgggctactcctagggataagcccccggtcccctcatccctggccagtgtccctgacccccatctactccttcctggggacttctcagccaccagggctgggcctggactttcaactgcaggcagcctggaccttgaggctgaacttgaggagatccagcagcaactactgcactaccagaccaccaagcagaacctctggtcctgtcggcggcaagcgagcagcctgcgcaggtggctggagctgaacagagaggagccagggcctgaggaccaggaagtagagcagcaggtgcagaaagagctggaacaggtggaaatgcagatccagctgctggcagaggagctccaggctcagcgccagcccattggcgcctgcgttgcccgcatccaggccctgcggcaggccctgtgctagcgtgttcgcaccaggaacgcaggtgctgggctgtcggggaggcctcaggccacctccaggaacagaacacagttttaagtttgattttttttatttcaaaatgctttgcaattaaatgaattactgttcag

SEQ ID NO: 62207 - DNA, 5520 bp, Homo Sapiens
gttcctctccctcatcggcgagaaggtctgcctgaagggcttcaccaagtacgctgcccagctggacgtcaagaccgactccacgggaacccactccctctacacgatgtaccaggactacgagatcatgttccatgtctccaccctgctcccttacacccccaacaacaggcagcagctgctacggaagaggcacataggaaatgacatcgtgacgatcatcttccaggagcctggcgcgctaccgttcacccccaagaacatccgctcccacttccagcacgtcttcatcattgtccgagtccacaacccctgcactgataacgtctgttacagtatggctgtgacccgatccaaagacgctcctcctttcggcccccccatccccagtggaaccacattccgcaaatccgacgtcttcagagacttcttgctggccaaggtgattaacgctgagaacgccgcgcacaagtccgacaagttccacaccatggccaccaggacccgccaggagtatctcaaggacctggccgaaaactgtgtctccaacacccccatcgactccaccggcaaattcaacctcatctccctgacctccaagaagaaggaaaagacaaaagcacgggctggcgctgagcagcacagtgcaggggccatcgcctggagggtggtggcccaggactacgcccagggggtggaaatcgactgcattttgggaatttccaatgagtttgtggtgctcctggacttacgcaccaaggaggtggtgttcaactgctactgcggggatgtcattggctggactccagactcctccacactcaaaatcttctatggacgaggagaccacatcttcctacaggcgacagagggttctgtggaggacataagggagatagtgcagagactgaaggtgatgaccagtggctgggagacggtggacatgacgcttcggcggaacgggctcgggcagctgggcttccacgtgaagtacgacggcacggtggccgaggttgaggactatgggttcgcctggcaggccggcctccggcagggcagccgactagtggagatctgcaaggtggccgtggtcacactgacccacgaccagatgatcgacctgctgcgcacctctgtcactgtgaaggtggtcatcatcccgccttttgaggacggcactccccggaggggttggccggagacctacgacatgaatacctcggagcccaagacggagcaggaaagcatcactcctgggggccggcccccctaccgcagcaatgctccctggcagtggagcgggcccgcatcccataactctctaccagcctccaagtgggccactccaaccactcccggccatgcccagtccctgagccggcccctgaagcagacccccatagtccccttccgggagtcccagccactgcacagcaagaggcctgtcagcttcccagaaaccccttacacagtatcaccagcaggggccgacagagtccctccctaccgacagccttctgggagcttctccacccccggttcggccacctacgtgagatacaagccatccccagaaaggtacacggctgccccacaccccctgctatctcttgatccccacttcagccacgatgggacgtccagcggcgactcctcttccggcggcctgaccagccaggagagcaccatggaacgccagaagccagagcctttgtggcatgtgcctgcccaggccaggctctcagccatagccggaagcagcgggaacaagcacccgtccaggcaggatgcagcaggcaaagattctcccaacaggcattccaaaggagaacctcaatactcaagtcattccagcagcaacaccctctccagcaacgcatccagcagccacagcgacgaccgctggttcgaccccctggaccccctggagccagagcaagaccccctctccaagggtggctctagtgacagcggcatcgacaccaccctctacacctccagccctagctgcatgtccctggccaaggctccacggcccgccaagccacacaagccccctggaagtatgggcctttgtggcgggggtcgcgaggccgctgggaggtcccaccacgcagacaggcggcgggaggtctcccctgcccccgcagttgccggccaaagcaagggctaccgaccgaagctgtactcctccggctccagcacccccacgggactggcggggggcagccgagacccaccgaggcagcccagtgacatgggctcgagggttggctaccccgctcaggtttacaaaactgccagtgcagagactcctcggccctcccagctggcccagcccagcccctttcagctctccgcctccgtccccaagtccttcttctccaagcagcctgtacgcaataagcacccaacagggtggaagagaacggaggagcccccaccacggccactccccttcagtgacccaaagaagcaggtggacacgaacaccaaaaatgtctttgggcaaccgaggttgagggcatccctccgagacctccggtcaccacggaagaactacaaatccaccatcgaggatgacctgaagaaactcatcatcatggacaacctggggccagagcaggagagagacacgggacagtcaccgcagaagggcctgcagcggacgctgtcggacgagagcctgtgcagcgggcgccgggagcccagcttcgccagccccgctggcctagagccagggctgcccagcgacgtgctcttcaccagcacctgcgccttcccgtccagcacgctgcctgcacgccgccagcaccagcacccccacccgcccgtcggccccggtgccacccctgccgccggcagcggctttcccgagaagaaatccaccatctcagcctcggagctctcgctggctgatgggcgggaccgccccctgcggcgcctggaccctgggctgatgcccctgcctgacacagctgctggcctcgagtggtccagcctggtgaacgcagccaaggcatacgaagtgcaaagagccgtctcactcttctctctgaacgacccggccctgagcccggacatcccgcctgcacacagtcctgtccacagccacctgagcctggagaggggacccccgacccccaggaccacccctaccatgagcgaggagccacccctggatctgacaggcaaggtgtaccagctggaggtgatgctgaaacagctgcacactgacctgcagaaggagaagcaggacaaggtggtgctccagtcagaggtggccagcctgcggcagaacaaccagcggctgcaggaggagtcgcaggccgccagcgagcagctgcgcaagtttgcggagatcttctgcagggagaagaaggagctctgaggtgggaggccgccgcccgccttcgctccttcccctcaggccgtggccctgctgcctctctccctccactcagctcccagctgccggtgtgaccaagatgacccatccagggccctccccatggacacggaaactccgatggcctcactagggctgtgagtcagggtcagcgcacacagccctcatgccccagagggcgaagtggtctcaggcctccctccaagctgcccagctgtggtcccggtgagctgggctgtgcttacaccgctcccgggcctgccccgctgtccccatctagcctcttcctgggaccagcccttcgaagctgatggggacggagagaggagccagtctccagacgcctcggctccaggaggtcacacagcaggtttctgcaccacgcacaacaaagttgcggcttgtggggccgaggcccctgcatgaaaagtacagcgtgaaagcaaccctttcttccccacacccagagaggtgaggcccgcgtggacacagaccagggcgcctcggtccctagcacgtgagctccaaaaagcacgaacatgatcccctccctaaccccctcctcccaaaaagcagccaggagcactttcttagagtttaaattattttcttgggggcctgaggatagagagaggcaaggctagcctccagagccgatttatttgagagagaaactctatttggatctccaggacggtttatacgatctttttctatcagctcctcttccgccagaggccactgcacctgggctaggggtccacaggcccctccaccttccagctaaccaggccaggccggggcggtggagccaccacacagccgactctctcctcctcctcccggcacgacctggccctgaccagcagcctcggcctcttctgggttccaggaggggctcccgaagccctcaggacagggctggaggagaacagccttcatctcctcctctggtttttttttcctttgcaagtctcccagcccatctctccgagcagcggccaccagaccccctcaccatgctccccggggagcactgcaccccgcgaaccccactggacgctggttctctaaaggcaataaggggcggccatgccggtgtggtaccacgctgttcctccaggaaaccgtttctttttttccttctttaaaagcaaacagaaaaagatatatatatatatatatatatatatttattttttcatgtagagttggcgccagaacaagcctgtatggccacagtctgtggattcatccccccaacctcaagctgaggaccaaggcgtgtcccctgtgggctgggggtcagtgggaggaccagagggatgaagtcagggcaggccggtgccctttttgggaggcatcaggcggggaggagttggcggagcaggtctggctgtgagccagcaccaggcaacccggcccttgtccagggacctctgctgccttctctctggggtcaggaacctcagaggagggggctctggggactgcataggacgcaggcactcggaggtgccggtgtggatgggtgggggtgagagaagagggttcttatcgcgtctcctgtgatcagcctctggccccctggaggaggaaacctcagcgctgcccctgcccccaccctcacccccaacaccaagagtgaggtgggcgtgccccaggcagcgtcctcagccctggccagctactgtgatgccatcttctcccccatccccttctctggggggcccacccgtcccccacccccaccccttagaccctcatcgggtcccttttttttttttttttttcagttgtctcctcccatcttcagatcattcgaatcattttggggacttaatcatgtacatggacaagtgtaaattatgatttttggttttgttttctgttattttttaaggatttctgcaaaaacagatctatttaatttgaggttgatgttctatccaatggccgaagatagcagcaggttttttttttcatatgttgatttgtttcatttggattttttttttattattctttattgtcttttttttttccccatccctgtcttgagattttctggcatgtttctggaggtttcaaaggaaataaatgtttcatag

SEQ ID NO: 62208 - DNA, 528 bp, Homo Sapiens
gcaaagaacacatgatttattcaagacaactcgtcatcaacagcactgactcaaggaacaaaacagatgaaaaaactaaagcaaacgttctgaccctctggagtgagacccgctgaattcatacagctcaatctgtaagtgtccaagatccagggggcaggttctcaagcaggaagcctcaggcactctggctctgtggggacctcccttgggcatctgcttgagaatctggggaagggacattatcagggcaggtcctttctgcaggcggtgtcctgctgggagctcagcctaaccaaggcctggtccctgtgctcttgaccttcatctcaaggtcaaggagagggcacttgacccaactctgccagcgaggcaaagtaatggtgattcaagtagtgtggttccaggagggaaggtagggggcagacaagagtgagtgcactaaagagtcctgggcagtgtctgctgggtcccaggcagtggcccaagcttatgaaaggggttggagaaggggctgaaccaccagct

SEQ ID NO: 62209 - DNA, 40775 bp, Homo Sapiens
gatctcttttagtttttgtcgctgcctctctgctcatctgtactcctcactgggcaggaactttgagaaatggaggcccacatctgttgtgttcactgctgtaatcccagcaagcagcatggtgcggcaccttcacagggcctctggctccagatcgttggcacacagtaagtgtttctttttttaaaattattattattatttttatcgagaaggagtctcgctgtgttagcccaggctggagttcagtggtgcgatcttggctcactgcaacctccgcctcctgggttcaagcaattctcctgcctcagcctcctgaatagctgggattagaggcccgccaccacgcccaactaatttttatatttttagtagaaacgcggtttcaccatgttggtcaggctggtctcgaactcctgacctcatgatccgcctgcctcaccctcccaaagtgctgggattacaggcgtgagccactgcacccagccataagtgtttcttatgttgaatttgcagcttgtataaaaatgaaccaagacattatgaaatacagtcacttttttttttttccttttgtgactaatttttcttaaggagcagtgatcagggaaaggaagatgtttccctagaactcctctagagggcatatcttccctggatctttgacattgattttcggagcggtaatggatcttacacaaggagtggccatcccctaggaggcctgtccacgcagatggagggtgtggtggtgctgagtgatgtctccctggcagcttggactggagaccctagagggaggtcttcatgtccaaaggcagggatctggaagaaggggaatgtgtgtgcacagactgccccctgccctttttttttttttctttgaagacaggatctcactctgtcacccaggctgaagtacagtggtgtgatcattactcactgcagcctcgacctcccaggctcaggtgatcctcccacttcagcctcccgagtagctgggactacacctatgtgccaccatgcctggctaattttttgtagagacagggtttccccatgtttcccaggctagtcttgaactcctgggctcaagcaatccacccactttggcctcccaaagtcctgggactacgggcatgagctactgtgcctggtctagactcccctttttttttttttaatgagatggagtttcactcttgttgcccaggctggagtccaatggcgcaatcttggctcaccgcaacctctgcctcccgggttctagaaattctcctgcctgaacctcctgagtagctgggattacaggcatgcaccaccacgtctgggtagttttgtatttttagtagagatagggtttctccatgctggtcaggctggtctcaactccccacctcaggtgatctgccagcctcagtctcccaaagtgctgggattacagattacaggcatgagccaccgtgcccggcttttttttttaggcggagttttgctcttgtcgcccaggctggagtggaatggtgcgatcttggctcactgcaacctccgcctcctgggttcaagcaattctcctgcctcagcctcccaagtagctgggattacaggcacccaccaccacgcccagccaatttttgtatttttagtagagatggtgtttcaccatattggccaggctggtcttgaactcctgacttcaggtgatccacctgactcagcctctcaaagtgctgggattacaggcgtgagccaccacaccgggcctagactcccatttttatttaacgtcttccatttcttatcagagaaatgataataaaatatagaaaagcacaattctttattttaaccccacctctcgctcacttaaatgaccagttatttccaagtctggatctgaaaatttctattatgagagactctccaggaccttcattcagttccacgtgtagttgtgacattgtgtgatattggcacacggttggaaataacacttgtgtagcagtttgagatgaaatataggcaatgcctggcttctgaaagtgccttcaggcctgatgttacacaagcattctcagcccaacttgcctcccctcctatttctatctctacctttagctgggtatttggatagttcaggggaaaaaggggtaaagatgagatgacaaaagacaccccagccgctgggcccagcactttgggaggctgaggtgggtggattactgaggtcaggagttcgagaccagcctggccaacatggcaaaaccctgtctctacaaaaaatacaaaatttagctgggcatggggtgcaggcttgcagtcccagctatttgcggggggaggggagctgaagcaggagaatagcttgaacttgcaaggtggagtctgcagtgagccgagattgtgccactgcactccagcctgggtgacaaagtaagaccctggctaaaaacaaacacacacaaaaatatatcattatgcatttctgaaagcaaatgtgctataatactgctttgatctgaatgtcccccaaaattcatatgttgacatttaatctcaactttggtggtattaagaggtgaggttgtttgggaagtaattaagtcatgaggactccactcccatgaatgaattgagggaaagggctggagggaagggctggagggaactagcttcggcccttttttgtccttctaccatgtgaggacacagcattcatctcctccggaggatgcaacaacaaggctctatgtgaagaaggaaccaggtccctcaccagacactgtacctgccggcaccttgatctttcacttcccagccctccagatctgtgagaaacacatttctgttgtttataaattactctgtctcaggtattttgttatagtagcacaaacagacttagacaaataacgttttatgtttacaacccataggaggaaaattctggatttggaatctatcttggcaagataatacatagatatgattataagaaaatcagtgaggtcataaacagtggcttaccaacataggttggtatacaaatataacttcacataacaaatatagttgacttgaagtaaacaaacacaatctactatagcattctgacaaatgtagtttcctataacaaataatcaaagccttaagtttcaggttacagttttcagagttagtagtagccaattactgccaggcatagtggctcaaacctgtaatcccagcactttgggaggccaaggtgggaggactgcatgagcccaggagtttgagaccagcctgagcaacatggtgagaccctgtctctattttatttcattaaaaattttaaaatattggccaggagcagtggctcatgcctgtaatctcagcactttgggaagctgaggcaggcggatcacttgagatcaggagttccagaccagcctagccaacatggtgaaaccccctctctactaaaaatacaaaaattagcctggcatggtggtgcacacctgtaatcccagccacttgggagactgagtcagagtcgtttgaacctgggaggcagaggatgcagtgagtccagatcgcaccactgcactccagcctgagtgatagagtaagactctgtcttaaaataaataaaaaaaaattatttaaaaaaagaagtagcctatctcagaggctacgcgactttattacagttttaaaaatggaatggtaggccaggtgcggtggctcacacctataatcccagcactttgggaggctaaggcgggcagatcacgaggtcaggagttcgagaccagcctggccaatatggtgaaaccccgtttctactaaaaatgccaaaattagctgggcatggtggcggatgtctgtaatcccagctactcaggaggctgaggcaggagaatcgcttgaacccgtgaggcagaggttgcagtgagccgagaacacgccactgcactccagcctgggggacagtgcaagactccgtctccttggccaggcacagtggctcatgcctgtcatcccagcactttgggaggctgaggcgggtggatcaggaggtcaggagatcgagaccatcctggctaacatggtgaagccccatctctattaaaaatataaaaaattagctgggcgtagtggcgggcgcctgtagtcccagctacttgggaggctgaggcaggagaatggcatgaaccccggaggcagagcttgcagcaagccgagattgtgccagagccagactctgtctcaaaaaaaaaaaaaaaaaaaaagactccatctccaaaaaataaaaaattttaaaaatggaatggtagttacctttgctagagactgagcatgcataaaagtaatcttaaataactttttcgcctttggccaaatgttggttcattgtgatttggagtctaccattactataactgtatctgtacctataccaatatctgtacctgtacctatacctacatatgtacttatacctataccatctgtcctcccctgaaagacctcatcaaagttctcatcttgcaatgtttcctgttaaatatcatcatgactacttttaacctatttgaatcaaggctgagttacagccttttaaatttttgaataatttttttttttttttgagatggagtattgccctcgttgcccaggctggagtgtggtggcacaatctcggctcaccaaaacatccacctcacgggttcaagcaattctcctgcctcagcctcctgagtagctggaattacaggcacatgccacaatgcccggctaattttttttgtatttttagtagagatgggatctcaccatgttggccaggctggtctggaactcctgacctcaagtggtccttctgccttggccttccaaagtgctgggattataggcatgatccaccatgcctggcaatttttttttaagagcacaaatccacgtttatttattgacttttcttttttctttcttctctttttttctctttttcttttttttttttttttttgagacggagtctcgctctgttgcccaggctagagtgcagtggcacgatctcgactcactgcaacctccaccttccaggttcaagcagttctctgcctcagcctcccaagtagctgggattacaggtgcctgccaccacacccggcttttttgtatttttagtagagacggggtttcaccatcttggccaggctggtcttgaactcctgacctcgtgattcacccgcctcagcctcccaaagtgctgggatgacaggcgtgagccaccgcacccggcctattgacttttcattagtttaaatccttgaagggtacagcatcactcggattctgtgtccaatagccttagtgggaagattgcttcagaatttggcacgaatcatgtcactgtttccgtgggcctgcctcagcctcccgagtagctgggattacaggcggccgccaccacgcctggctaacttttttggttttttttttttttttttttttttgagacggagtctcgctctgtcttccaggctgtagtgcagtggcgcgatctccgctcactgcaagctccgcctgccgggttcacgccattctcctgcctcagcctcctgagtagctgggactacaggcgcccgccaccacgcccggctaattttttttgtatttttagtacagagagtttttcaccatgttagccaggatggtctcgatctcctgacctcgtgatccgcccgcctcggcctcccaaagtgctaggattacaggtgtgagccaacgcgcccggccaccaaatagtgtaatttttacagttacactttgtaactagtgttgctgaagacggaaatgcaattgattttgaaaattgattttttcctcttactgattttttatccatcaaccttgctaaacttatttatcaattctatctgaattttattttagggatgctgcacatgcaataatttcatctgcgaatattaacattaatgtttcttgtagtccttatatatttgttgcttattggactggctacaacttccattgttttattgatgaggattattgagagcaggcatccttgccttgttccccatcttgaaaggaacgctttcaacatttccccattatggtgatgtgttttgcgaaatttttgaagatgtcctttatcagcttctggagttttaaaaaaaatatcaacgggtgttgaatattttgagtgactttgctgcatcaattgagatgaatacattttccccctttaatctgctaatgggtctatatttctccattccatttaaatttttttttaatttgataaatatcttttgctatatgtttcttctcaggtctcccttctcagttatccccctttaccttccattgttggttttctctagtttcttccttttctttttactgtgttctcttcaagctcctgctttttggagttttcccaggatatcaaaggttggggggatggcaacatggttttcagacagtgtgtctccccacaatctgcttctctctacaagcttgtttgaagccaagttaaagcaatggatagaagacggcagcgcgggtgtcagacctgccaatttccaactgcacaccaaatccccgaacatatgcttgaggcccctgcctttcggtttcataaataaaaccctgtcctgactacctccaggattggatggaaactcggatgagtaaatatggtagaacgactttgcaaactagcaccctattcacacgtaaggggttgctcttgtcaccgagactgttagaggcaacgtgagttaacagaaatagcttggattttgaagctaatggaatctagatccattcctaaccagcagtgtgaccttattgtgtaatctttctgaacctgtctccatccatctctacaaagaatgtggcacaatgtaggaactcagtgaattttcgtgattaaaagacgagataatacaggtgcacaatctgcaaaacataaaatactccataaatggaagcagtaaatcttccccgagctcgagactccaaaggccctgagcccagtaccagtaacagcacccaggtaagtaggctggctgagagaagagggctataaagaaaagttctttcctgagctttgaatccccactgtcaggcttcaatggagcgcaaaagttcctaaatttggtgagaaatggcaacattaccagggaatgaacagaccaggccactcacatccacgtgagggctccaggagccacttccgggcccagtcaaccacgaccaggagaggcagcgctggagcctcgatcacgtcgacggaaaacaagtgcgctccctactgcagtcaccaggaggcgctagtcccgcctgtctcccggcacgggtcctcgtttgcgcacgcgtcatttctttcctccagcgtccccgccccttctcctccggccgccaccagtttcgcttggccagttgcgttcgtgcggcgacgtccacgcattttctgacgtagcgagcgacggcggggagccgagcggaagtccagcactattgccgctagaggaggggaggggtgagaagcataagtggcaccggaagtggaattaatccgcctacctctcctgcgcctgcgaaacagaaaagacaaggcgcctgtcgggcggggtgtggcttcgggtggcggagaacgctgcgattggccctcggctgtggcgacagcgacgattggtccctgcgtgcagagcgcggtgagagtgggtggtggccgttggaattcaaaagtggcgggtgtggcgcggggctggtagcggccggagccgtgcgagttctctaccctgcttcgcgagcgggcgagagaacgcgagtcccaggatccccggcacccacttctcttccactgcattcccccggcgcgtgtgggaccgaggtggacatggatccgcaggtgagtaggggcggcgcaggtgtcctgccctggggatggggacgacggctgaccgctccgatgctgtcgcgcccccggctcccggtcggcctttgtcatgtctaccgggagagcgaaggtccgtgcgcccccgcacaagtggaaaggggcggaggcaggagtggagacggcttagagcacccggggaggtcggaaggcacgtctgtctgccctcccctagcttcaagtttctggagcccctcccttaactttcatgtctccgagatttctcatttcgaattctcaggctcgtctgacacatttccacttctttattcctactcagggtgtgattgcagtgtgtaagaagggagagttctgatatgacttcttccttttggggacatggtgtctgaggccacatccttgctgaggtccttttgtgttaatcgcctctccttatcactgctgcttcggagtgtaggaaagggagaaggagagtagggtaatctgggccaaaagacttctcattctctctctcctttcccaaattgtgcagattcctgcccaatgaaactgattgatttagttctttctcttaaatggtgccctgctgcaccccacaaccatatgcagcttcctgtctccagtgaagagagatgaatgtgtgtgacagctggagtgtacttatctctggtgccaggaaaggtctcctgcctgaatcctttgtttactagtatttcacgttcaggtttccctgaagttaggattcagccttaagagagattctttctctcgtgacaaccagagagcagagtagtatgatgtgacagtaagaagtagtaaaagccttctcagatctattaatcaagtatttattgagcacctactacatgctaggcgtggttgtaggtacttaggatgcagcagtgaacaagggacaaatcgttgccatcgtggagctgccattctatggggatacagacaataaatgtaataaatgaattatataactgccagaaggccgtaagtgctgcggagaaaaggagaaattcaaggttgaggacataggggaggccaactggcgggttagagtattaaatagggtggtctcagtaacccccatggaaaagatgagttgaataaagacttgaaggaagtgagggagacagacaagcagatagtgagggaagaacatttcaggcagagggaatctgctagagcagagtccctaaagagttgtaaggagggaagtgtggctggaatgaagtgagcaaggggaaaagttgtgggaaaggaagtcaggtaatgggtagtggggttgctgatcacagtttgtccttgtgggggtcgttgtgaggacttttactctgagtgagatggggaatcattggatgattttaagcagagagataagatttgttgggtccaccagattttcgtaaccatagcaccattgcctttttttttttttttttttttgagacaggttctctttctctgttcccaggctggagtgcagtggcatgatcatggctcactggagccttaacttcctgggctcaagtgatcctcccacctcagcctcctgagtagctgggactacaggcagctgccaccatgcctggctgattttttgtatttttaatagagacagggttttgccatgttgcccaggctggtctggaactaactcctgggctcaagcaattcgcctgcctcggcctccgagagtgctgggattacaggcatgagccaccgtgccctgcaacatttttttttttttttttttgagaagtagtcacgctctgtcgccagcctggagtgcagtggcgcggtctcggctcactgcaacctccgcctcccgggttcaggcgattctcctgcctcagcctcccgagtagctgggactacaggcgcctgccaccacgcccggctaattttttgtatttttagtatagacagggtttcaccgcgttagcccggatggtctcaatttcctgacctcatgatcctcccacctcggcctcccaaagtgctcggattacaggcatgagccactgcacctggccaacattttttattgtcgtgactaggtggggggttgctactggcatctagtgggtagagggcagggatgctgctaggcatctgacagtgtacaggactgcattggacattgtcaaatgtcaccttggggataaaatcacccccagttgagaaccactggtttatgataatctaggtgccagatgatggtgtcttaggtcagggtgatagcagtggaagaaacagtaaaaagtgattggattctggatatattttgaaggtacaatcagccatgctttgctgacagattagatgtggtatgtaggagaaagagaggactctgggtttttggcttgagcaactgaaagatggagttatatcaattgagatggagaaagctgcaaaaggagcaagttcaaagcagggttggacatcaagaggtcagttattagacttccaaatggagattttttttgatacggagtctctcactctgttgcccaggctggagtgcagtggtgtgatctcagctcactgcaacttctacctcccagcttcaagcaatcctcccacctcaatctcccgagtagctgggattacaggcacgtgccagcacacctggctaatttttgtatttttagtagagacagggttttgccatgttggccaggctggtctcgaactcctgaactcaagtgatccgcccgcctcggcctcccaaagtgctgggattacaggcatgaggcaccactcccagccttaaatagcgatgttgacgatgcagttcagtataggtgcaggatcgaggtctgagctggacatataaatttggaaactgtcagcatatcaatgatatttaaaggcatgggagtggatagtgagtatagatagagaatgctgttaaaatctggagagatgaggaggacctgccagtgaggtaagaaagagtggtctcctggaagctaactgaagaaagcctattaaggaaaagggagtaatcagttgtatcagatgctgtttgatgggtcaagaaaatgaagataaagaattgacttagcaacatgaagttacttgtgatcttgaggatagcaatttcgatggaatggtgggaatgaaagcctgattgcaatgggcttaggagagaaattggccacgatgaatacactagaggtaatactttagagttttgctgcgaaaggcggcaaggaaaaaggatagtacctgttagggaaagcagagttcagattcttttagtttcgaagaaataatagagtttgtggtatgccaattggagtgatgccatagagtacaaagctgatggtgcagaggtgagaagggaggattgctggaggaatgttcctgaaactgggaggatttggcgagtccaggatttggtgaggagggatgggaatgtgatgcatatatgaaagggttgccttaggagcagggccatccacctctgatcttgtggtgaggtggatgtaggcagggttgcatgaatatctgttcttatagaaggttaagtgcttatgcttctcactgtggaaagttggagggcatcattctagctttatattaatagatgggaaaaatatatatactgtggtctttggagttgtcctgaataaacaaacctttaaacacattttctgaaccggcataaattccaaggaggtaggtctgtagcagatccactacggtagtgtagagaggaggaagggcacaggttatttttaaaaattagtgtttgactttggaatacttaaagaaaaatttggtttccatactatatttgattacactaaattaaaataagctttctttgtgcacacttctgtaggtggcaggaaaaatgctacctctttttttccctttttatttttatagaagccaatggtatggatatatcacagtttaagtattgccccactgatgaacattcaatttcattccttcaaaaactgtagagtcctaccatgtagcagacattgtactaggccctctggttatatagttatgaacaaaacagatgaattcttatggtgctcacagtcttatgtaggggttatgataataaaaacaaaagaaaacagtgtatcaggttgtttcatgatttttaaaaataatgatgctctgtgaacttccttgagtaaatctcactgtatcacgggtagctcaaactcactttcccaaaattgaacttagcatccatgaaaccaatcctgctgggtccagtggcatgtgcttgttgtcctaggcacttaagaggctaaggcaggaggatcacttgaactcaaagttcaaagccagcttgggcaaccctgtctcaaaaacaaataaacaaaaaacaactcttcaggtactcagatctctgtgttatttcttttctttttctttttctttcttttcttttctttttttttttttttttttgagacaggatctcaatatgtcgcccaggctggagtgctggagtgcagtggcatgatcacggctcactgcagccttgatctgggcccaagccatcctcccacctcagcctcccttgtagctgggaccacaggcaaatgtcatctggttcgctaaggtggatgtctgcctagcttagccctcaagcttctagaatagcccctttcaactaggttccatgagaattaatttcttttttttttttttgagaccggagtctcgctctgtcacccaggctggagtgcagtggcacaatcttggctcactgcaagctccgcctcccgggttcacgccattctcctgcctcagcctccccaggagctgggactacaggcgcctgccaccacgcccggctaattttttgtattttttagtagagacgggatttcaccgtgttagctaggatggtcttgatctcctgaccttgtgatccgcccgcctcggcctcccaaagtgctgggattataggcataagccaccgcgcctggccaagttcttttttttttttttttttttttgagacgtagtctcgctctgtcacccaggctggagtgcagtgttgtgatctcggctcaccgcaacctccaccaatcgttcaagcgattctcctcctcggcctcccaagtagctggattacaggcacatgccaccatgcctgggtaatttttgtagaaacagggtttcaccatgttggtcaggctggtcttgaactcctgacctcaagtaatctgcccgcctcagcctcccaaaatgctggaattacaggcataagccaccgtgctcggccagaattaagttctaatgcccttttttttttttttttttgagacggagtcttactctattgcccaggttggagtgcagtggcgtgatctcggctcaccgcaacctctgcctcccaggttcaggcgattctcctgactcagcctcccgagtagctgggattgcaggcatgtgccaccacacccagctaatttttgtatttttagtagagacgggatttcaccatgttggtcaggctagtctcaaactcctgaccttgtgatctgcccacctccgcctcccaaagtgctgggattacaggcgtaagccactgcacccggtccaggtgaaacatttcaaacatggctcagtaaatattgcctgattctcccaagcagtcttcaacactcacatatcttccactctctcccttgtttatgattctcagctccagccaaaagggccagttggtttcttagccatgctatgtacatatttgaatttttgccttccaggaagagcatccattcctctctgcttgtttgagtcccacccttaaagttagtcaagtccagcttttcccctagaggttattcccacttttaggttacgtcctcacttctgttcatgctgtctggcacataattcagcttttggcacaagtggtgctcagtgcttggtggtggtgttgacaattgaggctgggggccaagacaggaagttcttgggacatttgggctcctgggtattgtcttaagggtctcttttcccaacagaggtcccccctattggaagtaaaggggaacatagaactgaagagacctctgattaaggccccttcccagctgcctctctcaggaagcagactcaagaggaggcctgaccagatggaagatggcctggagcctgagaaggtgagctgggcatggagagctgtgcatgtgtgtggggggtgtgtgtgtgtgaaagaaaggagagagagagtataaaccattagggagggtgactatggaccttgtctttatctttccccagaaacggacaagaggcctgggtgcaacgaccaaaattaccacatcccacccaagagttccatccctcactacagtgccacagacacaaggccagaccacaggtgggctctcaggatggatagactccaaggacatggaagtccagtgctcttcaactcacttgtttcttttctttcaattttattttattttttttgagacagagtctcgctctatcgcccaggctggagtgcagtggctcaatctcactcactgcaacctcctcctcccaggttcaaacgattctcctacctcagcctcccgagtagctgggattacaggtgcccacaccatgcccagctaatttttgtatttttttcagtagagatggggtttcgccatgttggccaggctggtcttgaactcctgacctcaggtgatccacccgcctctgccttccaaagtgctgggattataggtgtgaggcaccgcacccagcctattttgaataggtaataacatttcatttggttcaaaattccaaaggcacaaaggttgttgtatagtgaagtttgcttcctatttctgtcctccagccacccaattctgctacccagggcaactgtgtgttcttccagggaaattctattggtattcaagcaagtaagactatactcccccaccttttttacataaatggtggcatactttagacatggtcctgcttttacttatcttaatccaaattgctttttggcatatggagtacagttggccctctgtatccgtgggttctgcttctgcagattcaaccaaccatcggttgaaaatattcaaggagagtgggcacagtggctcatgcctgtaatcccagcactttggggggccaaggtgtgtagattacctgaggtccggagttccagaccagcctggccaatatggttgaaaccctgtctctactaaaaatataaaattagccagacgtgatggcccgtgcctgtaatcccagctactctggaggctgaggcaggagaattgcttagaacccaggaggtggaggttgcagtgagccgagattgtgccagcctggagacagagcgagactcggtctcaaaaaaaaaaatgagaaaatattcatggaaaataaaaaataaaaccaaaaaatacagtataacagttatggtcatgtgtcacttggcaatgcagatacattatcagaaatgcattattgtggaaacatcatagaatgtacttactgaaacctagatgatctagcctgctacacacctaggctatctgcgatagcctattgttcttgggcaacaagcctgtgtggcgtgttactatactgaagcatggtaggtaacataacacagtggtaaccatttgtgtatataaacatacctaaacatagaaaaggtacagttaaaatataatataaatgataaaaaatggcacacctgtacagggtactaaccattaaatggagcatgtttgaatggaagttgctctgggtgagttagtgagtgagtggtgagtgaatgtgaaggcctagggccttactgtacactgctgtagactttagaaacatggtacagttaggctacatcaaatttataaaaaatagttcttttataataaattaaccttagtttactataactattttactttataaacttaacattttttttcccacttgccaaggctgatgtaacattttaatctttttttaacttttttttttcgaccagttgtcaaatgatcctttattgaaatattttcctttgtgcttaactagctgggcattccacagcaccactgttgatgtcatctatgatgtcatgagggtggtggccatcaacattacagcccatagactgggcagtccccggaatctctttaatggttccagagagttctctggctaaggatcggtgccgcatctgtcgagcaatgttgacgatctcatcaaaagtgatattcccattgtgtttaatgtttttctgtttctttctgtctcttggtggtttcttgagggctttgatgatcggggcagaggcagaaggcaccacctcaatctgggcctgtctgttctcaatggtcagtttcactgtaatcctcaggcccttccagtcacccgttgccttggcaatgtcatcaccaaccttttttggagacagacccagggggccgatcttgggggccagggcagaagtggcaccgacttcacctctggtgcacctcaggtatacgaccttgatctcgttggggtcgaacttcggtggcatggtggaggcagctggtgtcggatgaacccagattcaggatgaccgaagaaagttgcaccttggcctcctccgagccgaaagccgagagcttctctctcttttttttttgagatggagtctcgctctgtcgcccaggctggagtgcagtggcacaatctcggctcactgcaagctccgcctcccgggttcccgccattttcctgcctcagccttccgtgtagctgggactacaggcgccctccaccacacttggctaattttgtttttttgtatttttaatagagacagggtttcaccatgttagccaggatggtctcgatctcctgacctcgtgatctgcctgcctcagcttcccaaagtgttgggattacaggcgtgagccactgcgcccggctaactttttgactcttgtaataacaactgaaaacacaaacattgtatagctttacagaaatattttattcctttatatccttattcctcatgctttttttctatctaaattttgttttgggcggggagcatatattcagggcaatatgaatctctgtctcctggcttgaaaataaaatttttgttttttgttttttgtttttgagacagagtctcgctctttcgcccaggctggagtgcaatggcgtgatctcggctcagtgtaacctccgcctcctgggttcaagtgattctcctgcctcagcctcccgagtagctgggactataggtgtgtgccatcatacccagctaattttttgtatttttagtagagatggggtttcaccgtattagtcaggatggtctcgatctcctgacctcgtgatccgcccgcctcagcctcccaaagtgctgggattacagacatgagttactgcgccccgcctgaaattctttttttaatttaaaattttatttatttgtattttttccaagaaataagcttaaatttgaaaaattttaaatattattttgcttttcaaactttttgttaaaaacgaagaaatatacacattagcctaggcctacatagggtcaggatcatcaacatcactggctttcacctccacatcttgtctcactggaagatcttcaggggcagtaacacacatggagatgtgacttcctgtgataacaatgctttcttctggattgccttttttttttttttgagacggagtctcgcactgtcgcccaggctagagtgcagtggcatgatctcggctcactgcaagctccgtctcctgggttcacaccattctcctgcctcagcctcccgagtagctgggactacaggtgcccgccaccacgcctggttaattttgtttttgtatttttaggagagacggggtttcaccgtgttagccaggatggtctcaatctcctgaccccttgatctgcccacctcggcctcccaaagtgctgggattacaggcgtgagccacagtgcctggcctggaatgccttttgaatgacatgcctgaggctgttttatagttaactgtttttgcaaatagaaggagtataccctaaaataacaataaaaagtacagtacggtaaatatataaactagtaacatagtcattatcattattaggtattatgtactatatgtaattatatgtgttatacttttatacaactggcagtgcattaggttcgtttatatcagaatcaccacaaacaggtgaggaatgctatgacattaccatggctataatgtcactaggcaataggaatttttagctccattataatgttacggggctactgttgtatatgcagtctgtcattgaccgaaatgtcattatgggcacatgactgtattaacatagcatttacattgtgttagatattataagtaatctaaagatgatttaaagtatatgcggctggatgcggtggctcacgcctgtaatcccagcactttgggaggctgaggcaggcagatcacctgaggtcaggagtttgagaccagcctggccaacatgctgaaaacctgtctctactaaaaatacaaaaaaaaaaaaattagccaggcgtggtggcgcttgcctgtaatcccagctactcaggaggctgaggcagaagaattgcttgaaccctggaggtggaggttgtagtgagctgagatcgcgccattgcattccagcctgggtgagaagagtgcaactccatctcaaaaaaaaaacaaaatggaggccaaggcaggcagatcaccagaggtcaggagtttgaggccagcctaatcaacatggtgaaaccccgtctttactaaaaatacaaaattagttgggcgtggtggcgcatacctataatcccagctactcgggaggctgaggcgggagaatcgcttgaaccctggaggtagagtttgctgtgagctgagatcatgccattgcacttcagcctggacaacaagtgaaactctgtctcagtcaatcaatcaataaagtatatgggagcgtgtgcatagactatatttaatactatatacctatttatgtaagggacttgggcatccttggattttggtattcttggggggtgctggaatcaaccccttttggatactgagggatgactgtaatttctggttctaggggaggtatcattaggagctggccagacttagggataagggaaggaagttatcctatttctaattctgagaaaagcacttcttctgcccctgtcctagcaagtgtacatgccatcttaagaatgatcattctacctttgctctctcccatctcctgggcagctcaaaaagtttccaagaagacaggaccccggtgttccacagctattgccacaggtaactgtgctcaagagctgggtctgagaagggatttggggtatgtgtaaagggagaatgatggaggtggagggacactggtcctgtaattcctaagtcacctcctcaattctgtagggttgaagaaccagaagccagttcctgctgttcctgtccagaagtctggcagtaagtgacaaacataaccactgggtgagaggctgggatagggaagagaagatggtgagtgaccagaaaaatccatttggtctctaaggggaaggagatgtagcatcaggtgtggatcccataaaggctagaagggaggagggatagagagcctagacttcactgacctttgtcctttctgtgttcatcttagcatcaggtgttcctcccatggcaggagggaagaaacccagcaaacgtccagcctgggacttaaagggtcagttatgtgacctaaatgcagaactaaaacggtgccgtgagaggactcaaacgttggaccaagagaaccagcagcttcaggaccagctcagagatgcccagcagcaggtcaaggccctggggacagagcgcacaacactggaggggcatttagccaaggtacaggcccaggctgagcagggccaacaggagctgaagaacttgcgtgcttgtgtcctggagctggaagagcggctgagcacgcaggagggcttggtgcaagagcttcagaaaaaacaggtggaattgcaggaagaacggaggggactgatgtcccaactagaggagaaggaggtaagggccagattttcaccagatgtcagccccgctttcctggcagaggtcatgcctcccctcccttccaggtacccctcaagtctgggctgagaactcctgagcacctatctttagcagtataggtgctgctgaagatacctctctcttccacctgtctgcaccccagcccactcctgactgtcttgctttctgccacgcttcttcctacccttgactgtttgcaaagctctcatttagatctgtgtctttcttagtcctccatccctctttctttgggttcccatcctgatcacaaattcctgtggtactctctttccctcctcccatgtccacttgactccttcctggtgagcaccaactagattaagttatttgcagtctcttaaatgactcaactttcacttctgggcattctgcatatgtgcttccctctttctggaatgttctttgtatactacatccttccttggttcactcctgtacttctgggtgtcaccctagatatcatcttccttgtgctcctctttgtgcttggacatacccatagcactccctgtcttagtaccatgattccttattttctcatctttctttgtttaccagactttgaggtccttttgagcagggacctcacttccacccactccatacgccccacagtttgttcttcttcttggttgcatcttaccctctgtgtatgttgtgttctcttctgggcagaggaggctgcagacatcagaagcagccctgtcaagcagccaagcagaggtggcatctctgcggcaggagactgtggcccaggcagccttactgactgagcgggaagaacgtcttcatgggctagaaatggagcgccggcgactgcacaaccagctgcaggaactcaagggcaacatccgtgtattctgccgggtccgccctgtcctgccgggggagcccactccaccccctggcctcctcctgtttccctctggccctggtgggccctctgatcctccaacccgccttagcctctcccggtctgacgagcggcgtgggaccctgagtggggcaccagctcccccaactcgccatgatttttcctttgaccgggtattcccaccaggaagtggacaggatgaagtgtttgaagagattgccatgcttgtccagtcagccctggatggctatccagtatgcatctttgcctatggccagacaggcagtggcaagaccttcacaatggagggtgggcctgggggagacccccagttggaggggctgatccctcgggccctgcggcacctcttctctgtggctcaggagctgagtggtcagggctggacctacagctttgtagcaagctacgtagagatctacaatgagactgtccgggacctgctggccactggaacccggaagggtcaagggggcgagtgtgagattcgccgtgcagggccagggagtgaggagctcactgtcaccaatgctcgatatgtccctgtctcctgtgagaaagaagtgaggacccatgggcactggaactgggaaatggggaggagtgggcagggtgccacgagatggaggtagagggagaaaggagcaagagagaattgaaggatgaagtgcaagttatcaggctggcttaccacatccggttttggcctgtgggctgtcggtagatctgccttaacctgggagtggcgagggagtgatgcatctgccaaaacgaggagggtcactacatctcatgtctcatctccttgctcagctcatcctagccatgctggcctcctggctgttcctcaaccagctagtcgtgctccccatctcagggcctttgcctggatgctctttcctggagatcttggctatcctgtcaaaacttgtgttccccaccccgcctttatacactccctattctatgtattccttaccattttcagacatactgtgcatcttattttgtttcttgacaggctagaaagcttcaagagggtgggggtgggctcttattcatttccatacatattactatgtactgacttctgcctgcctttttgccccttctgctcccatccccaggtggacgccctgcttcatctggcccgccagaatcgggctgtggcccgcacagcccagaatgaacggtcatcacgcagccacagtgtattccagctacagatttctggggagcactccagccgaggcctgcagtgtggggcccccctcagtcttgtggacctggccgggagtgagcgacttgaccccggcttagccctcggccccggggagcgggaacgccttcgggaaacacaggccattaacagcagcctgtccacgctggggctggttatcatggccctgagcaacaaggtgggaatgggagtggggtgagatacgggacctgggggacagttggggttggctgtgcagaaccctgcctattcctaaacatctgtccccacctcaatcatctaggagtcccacgtgccttaccggaacagcaaactgacctacctgctgcagaactctctgggtggtagtgctaagatgtgagtgaaagggacagatggaaggggtcaggtaggaactgtgttggggtgaggggtagaaaggggaacagtggagacctgtccaggctctgctggcccctaatgctggggttgggcacattgtcttttcataggctcatgtttgtgaacatttctccactggaagagaacgtctccgagtccctcaactctctacgctttgcctccaaggtgcgattaccacccgtcagccttgtcaggacccgtgggtggttgtaggcttctccattccaatcccttttgtcttctagggcagggagcacatttgtgcagaaaggttttgcaggtatctgaggcactgctcacctggttccatttttaattattagcttttgagttaagttttttaaaaaacgggtgattaatttaacctgagaaagctgattaaaaaaaaagaaaaggtgactaaaaggtctaaactggttgggcgcagtagctcatgcctataatccgaacacttcgggaggccaaggcaggaggattgcttgagcccaggagtttaaaatcagtctgggcaacatagtgagaccctgtctctacaaaaaataggaaaattagctgggtgtaatggctcacacctgtagttccagctactcaggaggctgaggtgggaggatcacctgaacctgggaggtggaggctgcagtgagccgtgatcctaccactgcacttcagcctgggtgacagagtaagaccttgtctcaaaaaaccaacacacaaaaaatccctaagattcctccctatcagcatacagagatcattatttttaggtctgcctagactccactatgtagctgcaccaaaatttatccaccagttccctctactggacacttggattgtttccacacttttttagtcacaaacaaggccacgttgactaactttgtacatacatcattttgtatttttcagttacatctaactagggaaatagtccttgaaatgggattactggatcaaagacttagaggtttttcagactattccaaatagtgtgaattcagactccaaacctcatgagggtcagccagtggctatatgaattctcactaatgagaattccttccactagaatctccttccactagtgttaagcaagtcagaaagtttccttactgtctgcctccacagtaatttttttctctggtacaccctcctcctgcgcgtatagccctttgatgggctctggctttatttgaggtctgatcaggtctgtcctgctgtgcgcttgggcctcctcccagtcagcactgattgttgctgtggagtagccagcacctgcaccctgatctggtattctactttgatgagggtttccctcactatcttgcaagttcaattttagagggtggtgatgttttttctaactttttattaatgttataccaatgtaacatccaacaacatgaactttaatatcctctaatacccagtttatgttaaatttcacccaactgtctcagaagtgtcttttatacataataggtttgttcaaatcaggatccaggcaagggccacccacttggttgaaatgtctcaagttccacaaccctatcccacactgccactattatgtcgtttgttgaaggtcatttgtcctatagaatatactattctggattttggctggttgcttcctctttcccccatactttcacttatttatcatatttgggtgttgtcaacctgacccatccatttacaagctccttattgactttttcacctagtgattttatccagcagtgaccatacctggatctttatttcattaaggggtttctaaatggggatttttctaatcttagttgttctgcattggttagtcacgattcttttatgaagacatttgccttgccatctacttggtttctctgaaattcaattcatacaggaaaaacaagataaatgctgaattatttattgattttcagtattgagttgatatcctagcagcttccaaaggtgaccaatgaatgtttatctgagggttatttttatttttattttttttgagacagggacttgctctgttgcccagactggaattcagtggctcaatcatagctcattgtagccaccaaaagtgttgggattataggcgtgagccacccagcccggccacagtcgttcttctttctgatgctcaaattgccccatctttagccaataggaacctcctggccgggcgcggtggctcatgcctgtaaccccagcactttgggaggccgaggtgggtggatcacgaggtcaggagatcgagaccatcctaacacggtgaaaccccgtctctactaaaaatacaaaaaattcaccgggcgtggtggcgggcgcctgtagtctcagctactttgggagtctgaggcagaatggcttgaacccgggaggtggagcttgcagtgagccgagatcgcgccactgcactccagcctgggcgacagagcaagactccgtctcaacaacaacaacaaaaaaaagagcctccttcagattggtgccagtgtcctttagacagaactctagtagtcttttcagattcaacttgtacatttccttccccagacttcaactgatccattttctaaggagtcctagttcctaaatgggtgttattactattttatctcggtttaagtgttttacagtgggagaggttggaggtctctagtacagggtattgctggaaatgaaagcctcctttctctgctcctgtattttcttctggggcttccatctcttctcaagccttttcacctcctccaaacctagtgtgcagaggagaacaaaccataactggcaccagcctgaaccagcctttggaggccttatttcggtatttctgagggcagccctagcattggaggatgggagatcttgggaaaaatgttgtattggttacgctgcaaacttttatcctgtctaaccccctgcccccaggtgaaccagtgtgttattggtactgctcaggccaacaggaagtgaagacggatccagatctctgtgtgtgtgtgtgtgtgtgtgtgtgtgtgtgtgtgtgtgtgtgtgtgtgtgtccctatgtctatgtatcgggtgaggggtgggagggttgctggagggtgctttattgggtggagggcaccatgtcccagggctatcaaataaagaatagtttggttttttttttaaataaaggttttattagcatttgcccaagaaggcagatactttcatatctgtaaaagtgggagctgtgatctgtaccctctgccaaacgtttacgtgggaggcgggagcgggggctgagggcttcgtcttttctcccctctgctatcaccggttctggaccttggcctggatcatcttcccctctgctaataccccctaccccgtccgtcacatcagggaggtgtgccctctagctatccacgccccctccttggtcactagttataggtaactttcacccttccgccggccaccccagccccagggaagaacgttcctttggtgggtgtcggcaaatggggaccggaccccagagtccagaggcggggctagcgcgcgctcccaaactgttggctctttcctcccgtcccgccctttccctgcctttccgttcgaacggctggggctctgcccgctcgctgcccattggctggctctcggtggcgtcaccgccttgggtcctcgcgcccttcgtctgcgccagccctggaagcacggggcgggacgtccacgggaagcggcgcgcacgcccgccgactccctcgcgccaaccgccgacggccgccgcccggtgaaggaggggctcagtcctcccaggtgccgcgcgcaggaggggacacgcgtgcgcaaaagggcggtgggtggggcgcgactcgtcacggggagggcggggctggggctaacagcgagtggagggcggggcgcgcgagggaggagggcgtggtgggggcatcgagaagggtgaatggagggcggggctgtgaactggggccggggggcgggacttggagtgaccatggggggtggggcagctaacggatgtggcatggggcgggggaccaggccggaggcgggctgccgggaggggggattccctcgtgccccaagggcgaatctcaggtcggaggaaggggctgaggggattccctctcccaccgggtccgactcttcgctccccaagccgcggagggccagcctcttcttcggcgccctccaggcctgttggaggtgagggaggtggggtgaggtggtgcccgcccccccctccggctcctcctttcccccagtcctcccctcccaccaccctcccccccaaccggtccgtccctcccctccctccctcccccccgccgcctcctcctcctgccgctgccgctgctttggctgctgcgtcatacgccccagagccgccgggacggaggggctgggcctggggaccccccggcctccgcctgcacgcccccccacgcccggacgtgccctctccgcgcgggggactcgcctaggtctcctacgtctgcccctgcccggctcccggcggccccagctgtcaccggtaaggaggcggcaggaggcgctggtggggggcagggagccgggggtcggcgcggggcgcgggcgggagagcctcgccgccttggcctcgggtccgggctgggccgacacaagtcccttctcggacttgccgtcctggggagtagagaccgggactgggacacgcccccctcccggggcactcagagaagttgtctaacccgggggcagggagccccgaatttgagggtgacctgacataacctggcaccaggatgattgttcttaatgagacgcgcaggcctggggagacagccgtttctgctctggaaaacatctccagaaaaggtcccaaaacacgtctctgggcaacaggacaccctaattatgatacctctaaactgagtagcctttgcttctacaaccataatttctcctaaaatttcaaggccagtatataatatcccaggagagctctggaagctgggaaactagcaactaggtttggggtcggggggagggctgttagttaccgagaggagagccagtcactagagttggaagaggactcaaaaagctggtgatgggtgcccagtggtttcctatcaaggtgtctcagggatttggagatgggggcacagatacttcattcttgatggcaaaataggcaaagaaaatggggaggctggccgggcccggtggctcacgcctgtaatcccagcactttgggaagctgaggtgggtggatcatgaggtcaggagttcgagaccagtttggccaacatggccaacacctcatctctactaaaaatacaaaaattagccaggcatggtggcatgcgcctgtaatcccacctacttgggagactgaggcaggagaattgcctgaacccgggaggtggaggttgcagtgagccaagattgtgccactgcactctggcctgggcgacagagcaaaactccatctcaggaaaaaaaaaaaaaaaagaaaaagaaaatggggaaggtttctcagcattcataaccttctcctccccatttcttttctggctaggcccccccaggatgcaatggcgcagcccccccggctgagccgctctggtgcctcctcactttgggacccagcttctcctgctcccacctctggccccaggcctcggctttgggagggtcaagatgtgctggccagatggactgatgggctgctatacttgggtaccatcaaaaaggtaagaccttctacctctgaccttcttcctagttcccttatctaattctggttcccatttcatcctgtttgctcacccattccaggtggacagtgctagggaggtgtgtctggtccagtttgaggatgattcgcagtttctggttctatggaaagacattagccctggtaagactctagagacctgagattgcacatcccatggaaaacaaacctggcctagaggggcagaaagagacttaaaggcaggccctgtgacactgtgttctctcacagctgccctccctggagaggaactcctctgttgtgtctgtcgctctgagactgtggtccctgggaaccggctggtcagctgtgagaagtgtcgccatggtgagagggcaggtcacctgaatggtccagcttgctcttccctccaggatggtctctatatcacctgtcctggccttagtccccaagccactgctctggccaggctgcttagccttatcttagtcctcatccgctttcagcccagggagaagcagccatggaaaggggtggtataacctttgcaggcagaagatggtttaaatgcatccttttctaaccatatgacctcggacaagtcccttaacctctaggagcctcagttccctgacttgtaaaataaggataatgcaccccctcatcaagaccatggtcagggattaaatgagatgggtaaagactattcctgtcccaataccaagcacacacaggtatgcaataagtggtctactattatcactgcagcttatcaccaggactgccatgttcccagggctccagcccctggagagggagagggcacatcctgggtatgccgccagtgtgtctttgcgatcgccaccaaggtaaaggcacttccctgttacccttcctgtgggagcctcccatccacagcctctcccaagccttttcctctccccacccctctgaagccacccacctgtcctgtctctgcagaggggaggtgccctgaagaagggcccctatgcccgggccatgctgggtatgaagctttctctgccatatggactgaaggggctggactgggatgctggacatctgagcaaccgacagcagagttactgttactgtggtggccctggggagtgagtaatgagaggggagcagactgtggaatgaatgatgtggtggtggatcccaggaaatgaaggaaaaagaacaggatgagggtagcactcagggggataggaggtaagtttagggtttgggacagttatggggaagggggtttctggaggccagaagtcctgtgttccccctcaggtggaacctgaaaatgctgcagtgccggagctgcctgcagtggttccatgaggcctgcacccagtgtctgagcaagcccctcctctatggggacaggtgagaccaaggcagactctctaggagccaaggatgccctctttcttcgtgttccaccctcagttctcccacgcccttctccactccagtctcttcccaacctctgcagcgttacctcacctgtttgccccgtccttgcttgtgagtcttccaggggatggcacagttttcctgtgtaagtgtgtttgctccctcttgcccatgtccaggttctatgaatttgaatgctgtgtgtgtcgcgggggccctgagaaagtccggagactacagcttcgctggtgagctggattgggcatgacctcagtgtaactccacaccacagtatttcactctatatgccccaacctcccacctcaggactcccctggctcttaaaatgcctctgtggtcttgaaaactttgtttttccagggtggatgtggcccatcttgtcctgtatcacctcagtgtttgctgtaagaagaaatactttgattttgatcgtgagatcctccccttcacttctgagaattgggacagtttgctcctgggggaggtaaggggtagtgcagttttgggggttgggatgggacagggagatgtagcggaaaggggaagagaagaaatcactgctcccctggccccatttttctccatttctcccagctttcagacacccccaaaggagaacgttcttccaagctcctctctgctcttaacagccacaaggaccggtgagttggagggaagaggaggcaaggatgaggctcggaaagagatggagagtggaagcctggaaggggaggggcttgcaacccacctggaagactgtgactgaaaaggattgaggaatggcgtaaggaggaaccgttttttacagcactgaccctatatcatttctcttcttgccccagtttcatttcagggagagagattaagaagaggaaatgtttgtttggtctccatgctcggatgcctccccctgtggagccccctactggagatggagcactcaccaggtcactggtccaggggggatgggggaaattctcagggtgttagtcctggggggtatatgtatagagatggggaggtcttgggggtgtccgggagggggctggggggataaggaggcctcttacagcttcccttcagggcagggccctgggggaggggtctcacgtcccctggggaagcgccggaggccggagccagagcccctgaggaggaggcagaaggggaaagtggaggagctggggccaccctcagcagtgcgcaatcagcccgagccccaggagcagagggagcgggctcatctgcagagggcactgcaggtactggagcagggggaaccctatggagcaaatggtggggtgtgggaaggagtcaaggattatctctcagtcctttgccccctcttctaggcctcagtgtctccaccatcccccagccctaaccagagttaccagggcagcagcggctacaacttccggcccacagatgcccgctgcctgcccaggtcagtgctcctctgcccctcccccacaaaatatgctcccaattattcacatcttctggactttatcacccagaattcttttccctctcccccttggctacccacttcttggcctagaccgacttctagaactagtgtctggtagccagtattctggggaagggagtcccttgggggtagtgtttgagctctgcacttcccagggggagaaggtcctgttcccctgcttcaggtcctgactttccccactccaaccccagcagccccatccggatgtttgcttccttccacccttctgccagcaccgcagggacctctggggacagtggacccccagacaggtgagattctgtcttctattaccagtgatgctcttcttcccctctatgtgctcaaggctcttagtctctaacactgtttctctgattcacatgtgctctccatttctgcccatttcttacaattgccttctctccctaggtcacccctggaacttcacattggtttccccacagacatccctaaaagtgccccccactcgatgactgcctcatcttcctcagtttcatccccatccccaggtcttcctagacgctcagcacccccttctcccctgtgccgtagtttgtctcctgggactgggggaggagtccgaggtggggttggttacctgtcccgaggggaccctgtccgggtccttgctcggagagtacggcctgatggctctgtgcagtacctggttgagtggggaggagggggcatcttctgaacagcctgcctctgcccagctccccattcacacacaccggcactttcataccctgacctctgacctcacctacagctgggatgtacctggagagatagggggtagttctccctactgcccaggctggaatccaagagtggggagtggggaagaggccctcttctctaccctccttcatgattcctgacccctcccatccttcccatttcctttgatgttattttgttacagctttttaaatattttttaaaattatttaacccctgggggcagagactgaggagggaggatgataagggatcccggactctgtatgattgaaataaagagaaataaacaaatctagcagctctgagtcattctgaaagatgtagagaatacagggactagaagcacttatattctcccaacaaatttgcatacatgacaaaaaacaggcaaaaggcagagagacccaaagacgggatttattgggggcccagtcatcacctggaagtcagaaggcgttgaagtatcgcggggatcttcatgatgagcaggaacagggctcatcatggcaggactgtgatagagtcagaaactgactctgtgacctggcgcacccactgcaggtacggaaagttcccctgttccacaggcaatgcaattacctcggccacttcgtaagggtgcacagaactacaaaataggtgggtgggggaaggggatcactcaaagatttacccaaaagaacccactcccttacacgcaagccctagactgcccagcaagtcacacccacacagtacacaccctcaccccatccatctcaaagttctcaccgaacaaaatctgtcaaagctgggaccaaggaactttgggttttaatcatctaagggacaaagataaacatggttgaatcaaggagtgggattgagttcagtttctcagaagaggggtaagggctaaaggggtcagggattggggatattttgttgggtgggggaaatgtttctcaccatcagcacctcactgtcttcctcgatcttccctttccactcatagctgaaaggtcagagggggagagttgtggggagcaaagaatttcccccaggaaagaggttcccagtcagctcctacagttaggttaaccccccaactcctatgactcacatggatgtaatctgagggatgaggttgacgcaggctgctaggcgcttctccaccacggccctggagtgaagagacagtcccattcagagtaccccataaccccagtttttgtactggcagcccagagacaggcttccagagctggagaaaggagaaagcagcactcttctgccccacccccaactgtcccttcatgatcatcctttctcgctgcacatcgaggtccctacctggcgatctccttggcgaccttctcgttggggcaagtaacaaaggctgcagagaccgagcccggaacgtagccagagccggaatccgaggccggcgagggctgggtcggagggcttccagaggccatggtcagcaagactcggggtagcaacaaaaggcgggaggccacaggcagcagcgccggcatccaaacaaaagacaggagcagagaggcctgagagcaggaggcgaattcgatctctcctcacaaacagcccaggaaattacacccggggaagccttcgcttagatcctcaggctctgccctccctctgatgcacccccgaagaatgcccctgaaggtgagagagaaacttggaaaataaagcaaaagctcatttcactcacacctcagggggccaacctctgggatttagggtgcgggtagcggtcgaggcttcgaggaccggaaggggcggggcggggccggtcactcaccactccgccgagcaggaccgcgggagcccgccccccactcatgcggcctacgctggtacaggagagttgatctcaaaggccacacgtcacacggagaaacaaccccaggaagagcggcctcttcttacctgggtggcagccacgtgattagaaaacagcgcgcaccatgtgacagtagaagaaggaccacctgcgcctccagagccagccaatcccgaccctatcatggcgcggtttgcccacctcctgatgaaggaggagccatgggagacttgaccaatcgactaccgcatctgcagacgtgcgcggaaatggcacgcccgtttccgtgtgaacccgaaactgccacttgctggctgaggagagccgctgcggcgttccactgtcacgtgagggggccggtcctcttcggcggcggcactcagtgagtgacgccaagtggccaatcacaggccagcctcgcaggccacgtgaggcgagagctggttccaggaaaggggggccagagaccccgcagagtcgatgcgtcaggctgtggagtggggaatcatccttaaaccccacaatgtgcctagtgacctcccctgcactgtttccgaggtcttaaggagtgggagggtctgagaaggacccttcaccccaaactcaggggttaagagagcgccccctgcccttttagttgggcagagatatgcctgggtttgggaatgaacaacggtgatctagaagcccgctgtccctgggtagcagggagtgattaggcaggcacgggcatggcaagacaatagctagctgaggaaagaagcattttaaaacagagcgagaccctgtggtagaggatggtgaaaatggggcctagccatcttaattgaaaacccaaagcttgagacagactactgaatcagagggaaggagaacgagggctgcaggatggggacagtggtgatggtccttctgtcccctcttccctgcctattccactccccaggattggtccacctctcagcctcgggtctcctttccctaacccatcccccaaggagccaggacctgccctacataacttccctggggcccaagcacatcctgtgacccaaaaatggagagaggggccaatgagaggcagagaggtgggaggaggtgcagagaaaaaagctcttgccactgcccccacccaatatttcccctcccttcaaggtctgaggtcattggtctggtggtggggatgcctcggagtttcccaggctgacgtcagggttatacctctcggaggttctagggcagggaagtggggaggggaggttccctgagatctctgtctttgagtttggagtttgtctctgagacagatttcggaggggtctttcagtatttgtgtggagatctttcttaggattgagtttccttttatgcttctggtttggggggtttctatgtttcagggtctgtggtcgcactctgaggtctttcgaagtcttcttcatgaattttgggtctctgagttgtccatctccggaccagctgaagtctctatctccccttaagtcaggagtgtctctgtctctaagttatcagtctctgagatctgagtctggggtctctttctaggtctgagttctctaagctctaattctacatctggctctttctgaatctgggcctcatctttttctgagtctaggtctcaggtcctggtccctgaaatcatcatctcagggtctggagtctaagatatctgtaggtatggagaaccctttttagactggattttcagattttgatattgagcttctctctctgggggatctggggtcgttttttcctcaaatcaggagtctcttttcctctagattttggccctgtgtctcaaattaccccacagtggggggtggtgaagtatctttctctgtgggtctagggtctctctgtctcagggtctggggtctgcatctttaggacctctgtctctctctggtgtgtttttgagtcaggggtctctctctctctcacaatctgggcctcccggagtaggggtgggggctgcagagtctctccctcctcctcctcctcctgctctcttcgctctcgctcgctcccccgccccccctctctctcggctgccgctgctgccgttggctcttattctcctcctcctcctcctctctcctcctctctgcttctctctgctcctctctcctcctctctcctcctcctcctcctccacctcctcctccttctccccctctttctccccctctttctctcttctttctcccccgtccccccgccccctccccccaggcctgatgagcaggtctcgagcctccatccatcgggggagcatccccgcgatgtcctatgcccccttcagaggtacgtggtggggggagggggagggccatatggggggcaacagggggaggggcagggggcgggggagagtcggggccgagggaagggagcggctgaaatggagggagaggggaggaccgggaaggcaggggtgggagcaaccgggaaggagggattggaggccagagggataggggtagataagggatggaggggccaggaaatgggccttgaaagggggctgaagggaaaatgatgaaggggaaagaaagcgccagaaaggggtgggaaggtagaaggattgggttggggaaaaagctgcagaaataatttgggggtgggagctgagtgatgaggaaaacatcaaggaaatagagggacagagtcttgggagaggggctaggaaggagaaatgaaaacataggggtgaaaagagaagccaagaagatgtggggggataatttggtgggggactcagagtatggtaaggggcggaaaaagagaggaggatggagggagagaaggggccagatggagagagagggaggcagtggggggtggggggatggagggtccagatggagggaagagagaagagagagggaacggtgggggaggggagaccagggcagggggagggccaaattatgtgtgcttgggggggtggcagtacaagtaagatgaaatgatgggagtaggggacaggttaggatcctgccccagactctgaccctcttaaaggctcttgaccagtaaaatgtaacctctggggtcttaatgctgtcttcacttcatcacttttacccccttcccccacccctccaatccttatttccattccccctccctcctctgctgtccatcacctatatctttccccccatatggtgtccgttccttatatgagtcccccttctgtccttcccctatatcagtcccctctctggtgttcattgcctctctcttatctcttttctatgtggtcgctcccttatatctctatcacttctttactagtccgtcttgaccccttctcatagcctccgcattaggtctgcctcctttgctctgacacatgtccagtcgagcccttcaggtgtattcccttgcccctgggcatttaccatcatttctgcctccttttctatctactcctattatttgtctcccagaccattccttgtcaccacaagtctgtgcctacccactttcccttaatacctcaactcttattatcatttctcttttcttgtctcctctacttattggggtgttggagatttggggtacaaagacacaggttttgatgattagaacaagggatccccatctcagcccttgagggatttctcatcctagtaaaaatttcccgtttctcagccatgttgctctgcctcttgcatctgcctcccagaatcattcttcaccaagtccagacagtatgtgtgtgtgtgtttctagagttgttcctaagttccctgctgccaggagaaagatgccctctgaagtctaacccgcctcccttggctgcagcctgaaccagccctttccccaaatgcttatgtgtatcaacagatttctcctctgggtataccaagtgtctaagtgcggtgggcatgttgcctgcaatgtctgtagtttcagaggctaggtattggtgatctctgtatctagagaacattagttagtctctgagatgggttgagatagagtttcaaagtatgtggtttctaaatggtggacattctgagggttcatcgctcactgtgatctggaggttgggtaaatttgagagacatatttatagacagaaaagggctgaatttgcaaaactctgctactcagtgcattctgttggaatgaagctcaaagaccagttctcctgcagtatactcatggttatcccataaaggtgacagagtttgatcttttttccatctaaaatctgataccttaagcctaatttctagctctttgctgtcgccaatgtgacatctctcttacttcaatagggcctgtgtggcattggggtttaaaggagaggcagtttgcagggagagcggcatggcaagaacaacagagctggggaaggaggaccctggtctcatctcagccataggcgacacttggtctactgttctctcttctcaaagttttgttcccatctccagctcttgtctttggaggcccctctgtgtcaccaggcctggatattccattctttccccctgacatctttcttcctcaagctcctcactgtgccttgagaaggctcctgacctatggagtggcttccatcctgtccactgagactaggtggggtgaggtggtgggggcagtgttgaatctctgggcactgaatgggagaagagataaatttggtctctacttgtccaaacaagggcatatttcccaccttctgccctggggcctccacagccagatgccgacaaaagccatcttctccttaccaccagaagaaccagaactttccctaaaggatgagcagggttgaactaggggaggagggcacagaggagggaagagttgggaggggaggccctctcatgtctctgactgtgaacaggtaagctccccgacttcttcttttctagatatttagccctcagaatctcatgatcccaatgttcctacacacacaccccatccttctttcccacagccatgtagctttcctcatactcttttatagaggggtggtgccaccttccaagtccttgtcttctgcagctatttggatgccttcctctacccagatatctgacaccaacttctctgtttttctcctgccaattttgcggcacctctaccttattttcctgaagtagatggagagctccttcatctttctctgcccccaaacgtgtaccttctctgtcatataattcccatccctgaacctctgcatttcttcccccaagtctccagagccttctgtgatgtgatcctctcctcttttcccctttgtataaatgcttgtcttgtgttcctttagagttgccaggtgtctcactttcaactgtgatctcctgaaggccggtagggtccccttctcactttgtggactctcttcttgccattttaggcctctgcttccaaatgcatagagcctcccttactgtttctgtgtgtctctgtcctccagatgtacggggaccctctatgcaccgaacccaatacgttcattccccgtatgatcgtcctggttggaaccctcggttctgcatcatctcggggaaccagctgctcatgctggatgaggatgaggtgagtgtggtgagaaggctgggaaaacgcatgtgggagaatggggagagtcctcattagtgaaggggagagagacacaaagaaggcagacaaagaagaaacatttgcaaatggcaggagggtggccattgagacttgggttggagtgtgacaagaggggtagtcattctctcatcttgggcagggagtctttgagggttatgagctgtgttggggaggagatgtggttctgaagatttcgggggtggggaggctcctgttttcacactgtccatattgtaggataggttagaatggggaaggggaactgaagggtttggagaaggggtgaagacatggaaggccctcccaaccaaagcaatcctcaggacccctctctgctttgcccactgagcaagactcccagtcctttctccatcagggggcagagtgcaagaagagaaattgcaggacgcagagaaaaggcaggggatagaggaggttttaggtagctggaggatactgggaaagaagactgaggtcagtggatcttggcatgatggggtgaagactgggagagtgattgagatcaaggtttagagagacactgagagggcttctgcaagggagtggttggacatcaggaaggaatataagggaggggaactgggagtatgtggagttatctaaaggagtacaagtggagtaggggcagggactagccagagtaaaggagatgaaacggacagaggcctcttatgggaggtggtggccaggtatggagatctgagagccagggaagtgtgggttctgatttgggagctgggtcagcaggagtgtccattggaggaaatagaggataaaaactggaatggtgccccacaagtgtgagtcagggaatgggggtgatttgggggacaagctttaaaaaatggtagggtagcctggaaaaccaaacgtggtgagagatggaccctgaaagttattgggaatggtgtgatgaggaagggttagaatttgagtcagggctaactagagtgtcaagggacctatgggggcaggtgagagtgtggagagatggctgggtagacagcttccaggccacagagtaaagtagaggtgttaaggagaggatatggtgactttgaaaggagaggtggcttggggagtctaagttttggacaccattgggagacatttgagtgactgtggtcaaacccctagatc

SEQ ID NO: 62210 - DNA, 594 bp, Homo Sapiens
tttttttttggctgggtcttcgcctttatttctggtgcacgtctagaggggcccgggcagaggccacccacggtccctgaagtagggcctcagctcctccaggctgagcggagggaagtaggctccgatcctcttccgcacccaccacttgccctcggcggcgtgcctgcccccaggacggctgaacttgtacctgtagtgctctcctcggacccacctgggcgggggcctgcccgcgaaggggttgtgtgccagcagggacaaggcctcggcgtcgctggccaggagcttgccagccaggtggatgatccagtcgttgtgctcgtaggtctggaaggccgcgaaccacatcagccagtccaggcggtagtggtacggggagatgaggcagggccgtctgctggggtcacctggcttgcacttgaactcgtagtcctcccacatggcatcgggggcgctggcgttggagctggctgtgccctgcaggatcacctccgcccgctccttggtgatgctttcgaaggccccgtaagtgttgacgatgtgaagagagttgaagtgggtgttcatgacctgcctggagctcaccaagtt

SEQ ID NO: 62211 - DNA, 2331 bp, Homo Sapiens
cccagttgttgatcttatgcaagacgctgcacgaccccgcgcccgcttgtcgccacggcacttgaggcagccggagatactctgagttactcggagcccgacgcctgagggtgagatgaacgcgctggcctccctaaccgtccggacctgtgatcgcttctggcagaccgaaccggcgctcctgcccccggggtgacgcgcagctcccagccgcccagacacatggccccaggccaagcaccccatcaggctaccccgtggagggatgcccaccctttcttcctcctgtccccagtgatgggcctcctcagccgcgcctggagccgcctgaggggcctgggacctctagagccctggctggtggaagcagtaaaaggagcagctctggtagaagctggcctggagggagaagctaggactcctctggcaatcccccataccccttggggcagacgccctgaagaggaggctgaagacagtggaggccctggagaggacagagaaacactggggctgaaaaccagcagttcccttcctgaagcctggggacttttggatgatgatgatggcatgtatggtgagcgagaggcaaccagtgtccctagagggcagggaagtcaatttgcagatggccagcgtgctcccctgtctcccagccttctgataaggacactgcaaggttctgataagaacccaggggaggagaaagccgaggaagagggagttgctgaagaggagggagttaacaagttctcttatccaccatcacaccgggagtgttgtccagccgtggaggaggaggacgatgaagaagctgtaaagaaagaagctcacagaacctctacttctgccttgtctccaggatccaagcccagcacttgggtgtcttgcccaggggaggaagagaatcaagccacggaggataaaagaacagaaagaagtaaaggagccaggaagacctccgtgtccccccgatcttcaggctccgaccccaggtcctgggagtatcgttcaggagaggcgtccgaggagaaggaggaaaaggcacacaaagaaactgggaaaggagaagctgccccagggccgcaatcctcagccccagcccagaggccccagctcaagtcctggtggtgccaacccagtgatgaagaggagggtgaggtcaaggctttgggggcagctgagaaggatggagaagctgagtgtcctccctgcatccccccaccaagtgccttcctgaaggcctgggtgtattggccaggagaggacacagaggaagaggaagatgaggaagaagatgaggacagtgactctggatcagatgaggaagagggagaagctgaggcttcctcttccactcctgctacaggtgtcttcttgaagtcctgggtctatcagccaggagaggacacagaggaggaggaagatgaggacagtgatacaggatcagccgaggatgaaagagaagctgagacttctgcttccacaccccctgcaagtgctttcttgaaggcctgggtgtatcggccaggagaggacacggaggaggaggaagatgaggatgtggatagtgaggataaggaagatgattcagaagcagccttgggagaagctgagtcagacccacatccctcccacccggaccagagggcccacttcaggggctggggatatcgacctggaaaagagacagaggaagaggaagctgctgaggactggggagaagctgagccctgccccttccgagtggccatctatgtacctggagagaagccaccgcctccctgggctcctcctaggctgcccctccgactgcaaaggcggctcaagcgcccagaaacccctactcatgatccggaccctgagactcccctaaaggccagaaaggtgcgcttctccgagaaggtcactgtccatttcctggctgtctgggcagggccggcccaggccgcccgccagggcccctgggagcagcttgctcgggatcgcagccgcttcgcacgccgcatcacccaggcccaggaggagctgagcccctgcctcacccctgctgcccgggccagagcctgggcacgcctcaggaacccacctttagcccccatccctgccctcacccagaccttgccttcctcctctgtcccttcgtccccagtccagaccacgcccttgagccaagctgtggccacaccttcccgctcgtctgctgctgcagcggctgccctggacctcagtgggaggcgtggctgagaccaactggtttgcctataatttattaactatttattttttctaagtgtgggtttatataaggaataaagccttttgatttgt

SEQ ID NO: 62212 - DNA, 1211 bp, Homo Sapiens
caaatttgaaattatacacacacatcagacaaaaaggaaaatcgggttctacatcagcaatctgtcttaacttcagcatcacacaactacctatgaagaagacagaacaagaattcagttcttctggtctgtacttctcagaaatgtataaacaatttttatcaacattaaaactgtcctagcaaaaccaaacaatcactatcttttcacacagctgacactttcccaccatttgccatctcatcgctggagggcacagaaaaacgacactcaaaatgcttgtgcttttgaggctctgctatatacactaagtgaactactggcttccagttgggaatggagggctgaggacaccctaattcagtgcttccgcagctagcactcttcagccttccctgcgttccccttacctgagctgggggatgaagagcagggtgacagtgggagtaagtacagaattcctcaagccttggtagccttagagaaatgctctgggcttatactgaggctcatctaccctaaaggccatctctcaggaaaacagagctgttgtatcataaagcttttcagggggaaaaaaataaaaaatgttcatcacaaatctattgtgcttgttataatctaacaaagtccactaaatgtagtaacgaaatgtctccccaataaaaaattaagattccctttggagcttaggcatgtggccttataaagagcttaactggactgctacctgttggtatgttcagggcttcattaggttcatgcttaagtataatgcctgtgcctcacagaacaatttaaatttagcttaacaccccacccatacttaaagagcaaataaattatatttcgaaaagattttaaaataatctcaatataaaaaccaacagtgggaactgagtctggaataaatgtgtgcagaatcctaattcttttctgagctccactcagtgaggatatgcaccctctactgtccagcctgtggtttgcagtaagctcactcttctgttcagaatgaccacaggagggcctttacctaggaatagcaggaaaagctaagtaagtactcaaacttccctcccagtaagcatgaattgcttcagatgtaaagcttacatgtgatgagtaatactataatatcatacattaatatatcctaataaactttaattttcaaacaaaaaaaaaaaaaaaaaaaaaaaaaaaaaaaa

SEQ ID NO: 62213 - DNA, 3319 bp, Homo Sapiens
ggcccggcccgcggcggcggcaaaggggcggaggggttcgctgccagcaattgccaagctgctgcggtcgtggcgggatggtatagccgggcctgagggcgggcggcggggcgcgggcgggggcgaggcggccgggaagggccgacgccgcctgactggcttgggagcagcggcagcaagctgagggggcgtcgccgccgccggcccccggcgccgccgcgggaggccgcgcccgccatggcggcccgggcggtgctggacgagttcactgcgccagctgagaaggcggagctgctggagcagagccgcggccgtatcgagggcctgtttggcgtgagcctagccgtgctcggcgcgctaggggctgaggagccgctgcccgcgcgcatctggctgcagctctgcggggcgcaggaggcggagcacagcgccaaggaatatattaaaggaatctgtgaacctgaactagaagaaagagaatgttaccccaaggacatgcactgcatttttgttggggcagagagcctgtttctgaaaagcttgattcaggatacttgtgctgacctctgcattctggacattggccttcttggcatcagaggaagtgctgaggctgtggtcatggctaggagtcacattcaacaatttgtaaagctctttgaaaataaagagaacctacccagtagtcagaaagaatcagaggtgaaaagggaattcaaacaatttgttgaagcccatgcagacaattacacaatggatttgttgattttgcccacttccttgaaaaaagaacttttgacactcacacaaggtgaggagaatctctttgaaacaggagatgatgaggttattgaaatgagagattctcaacaaacagagtttacacagaatgctgccacagggctgaatatttctagagatgaaactgttttgcaggaagaggcaagaaataaagctgggactcctgtttctgagcttacaaaacaaatggacacagtcctttctagctcaccagatgtgctttttgatccaataaatggtctaaccccagatgaagaggcactttccaatgagagaatttgtcagaaaaggagattttctgattctgaagaaaggcatacgaagaagcagttttctttggaaaatgttcaggagggggagattttacacgatgctaagacattggctggaaatgtaatagctgacctatctgattcttctgctgattctgaaaatttaagtccagatataaaagaaactactgaggaaatggaatacaacatcctcgtaaacttttttaaaaccatgggctactcccaagaaattgttgaaaaggtcattaaggtgtatggaccatctactgaaccattattgctcttagaggaaattgaaaaagaaaataaaagattccaagaagacagagaattttcagctggtacagtgtatccagagaccaacaaaaccaaaaataaaggtgtttatagcagcacaaatgagcttacaactgattccactccaaagaaaacacaggctcacacacagcaaaatatggtagaaaaattttctcagttaccattcaaagtggaagctaaaccatgtacctcaaattgtagaattaatactttcagaacagtgccaatagaacagaaacatgaagtctggggttcaaaccagaactacatttgtaacacagaccctgaaactgatggcctttcaccttctgttgcctctccaagtcccaaagaagtcaattttgtttcaaggggagcttcaagtcaccagcccagagttccactttttcctgaaaatggtttacaccagcagccagaacccttgcttccaaataatatgaaatctgcctgtgaaaaacgtttaggatgttgtagttctcctcattctaagccaaattgctcaaccctttctccaccaatgccactgccccagctgttaccttcggttactgatgcaaggtcggcaggaccttctgatcatattgattcctcagttactggggttcaaaggtttcgagatactctaaaaataccctacaagctggaattaaaaaatgaaccagggagaacggatttgaaacacattgttatagatgggagcaatgttgcaattacccatggtctgaaaaagttcttttcttgtcgtggaattgcaattgcagttgaatatttttggaagcttggcaacagaaacatcactgtatttgtccctcagtggagaacaaggcgtgatcctaatgtcacagaacagcacttcttaacccagctccaggagctcggaatattatctttaactcctgcccggatggtctttggagaaagaattgcttctcatgatgacaggtttctactacacttagcggacaaaactggtggcataattgtgacaaatgataatttcagagaatttgtgaatgagtcagtctcttggagagaaattattacaaaaaggctgctgcagtacacgttcgtgggggacatatttatggttcccgatgatcctctgggaagaagtggacctcgattagaggagtttcttcagaaggaagtctgtcttagagatatgcagcccctactcagtgccctgccaaatgtgggcatgtttgaccccagcttcagagtccctggcacccaggcagccagcaccagccaccagcctccgacccggattcagggagccccttcaagccactggctccctcagcagccccacttcccactgctgccagccctccccagtctccagcagaacctgcccatgccagctcagagatcttctgcagaaaccaacgagctgagggaagcccttctgaagatcttccctgactcagagcaaagactgaaaatagaccagatcttggtggcccacccatacatgaaagatctaaatgcgctttctgccatggtgttggattgaagattgtgctgagcgctgagcttgcgctcagggctggctgatcaaactcaagctcacacctgtacctgatgggaatgaacataatgtgaagaaacttatttcccagtgtaaacgcagttgtacagaaaaaaaatgttttgggtataaatctgggttttcaaaaccagcttttttctatatataaattatgctgctattacagatttaacattttctgttaaaggaaagtctacattttctgcctgttcagaactgtttaatagcagttactcttgagtgtatttacctttttatgttttttaaactattttccttaaagccgaaaatattgacaaatggatatggttagcctttataaataaataaaaaaaaaagtgttgctttcttaagg

SEQ ID NO: 62214 - DNA, 6754 bp, Homo Sapiens
ccgggctgcgcggcgaggctgagccgggcccgggcgccggggccgggggcggctggcgcgggcaggaagcgcctcgcggacccgggcccgccccccgcctcccgccgcctccgggctcccggctcccggccgcgcctcgccccatgcactcgccgcgccgcgcagcccgcgcacgcccggatggctcctcgcgccgcgggcggcgcaccccttagcgcccgggccgccgccgccagccccccgccgttccagacgccgccgcggtgcccggtgccgctgctgttgctgctgctcctgggggcggcgcgggccggcgccctggagatccagcgtcggttcccctcgcccacgcccaccaacaacttcgccctggacggcgcggcggggaccgtgtacctggcggccgtcaaccgcctctatcagctgtcgggcgccaacctgagcctggaggccgaggcggccgtgggcccggtgcccgacagcccgctgtgtcacgctccgcagctgccgcaggcctcgtgcgagcacccgcggcgcctcacggacaactacaacaagatcctgcagctggaccccggccagggcctggtagtcgtgtgcgggtccatctaccagggcttctgccagctgcggcgccggggtaacatctcggccgtggccgtgcgcttcccgcccgccgcgccgcccgccgagcccgtcacggtgttccccagcatgctgaacgtggcggccaaccacccgaacgcgtccaccgtggggctagttctgcctcccgccgcgggcgcggggggcagccgcctgctcgtgggcgccacgtacaccggttacggcagctccttcttcccgcgcaaccgcagcctggaggaccaccgcttcgagaacacgcccgagatcgccatccgctccctggacacgcgcggcgacctggccaagctcttcaccttcgacctcaacccctccgacgacaacatcctcaagatcaagcagggcgccaaggagcagcacaagctgggcttcgtgagcgccttcctgcacccgtccgacccgccgccgggtgcacagtcctacgcgtacctggcgctcaacagcgaggcgcgcgcgggcgacaaggagagccaggcgcggagcctgctggcgcgcatctgcctgccccacggcgccggcggcgacgccaagaagctcaccgagtcctacatccagttgggcttgcagtgcgcgggcggcgcgggccgcggcgacctctacagccgcctggtgtcggtcttcccagcccgggagcggctctttgctgtcttcgagcggccccaggggtcccccgcggcccgcgctgctccggccgcactctgcgccttccgcttcgccgacgtgcgagccgccatccgagctgcgcgcaccgcctgcttcgtggaaccggcgcccgacgtggtggcggtgctcgacagcgtggtgcagggcacgggaccggcctgcgagcgcaagctcaacatccagctccagccagagcagctggactgtggagctgctcacctgcagcacccgctgtccatcctgcagcccctgaaggccacgcccgtgttccgcgccccgggcctcacctccgtggccgtggccagcgtcaacaactacacagcggtcttcctgggcacggtcaacgggaggcttctcaagatcaacctgaacgagagcatgcaggtggtgagcaggcgggtggtgactgtggcctatggggagcccgtgcaccatgtcatgcagtttgacccagcagactccgtttacctttacctgatgacgtcccaccagatggccagggtgaaggtcgccgcctgcaacgtgcactccacctgtggggactgcgtgggtgcggcggacgcctactgcggctggtgtgccctggagacgcggtgcaccttgcagcaggactgcaccaattccagccagcagcatttctggaccagtgccagcgagggccccagccgctgtcctgccatgaccgtcctgccttccgagatcgatgtgcgccaggagtacccaggcatgatcctgcagatctcgggcagcctgcccagcctcagtggcatggagatggcctgtgactatgggaacaacatccgcactgtggctcgggtcccaggccctgcctttggtcaccagattgcctactgcaacctcctgccgagggaccagtttccgcccttcccccccaaccaggaccacgtgactgttgagatgtctgtgagggtcaatgggcggaacatcgtcaaggccaatttcaccatctacgactgcagccgcactgcacaagtgtacccccacacagcctgtaccagctgcctgtcggcacagtggccctgtttctggtgcagccagcagcactcctgtgtttccaaccagtctcggtgcgaggcctcaccaaaccccacgagccctcaggactgcccccggaccctgctctcacccctggcacccgtgcctacgggtggctcccagaacatcctggtgcctctggccaacactgcctttttccagggtgcagccctggagtgtagttttgggctggaggagatcttcgaggctgtgtgggtgaatgagtctgttgtacgctgtgaccaggtggtgctgcacacgacccggaagagccaggtgttcccgctcagcctccaactaaaggggcggccagcccgattcctggacagccctgagcccatgacagtcatggtctataactgtgccatgggcagccccgactgttcccagtgcctgggccgcgaagacctgggtcacctgtgcatgtggagtgatggctgccgcctgcgggggcctctgcagcccatggctggcacctgccccgcccccgagatccgcgcgattgagcccctgagtggcccgttggacggtgggaccctgctgaccatccgaggaaggaacctgggccggcggctcagtgacgtggcccacggcgtgtggattggtggtgtggcctgtgagccactgcctgacagatacacggtgtcggaggagatcgtgtgtgtcacagggccagccccaggaccactctcaggtgtggtgaccgtgaacgcctctaaggagggcaagtcccgggaccgcttctcctacgtgctgcccctggtccactccctggagcctaccatgggccccaaggccgggggcaccaggatcaccatccatgggaatgacctccatgtaggctccgagctccaggtcctggtgaacgacacagacccctgcacggagctgatgcgcacagataccagcatcgcctgcaccatgcctgagggggccctgccggctccggtgcctgtgtgtgtgcgcttcgagcgtcggggctgcgtgcacggcaacctcaccttctggtacatgcagaacccggtcatcacggccatcagtccccgccgcagccctgtcagtggcggcaggaccatcacagtggctggtgagcgtttccacatggtgcagaatgtgtccatggccgtccaccacattggccgggagcccacgctctgcaaggttctcaactccaccctcatcacctgcccgtcccccggggccctgagcaacgcatcagcgccagtggacttcttcatcaatgggcgggcctacgcagacgaggtggctgtggctgaggagctactggaccccgaggaggcacagcggggcagcaggttccgcctggactacctccccaacccacagttctctacggccaagagggagaagtggatcaagcaccaccccggggagcctctcaccctcgttatccacaaggagcaggacagcctggggctccagagtcacgagtaccgggtcaagataggccaagtaagctgcgacatccagattgtctctgacagaatcatccactgctcggtcaacgagtccctgggcgcggccgtggggcagctgcccatcacaatccaggtagggaacttcaaccagaccatcgccacactgcagctggggggtagcgagacggccatcatcgtgtccatcgtcatctgcagcgtcctgctgctgctctccgtggtggccctgttcgtcttctgtaccaagagccgacgtgctgagcgttactggcagaagacgctgctgcagatggaggagatggaatctcagatccgagaggaaatccgcaaaggcttcgctgagctgcagacagacatgacagatctcaccaaggagctgaaccgcagccagggcatccccttcctggagtataagcacttcgtgacccgcaccttcttccccaagtgttcctccctttatgaagagcgttacgtgctgccctcccagaccctcaactcccagggcagctcccaggcacaggaaacccacccactgctgggagagtggaagattcctgagagctgccggcccaacatggaagagggaattagcttgttctcctcactactcaacaacaagcacttcctcatcgtctttgtccacgcgctggagcagcagaaggactttgcggtgcgcgacaggtgcagcctggcctcgctgctgaccatcgcgctgcacggcaagctggagtactacaccagcatcatgaaggagctgctggtggacctcattgacgcctcggccgccaagaaccccaagctcatgctgcggcgcacagagtctgtggtggagaagatgctcaccaactggatgtccatctgcatgtacagctgtctgcgggagacggtgggggagccattcttcctgctgctgtgtgccatcaagcagcaaatcaacaagggctccatcgacgccatcacaggcaaggcccgctacacactcaatgaggagtggctgctgcgggagaacatcgaggccaagccccggaacctgaacgtgtccttccagggctgtggcatggactcgctgagcgtgcgggccatggacaccgacacgctgacacaggtcaaggagaagatcctggaggccttctgcaagaatgtgccctactcccagtggccgcgtgcagaggacgtcgaccttgagtggttcgcctccagcacacagagctacatccttcgggacctggacgacacctcagtggtggaagacggccgcaagaagcttaacacgctggcccattacaagatccctgaaggtgcctccctggccatgagtctcatagacaagaaggacaacacactgggccgagtgaaagacttggacacagagaagtatttccatttggtgctgcctacggacgagctggcggagcccaagaagtctcaccggcagagccatcgcaagaaggtgctcccggaaatctacctgacccgcctgctctccaccaagggcacgttgcagaagtttctggatgacctgttcaaggccattctgagtatccgtgaagacaagcccccactggctgtcaagtactttttcgacttcctggaggagcaggctgagaagaggggaatctccgaccccgacaccctacacatctggaagaccaacagccttcctctccggttctgggtgaacatcctgaagaacccccagtttgtctttgacatcgacaagacagaccacatcgacgcctgcctttcagtcatcgcgcaggccttcatcgacgcctgctccatctctgacctgcagctgggcaaggattcgccaaccaacaagctcctctacgccaaggagattcctgagtaccggaagatcgtgcagcgctactacaagcagatccaggacatgacgccgctcagcgagcaagagatgaatgcccatctggccgaggagtcgaggaaataccagaatgagttcaacaccaatgtggccatggcagagatttataagtacgccaagaggtatcggccgcagatcatggccgcgctggaggccaaccccacggcccggaggacacaactgcagcacaagtttgagcaggtggtggctttgatggaggacaacatctacgagtgctacagtgaggcctgagacacatggagagttggtcaggctgctgctgggagaaatggacgcccactgggcctcaacttgatcttctaccccgtgcctgtgactcagactgggaaatactgagcagagacggctggggcgggggcaggaggaggggctgctctctgagacaggggcgcccccgccttgacccctgggcacctccatcccctcccacctgtccccagatcagtctctgggatggaggccagagagctggtcaggctcccccatctgcccagcacggcctgcactgtgcccacccacttgctccacaacgtccagttggtcctgctgccaagagccccgtgcatccaggcggccaagcacaaactgggggagaggaggccgccagcccggaggctgcagcccagaaactctacctcatccacactggtgcagggagccctccttgaactgacctttgattggtttctgcttcaactaccaaaatgttatctccacttccccctcacccgtagaggatcctggccacagacagtttcaagtagtgtcagatttttgttgcttgggcggctgttggtagagtgggcagtgcccgcgccatggggtgctctgtgggcttctccaggagcagggagggtggaggggagggatggggggcacaggagctgggagccccgtctccaggaaaaggagaggggttaagatgcaccgaggctgtagctgggctacttgatcttgctgaaagtgtttctaaagatagcaccacttttttttttaaagcttttatatattaaaaaacgtatcatgc

SEQ ID NO: 62215 - DNA, 4457 bp, Homo Sapiens
gtgagtcgcgcggacggagccggacaaaagcgggcggcggcggcaggatgaacagcatcaagaacgtgccggcgcgggtgctgagccgcaggccgggccacagcctggaggccgagcgcgagcagttcgacaagacccaggccatcagcatcagcaaagccatcaacacccaggaggcccccgtgaaggagaagcacgcccggcgcatcattctgggcacacaccacgagaagggggctttcaccttctggtcctatgccattgggctgccgctgcccagcagctccattctcagctggaagttctgccacgtcctccacaaggtccttcgagacgggcaccccaatgtgctgcatgactgccagcggtaccgcagcaacatccgggagattggagacctgtggggacatttgcatgaccgctacggacagctggtgaatgtctacaccaagctgctgctgaccaagatctccttccacctcaagcatccccagtttcccgcgggcctggaggtgacagatgaggtactggagaaggcagctgggaccgatgtcaacaacatcttccagctcactgtggagatgtttgattacatggattgtgagctgaagctttctgaatcagttttccgacagctcaacacggccatcgccgtatcccagatgtcctcaggccagtgccgcctggcccccctcatccaggtcatccaggactgcagccacctctaccactacacggtcaagctcctgttcaagctacactcttgtctccctgcggacaccctgcaaggccacagggaccggttccacgagcagtttcacagcctcaggaacttcttccgcagagcctccgacatgctgtacttcaagcggctcatccagatcccccggctgcccgagggaccccctaacttcctgcgggcctcagccctggctgagcacatcaagccggtggtggtgatccccgaggaggccccggaagatgaggagccggagaatctcattgagatcagcacagggccccccgcgggggagccagtggtggtggctgacctcttcgatcagacgtttggaccccccaatgggtctgtgaaggacgacagggacctccagattgagagcttgaagagagaggtggaaatgctccgctctgaactggagaagatcaagctggaggcccagcggtacatcgcgcagctgaagagccaggtgaatgcactggagggtgagctggaggagcagcggaagcagaagcagaaggccctggtggataatgagcagctccgccacgagctggcccagctgagggctgcccagctggagggcgagcggagccagggcctgcgtgaggaggctgagaggaaggccagtgccacggaggcgcgctacaacaagctgaaggaaaagcacagtgagctcgtccatgtgcacgcggagctgctcagaaagaacgcggacacagccaagcagctgacggtgacgcagcaaagccaggaggaggtggcgcgggtgaaggagcagctggccttccaggtggagcaggtgaagcgggagtcggagttgaagctagaggagaagagcgaccagctggagaagctcaagagggagctggaggccaaggccggagagctggcccgcgcgcaggaggccctgagccacacagagcagagcaagtcggagctgagctcacggctggacacgctgagtgcggagaaggatgctctgagtggagctgtgcggcagcgggaggcagacctgctggcggcgcagagcctggtgcgcgagacagaggcggcgctgagccgggagcagcagcgcagctcccaggagcagggcgagttgcagggccggctggcagagagggagtctcaggagcaggggctgcggcagaggctgctggacgagcagttcgcagtgttgcggggcgctgctgccgaggccgcgggcatcctgcaggatgccgtgagcaagctggacgaccccctgcacctgcgctgtaccagctccccagactacctggtgagcagggcccaggaggccttggatgccgtgagcaccctggaggagggccacgcccagtacctgacctccttggcagacgcctccgccctggtggcagctctgacccgcttctcccacctggctgcggataccatcatcaatggcggtgccacctcgcacctggctcccaccgaccctgccgaccgcctcatagacacctgcagggagtgcggggcccgggctctggagctcatggggcagctgcaggaccagcaggctctgcggcacatgcaggccagcctggtgcggacacccctgcagggcatccttcagctgggccaggaactgaaacccaagagcctagatgtgcggcaggaggagctgggggccgtggtcgacaaggagatggcggccacatccgcagccattgaagatgctgtgcggaggattgaggacatgatgaaccaggcacgccacgccagctcgggggtgaagctggaggtgaacgagaggatcctcaactcctgcacagacctgatgaaggctatccggctcctggtgacgacatccactagcctgcagaaggagatcgtggagagcggcaggggggcagccacgcagcaggaattttacgccaagaactcgcgctggaccgaaggcctcatctcggcctccaaggctgtgggctggggagccacacagctggtggaggcagctgacaaggtggtgcttcacacgggcaagtatgaggagctcatcgtctgctcccacgagatcgcagccagcacggcccagctggtggcggcctccaaggtgaaggccaacaagcacagcccccacctgagccgcctgcaggaatgttctcgcacagtcaatgagagggctgccaatgtggtggcctccaccaagtcaggccaggagcagattgaggacagagacaccatggatttctccggcctgtccctcatcaagctgaagaagcaggagatggagacgcaggtgcgtgtcctggagctggagaagacgctggaggctgaacgcatgcggctgggggagttgcggaagcaacactacgtgctggctggggcatcaggcagccctggagaggaggtggccatccggcccagcactgccccccgaagtgtaaccaccaagaaaccacccctggcccagaagcccagcgtggcccccagacaggaccaccagcttgacaaaaaggatggcatctacccagctcaactcgtgaactactaggccccccaggggtccagcagggtggctggtgacaggcctgggcctctgcaactgccctgacaggaccgagaggccttgcccctccacctggtgcccaagcctcccgccccaccgtctggatcaatgtcctcaaggcccctggcccttactgagcctgcagggtcctgggccatgtgggtggtgcttctggatgtgagtctcttatttatctgcagaaggaactttggggtgcagccaggacccggtaggcctgagcctcaactcttcagaaaatagtgtttttaatattcctcttcagaaaatagtgtttttaatattccgagctagagctcttcttcctacgtttgtagtcagcacactgggaaaccgggccagcgtggggctccctgccttctggactcctgaaggtcgtggatggatggaaggcacacagcccgtgccggctgatgggacgagggtcaggcatcctgtctgtggccttctggggcaccgattctaccaggccctccagctgcgtggtctccgcagaccaggctctgtgtgggctagaggaatgtcgcccattactcctcaggcctggccctcgggcctccgtgatgggagccccccaggaggggtcagatgctggaaggggccgctttctggggagtgaggtgagacatagcggcccaggcgctgccttcactcctggagtttccatttccagctggaatctgcagccacccccatttcctgttttccattcccccgttctggccgcgccccactgcccacctgaaggggtggtttccagccctccggagagtgggcttggccctaggccctccagctcagccagaaaaagcccagaaacccaggtgctggaccagggccctcagggaggggaccctgcggctagagtgggctaggccctggctttgcccgtcagatttgaacgaatgtgtgtcccttgagcccaaggagagcggcaggaggggtgggaccaggctgggaggacagagccagcagctgccatgccctcctgctccccccaccccagccctagccctttagcctttcaccctgtgctctggaaaggctaccaaatactggccaaggtcaggaggagcaaaaatgagccagcaccagcgccttggctttgtgttagcatttcctcctgaagtgttctgttggcaataaaatgcactttgactgtttgttgtc

SEQ ID NO: 62216 - DNA, 4263 bp, Homo Sapiens
gggaatacccagcttcctccccgcaacccggtgaaagccaacgcaatgttcggtgcgggggacgaggacgacaccgatttcctctcgccgagcggcggtgccagattggcctcactttttggactggatcaggcagctgctggccatggaaatgaatttttccagtacacagccccaaaacagcctaagaaaggccagggaacggcagcaacaggaaatcaggcaacaccaaaaacagcaccagccaccatgagcactcccacaatactggtcgcaacagcagtccatgcatatcgatacacaaatggtcaatatgtaaagcagggcaaatttggtgctgcagttctggggaaccacacagccagagagtataggattcttctttatatcagtcaacaacagccagttacggttgctaggattcatgtgaactttgagctaatggttcggcccaataactatagcaccttttatgatgaccagagacagaactggtccatcatgtttgagtcggaaaaggctgctgtggagttcaataagcaggtgtgcattgctaagtgcaacagtacctcttccctggatgcagtgctctcccaggacctcattgtggcagacggccctgctgtagaagttggagattctttggaagtggcctataccggctggctctttcagaatcatgtgctgggccaggttttcgactccactgctaacaaagataagttgcttcgcttgaagttaggatcaggaaaagtcatcaagggctgggaggatggaatgctgggcatgaaaaaaggaggaaagcgattgcttattgtccctccagcctgtgctgttggctcagaaggggtaataggctggactcaagcaacggactcgatcctggtgttcgaggtggaggttaggcgggtgaagtttgccagagattctggctctgatggtcacagtgttagttcccgcgattctgcagctccgtctcccatccctggtgctgacaacctctctgctgatcctgttgtgtcaccacccacatcaatacctttcaaatcaggggagccagctcttcgtaccaaatctaactccctcagtgaacaacttgcaataaatacaagtcccgatgcagtcaaagccaagttgatctctcggatggctaaaatgggccagcccatgctgcccatccttccaccacagctggattccaatgattcagaaatcgaagatgtgaacactctgcaaggaggtgggcagcctgtggtgactccgtccgtccagccctctcttcagccggcccatccagcgttaccacagatgacctcacaggcacctcagccatctgttactgggctccaggcaccttctgctgccttaatgcaagtgtcatctctcgattcccactcagctgtatctggaaatgcccaatcctttcagccctatgcaggtatgcaagcctacgcttatccccaggcatctgccgtcacctcccagctgcagcccgttcggcctttgtacccagcaccgctctctcagcctccccatttccaaggatcaggtgatatggcttcatttctcatgactgaagcccggcaacataacactgaaattcgaatggcagtcagcaaagtggctgataaaatggatcatctcatgactaaggttgaagagttacagaaacatagtgctggcaattccatgcttattcctagcatgtcagttacaatggaaacaagcatgattatgagcaacatccagcgaatcattcaggaaaatgaaagattgaagcaagagatccttgaaaagagcaatcggatagaagaacagaatgacaagattagtgaactaattgaacgaaatcagaggtatgttgagcagagtaacctgatgatggagaagaggaacaactcacttcagacagccacagaaaacacacaggcaagagtattgcatgctgaacaagagaaggccaaggtgacagaggagttagcagcggccactgcgcaggtctctcatctgcagctgaaaatgactgctcaccaaaaaaaggaaacagagctgcagatgcagctgacagaaagcctgaaggagacagatcttctcaggggccagctcaccaaagtgcaggcaaagctctcagagctccaagaaacctctgagcaagcacagtccaaattcaaaagtgaaaagcagaaccggaaacaactggaactcaaggtgacatccctggaggaggaactgactgaccttcgagttgagaaggagtccttggaaaagaacctctcagaaaggaaaaagaagtcagctcaagagcgttctcaggccgaggaggagatagatgaaattcgcaagtcataccaggaggaattggacaaacttcgacagctcttgaaaaagactcgagtgtccacagaccaagcagctgcagagcagctgtctttagtacaggctgagctacagacccagtgggaagcaaaatgtgaacatttgttggcctccgccaaggatgagcacctgcagcagtaccaggaggtgtgcgcacagagagatgcctaccagcagaagctggtacaacttcaggaaaagtgtttagccctccaggcccaaatcacagctctcaccaagcaaaatgaacagcacatcaaggaactagagaagaacaagtcccagatgtctggggttgaagctgctgcatctgacccctcagagaaggtcaagaagatcatgaaccaggtgttccagtccttacggagagagtttgagctggaggaatcttacaatggcaggaccattctgggaaccatcatgaatacgatcaagatggtgactcttcagctgttaaaccaacaggagcaagagaaggaagagagcagcagtgaagaagaagaagaaaaagcagaagagcggccacgaagaccttcccaggagcagtcagcctcagccagttctgggcagcctcaagcacccctgaatagggagaggccagagtcccccatggtgccctcagagcaggtggtcgaggaagctgtcccgttgcctcctcaggccctcaccacttcccaggatggacacagaaggaaaggggactcagaagctgaggcactctcagagataaaagatggttcccttccacccgaactgtcttgcatcccatcccacagagttctagggcccccgacttcaattccacctgagcccctaggccctgtatccatggactctgagtgtgaggagtcacttgctgccagcccaatggcagctaagcccgacaacccatcaggaaaggtctgtgtcagggaagtagcaccagatggcccactacaagaaagctccacaagactgtccctgacttcagaccccgaggagggggacccactggccttagggcctgaaagcccaggagagcctcagcctccacagctcaagaaagatgatgtcactagctccaccggtccccacaaggagctgtcaagcacagaggcaggttccacagttgcaggagcagccctcagacccagccatcattcccagcgttccagtctctctggggatgaagaggatgaactgtttaaaggggcaactctgaaagctctgaggcccaaagcacagcctgaggaggaggatgaagacgaggtgagcatgaagggacgcccgcccccaacgcccctttttggagatgatgatgatgacgatgacattgactggctgggatgaagacccaggaaactggtgcaaaggtttctctgcaacccttccctaagcatgattttgcacagccaaccctgggtctaggcgagccacagggtgaggtcaaggtgagcattctgggaacaatatttgggctcagagggtgggttggccaccttctgagccccacccccgccagacctggtgaagaggatcataaccctgtcttcaagaacactgggatttcagcagcaagttggaagaaggactggtaggttcccctccaagccagtcacctgtaagagtcctgtcctctgccagactttttaatctcttcattaactctcagactgacctgggagccctcctctacctgaatccagtgctcaactgtgccccggcaacaagacctgggctgaggtctccctggtagaactaagggagattacaccatctaaatcccagtgcagtcaacagcctggcctatagtcctgggacatgtatcttcttctttgccttaaatctgatacaagaggtcaatgactttgaaaataaaactaaaataaatgtctataatgaaacttg

SEQ ID NO: 62217 - DNA, 4337 bp, Homo Sapiens
gcgccctcccgcctggcgtcctccgcagattcgcgctgagaggcccgcggagacccgccccagaggctcaagaaaacccgcgggagcctcgcccggacccaggaactcgtgctcggggccaaccggctgggccgcgatcgcgtttcgtccggggccgcggcggccgtggggaatcggctgcagcgaatcggtggcgcgcggggcctgagcgcgctgcagtcacccgggagccgggtccaggtcgtcttcccgtgacgcccagatctgtcctgcaggatggagccagcaccctcagaggttcgactcgccgtccgggaagccattcatgccctctcgtcttcggaggatggcggccacatcttctgcaccctggagtccctgaagcggtatctcggtgagatggagcctccagcgctcccgagggagaaggaggagtttgcctcggcccacttctcgcctgtcctcagatgtcttgccagcaggctgagcccagcctggctggagctgctgccccatggccgcctggaggagctgtgggccagcttcttcctggagggcccggcggaccaagccttcctggtgttgatggagaccatcgagggtgctgcgggccccagcttccggctgatgaagatggcgcggctgctggccagattcctgcgcgagggccggctggcagtgctgatggaggcgcagtgtcggcagcagacgcagcccggcttcatcctgctccgggagacgctgctgggcaaggtggtggccctgcccgatcacctgggcaaccgcctgcagcaggagaacttggccgagttcttcccccagaactacttccgcctgctcggcgaggaggtcgtccgggtgctgcaggcggttgtggactctctccaaggtggcctggattcctccgtgtccttcgtgtctcaggtccttgggaaagcctgtgtccacgggaggcagcaggagatcctgggcgtgctggtaccccggctggcagcgctcacccagggcagctacctgcaccagcgcgtctgctggcgcctggtggagcaagtgccggaccgggccatggaggctgtgctgaccgggctggtggaggccgcactggggcctgaggtcctttcgagactgctggggaacctggtggtgaagaacaagaaggcccagtttgtgatgacccagaagcttctgttcttacagtcccggctcacgacgcccatgctgcagagcctgctgggccatctggccatggacagccagcggcgcccgctcctgctgcaggtgctgaaggagctgttggagacgtggggcagcagcagtgccatccgccacactcccctgccgcagcagcgccacgtcagcaaggctgtcctcatctgcctggcgcaactcggggagccggaactgcgggacagccgggatgaactgctggccagcatgatggcgggcgtgaagtgccgcctggacagtagcctgccccccgtgcgacgcctgggcatgatcgtggcagaggtcgttagtgcccggatccaccccgaggggcctcccctgaaattccagtacgaagaggatgaactgagcctcgagctgctggccttggcctccccccagcctgcgggtgacggcgcctcggaggcgggcacgtccctcgttccagccacggcagagccccctgcagagacccccgcagagatcgtggatggcggcgtcccccaagcacagctggcgggctctgactcggacctggacagcgatgatgagtttgtcccctacgacatgtcgggggacagagagctgaagagcagcaaggctcctgcctacgtccgggactgcgtggaagccctgaccacgtctgaggacatagagcgctgggaggcagccctgcgggcccttgagggcctggtctacaggagccccacagccactcgggaggtgagtggggggcgggagtgggtggggaggcccaagatggtagctccctcaatgccatctgtgtcctggccactgagggtgacatatggctcccgtgtgtgacagggctgctgcctctcccggggggcctgcggcctggggcctctgctggggtgggtggctccggccctgtgagcctcggtgaggcctcggcgggcagctgggtccgacaggtttcccagccctaacccctgcgtgcaggtgagcgtggagctggccaaggtgcttctgcatctggaggagaagacctgtgtggtgggatttgcagggctgcgccagagagccctggtggccgtcacggtcacagacccggccccggtgagttcccgcacccgtggccctggccagtgcaggcacagcgggaagcactgggagctgcggtgcctgagtctcggtcctgtgctggagctggctgtgaggtgcccggaggtcgccccgggtggccctcaggtcccggaccacagcagcctctcccctgtgtcctcaggtggccgactatctgacctcacagttctatgccctcaactacagcctccggcagcgcatggacatcctggatgtgctgactctggctgcccaggagctgtctaggcctgggtgcctcgggaggactccccaacctggctccccaagtcccaacaccccgtgcctgccagaggcagccgtctctcagcctggcagtgccgtggcgtctgactggcgggtggtggtggaggagcggatcagaagcaagacccagcggctctccaagggtggcccgaggcagggcccggcaggcagccccagcagattcaactccgtggccggccacttcttcttccccctccttcagcgctttgacaggtgagtgggttttccgtgggcctgtggacttgggggacagggaccctggacgtaccactgtggccaagaagttcgggctgggatctgagtgggtttgggtgtgaacagggtcgtgctttgctgtggctttttgtaagcctgtgttaaatggcagggagcgtcccgcaagattcctctgtggttgagctttgccatgaggcaccaggcatctgctccgatgctgggcttgtggcatggccggcagtgccgcccgcacgtgcccgacgccatcacctgctgggccctgctcgcctcctcctgcctcagccggcgctgcactggccccacgttcagggcgtgaggctctcgagatggcagagaagtgtggggcctgggttgtgctgcagcaggggtgggggtctcggcgttgggaactcctggcccaggtggacttgtgccagacagccctgcagggggagtaggcacccggaaatgtctgctcctacgatctcggtgcaggcaaggcggtgggcacgggaggaggggctgtgtggggctccctcggtctcccacggtggcccaggaggttggggacctggccctgaggcacccgctgcaccttgggctccatcctgtgctctaggcctctggtgaccttcgacctcttgggagaagaccagctggttctcggaaggctggcgcacaccttaggggccctgatgtgcctggctgttaacaccacggtggctgtggccatgggcaaggccctgctggaattcgtgtgggcccttcgcttccacatcgatgcctacgtgcgccaggggctgttgtcggccgtctcctccgtcctgctcagcctgcctgctgcgcgcctgctggaggacctgatggacgagctgctggaagcccggtcctggctggcggacgtggccgagaaagacccggacgaggactgcaggacgctggcactgagggccctgctgcttctgcagagactcaagaacaggctcctcccacccgcgtctccctagtccctggaggcctccccaggaccaccctcgccgacagcaaggcaggcggctgagcagcggcctggagcagcagagccaggctttgtagcgaggccaggtcttcggccgcatccggtacggagagtgcagatgcaggaaggcccggcctgccgctatttatagtgcagccagtctgctaaaaatacactgggcctgggcactgcccgccgggacatggcagcctggacgtggggctggggctgtgggcgctgctggcggggttgactcttccagtgagggcagaaccaggctggcaggaggggaggacggtgtacctgctgctcagagcccccaaggctctcctctgagagccaccaagcaggacagagcagctcttgtcccaggtccctcgggctgagcgccgtgtcaccaggagaatagtgctcacagcccaggcagggtgtgtggctcctggatgggctcgtggggcgggatgggacagggcacgggctctcagaaaataaactgctttattgg

SEQ ID NO: 62218 - DNA, 5020 bp, Homo Sapiens; identical to SEQ ID NO: 22357

SEQ ID NO: 62219 - DNA, 599 bp, Homo Sapiens
  misc_feature (415)..(415): n is a, c, g, or t
ttttttccttcaaaaaatagtttattctgcacatttcctagtaggctctctgcccaccgttccagggtagcagctactcataacttgtctttctctccaaaaccaagagggccttcccaacagaaaaaccttcagttcccaaagcagcatcgattcttcccctcaccccagcaaacctcggggtggaataatgaatcattcaccttctcccacccctcactgccccgccccaccttcatttgccaggactgtcactggctgatggtcagattttgtctttttcaacttggataccctcaagcatcccagcttttggaggcttccctgggcaacctcatgggcttccacattgaccaggcattacattcagcatccttggacaaaccacccatcagagcagtgggttgtggccagntccctccacccccgactccgccccaatggaagaaaccagaggatcacagggccccaggctgtgccgcctgcagagccaggagctgctgggtgcattgcaacgttctccctgagcaaatcggcatggtcaccacagtccagtcctcagtcaccgacagctctgcccctcggggtcagatcccacc

SEQ ID NO: 62220 - DNA, 1965 bp, Homo Sapiens
ccagtggccattgtaactttcccccgggaacagccggccgcggcgcgggccgaggctgtgcgtgcgagtctttgtgcggccggcggactggagctcccagtcgggcctgcccgtcccactcgggacatgagctgctgaagttgtacccccgtcagccctcacccctgccaggactcctctgggcttgcagtcgctccccgtacctctcctggccccctcagttctcccaggttgttcctcaaagtcattcaagctgtactcgccgaaggagcccccgaacggcaacgcctttccccccttccatcccggcaccatgctggatagggatgtgggcccaactcccatgtatccgcctacatacctggagccagggattgggaggcacacaccatatggcaaccaaactgactacagaatatttgagcttaacaaacggcttcagaactggacagaggagtgtgacaatctctggtgggatgcattcacgactgagttctttgaggatgatgccatgttgaccatcactttctgcctggaggatggaccaaagagatataccattggccggaccctgatcccacgctacttccgcagcatctttgaggggggtgctacggagctgtactatgttcttaagcaccccaaggaggcattccacagcaactttgtgtccctcgactgtgaccagggcagcatggtgacccagcatggcaagcccatgttcacccaggtgtgtgtggagggccggttgtacctggagttcatgtttgacgacatgatgcggataaagacgtggcacttcagcatccggcagcaccgagagctcatcccccgcagcatccttgccatgcatgcccaagacccccagatgttggatcagctctccaaaaacatcactcggtgtgggctgtccaattccactctcaactacctccgactctgtgtgatactcgagcccatgcaagagctcatgtcacgccacaagacctacagcctcagcccccgcgactgcctcaagacctgccttttccagaagtggcagcgcatggtagcaccccctgcggagcccacacgtcagcagcccagcaaacggcggaaacggaagatgtcagggggcagcaccatgagctctggtggtggcaacaccaacaacagcaacagcaagaagaagagcccagctagcaccttcgccctctccagccaggtacctgatgtgatggtggtgggggagcccaccctgaagggcggggagttcggggacgaggacgagaggctcatcacccggctggagaacacccagtttgacgcagccaacggcattgacgacgaggacagctttaacaactcccctgcactgggcgccaacagcccctggaacagcaagcctccgtccagccaagaaagcaaatcggagaaccccacgtcacaggcctcccagtaaaaggccctgctgtggccacccagtgctctgcctacctgccccacccctcacagccccagggagcagaagacagaatgaagagactgagcatctaaaatgggcagcctccatccacccgcttcagggaggaactggactctctgggggcaggtgccaagatttgcccccccagtggccctgggctgggcctggcctctacagagccttttagggggagggggtactcatgtggatgcctacttggaacctgggcctctgagacatgtcctgaccaccccccagggcatttgcctccatcttcaccccagattgtgggtttcccatccccctgactttacccctttcaagcctggggttgtctatacccacagcccttagggacttaaagttacggggcttcgttgaatgctccttcccctaggcagctggtaatagaggggtaaagctctgggcccctcctccctgctgccacttatcccagctccaagtttttttaaaaataatattattaaaaatgtaagtta

SEQ ID NO: 62221 - DNA, 2190 bp, Homo Sapiens
cccgggaggaggaggcggcgagaatggcagcggcgtcgtgggcgcggcggagatgagcgcccgcgaccccgggcccagggcggcacagccggagtgggcgggggtcccgatgcaggcccgaggggggccatggggcaggtcctgccggtcttcgcccactgcaaagaagctccgtctacagcctcctcaactcctgattccacagaaggagggaacgacgactctgattttcgagagctgcacacagcccgggaattctcagaggaggacgaggaggagaccacgtcgcaggactggggcaccccccgggagctgaccttctcctacatcgcctttgatggtgtagtgggctccgggggccgcagggattcaactgcccgccgcccccgcccccagggccgctcagtctcggaaccacgagaccagcaccctcagcccagcctgggcgacagcttggagagcatccccagcctgagccaatccccggagcctggacgacggggtgatcctgacaccgcgcctccatccgagcgccctctggaagacctgaggcttcggttggaccatctgggctgggtggcccggggaacgggatccggggaggactcttccaccagcagctccaccccgctggaagacgaagaaccccaagaacccaacagattggagacaggagaagctggggaagaactggacctacgactccgacttgctcagccctcatcgcccgaggtcttgactccccagctcagtccgggctctgggacaccccaggccggtactccgtccccatcccgatcgcgagattcgaactctgggcccgaagagccattgctggaagaggaagaaaagcagtgggggccactggagcgagagccagtaaggggacagtgcctcgatagcacggaccaattagaattcacggtggagccacgccttctaggaacagctatggaatggttaaagacatcattgcttttggctgtttacaagacggttccaattttggaattgtccccacctctgtggacagccattggctgggtccaaaggggccccaccccccctactcctgtcctccgggttctactgaagtgggcaaaatccccgagaagcagcggtgtccccagcctctcactcggagccgatatggggagtaaagtggcggacctgctgtactggaaggacacgaggacgtcaggagtggtcttcacaggcctgatggtctccctcctctgcctcctgcactttagcatcgtgtccgtggccgcgcacttggctctgttgctgctctgcggcaccatctctctcagggtttaccgcaaagtgctgcaggccgtgcaccggggggatggagccaaccctttccaggcctacctggatgtggacctcaccctgactcgggagcagacggaacgtttgtcccaccagatcacctcccgcgtggtctcggcggccacgcagctgcggcacttcttcctggtagaagacctcgtggattccctcaagctggccctcctcttctacatcttgaccttcgtgggtgccatcttcaatggtttgactcttctcattctgggagtgattggtctattcaccatccccctgctgtaccggcagcaccaggctcagatcgaccaatatgtggggttggtgaccaatcagttgagccacatcaaagctaagatccgagctaaaatcccagggaccggagccctggcctctgcagcagccgcagtctccggatccaaagccaaagccgaatgagaacggtgtctctgcccgcaggacgcctgcccccagcccccgcagccctctggccccctccatctcttgtccgttcccacccacccccctcctcggcccgagccttttcccggtgggtgtcaggatcactcccactagggactctgcgctaattacctgagcgaccaggactacatttcccaagaggctctgctccaggagtccaggaaagacgaggcaccttggccgcggggcctgctgggacttgtagttgcctagacagggcaccaccctgcacttccggacccgccgctggaggcgccgtgaggcgttggtgtctcctggatgctactagccccaacgccggggctttgcatggggcccaggggaggcctgagcttggatttacactgtaataaagactcctgtggaaaaaaaaaaaaa

SEQ ID NO: 62222 - DNA, 5832 bp, Homo Sapiens
gccctgcccacctcacgcagactgccgggacctctggcagaccttttcttgcacctgccagccaggttactacggcccaggctgtgtggatgcctgcctcctgaacccctgtcagaaccagggatcatgccggcacctgccaggagccccccatggctatacctgtgactgtgtgggtggctatttcgggcaccactgtgagcacaggatggaccagcagtgcccacggggctggtgggggagcccaacctgtggcccctgcaactgtgatgttcacaaaggttttgatcccaactgcaacaagacaaatgggcagtgtcactgcaaggagttccactaccgaccgcggggcagtgactcttgcctcccatgtgactgctaccctgtgggctccacctcgcgctcatgtgcaccccacagcgggcagtgcccctgtcgcccaggagcccttggccgccagtgcaacagctgtgacagtcccttcgcagaggtgacagccagcggctgccgggtgctctatgatgcctgccctaagtccctgagatctggtgtgtggtggccccagacaaagtttggcgtcctggccacagtgccctgtccccggggggccctgggattgcggggtgcaggtgctgctgtgcggctgtgtgatgaggcccagggttggctggagcccgacctcttcaactgtacctcccctgcctttcgagagctcagtctgctgctggatggcctagagctgaacaagacggcactggataccatggaggccaagaagctggctcagcggctacgggaggtgactggccacactgaccactattttagccaagatgttcgagtcactgcccgcctgctggcccacctgctggccttcgagagccatcagcagggcttcgggctgacagccacacaggatgcccacttcaatgagaatctgctgtgggccggctctgcactgcttgccccagagacaggggacttgtgggcggcgctggggcagcgggcccctgggggctccccaggcagcgcgggactggtgaggcacctggaggagtatgcagccacactcgcaaggaatatggaactcacatacctgaatcccatggggctggtgacgcctaatatcatgctcagcattgaccgcatggagcaccccagttctccccggggggcccgtcgctaccctcgctaccatagcaacctctttcgaggccaggatgcctgggatcctcacacccatgtgctgctgccttcccagtccccacggccatccccatctgaagttctgcccacaagcagcagcatagaaaactccaccacctcaagtgtggtccccccaccagccccgccagagccagagcctgggatctccattatcattctcctcgtttaccgcaccttagggggactgctccctgcccagttccaggcagaacgccgaggtgccaggcttcctcagaaccccgtcatgaactccccggtggtcagcgtggctgtgttccacggacgcaacttcctaaggggaatcctggagtcccccatcagcctagagtttcgcctgctacagacagcgaatcggagcaaggcgatctgtgtgcagtgggacccacctggcctggcggagcagcatggtgtgtggacagcacgggactgcgagctggtgcacaggaatgggtcccacgcacggtgtcgctgcagccggacagggacctttggggtcctcatggatgcctctccccgtgagaggctggagggcgacctggagctgctggctgtgttcacccacgtggtcgtggctgtgtctgtggctgcgctggtgctgactgcagccatcctgctgagcctgcgcagcctcaagtccaatgtgcgtgggatccatgccaatgtggcagccgccctgggggtggcagagctcctcttcctgctggggattcacaggacccacaatcagctggtgtgcactgcagtcgccatcctcctgcactacttcttcctcagcaccttcgcgtggctcttcgtgcaggggctgcacctctaccgcatgcaggttgagccacgcaacgtggaccgcggcgccatgcgcttctaccatgccctgggctggggcgtccctgctgtgctgctgggccttgctgtgggcctggaccctgagggctatgggaaccctgacttctgctggatctcagtccacgagcccctcatctggagctttgctggccctgttgtcctggtcatagtgatgaacgggaccatgtttctcctcgctgcccgcacatcctgctccacagggcagagggaggccaagaagacctctgcactgacccttcgcagctccttcctgctgcttctgctggtcagtgcctcctggctctttgggctcctggcagtcaaccacagcatcctagccttccactacctccatgctggactctgcggcctccagggcctggcggtgctgctgctcttctgtgtcctaaatgcagatgctcgggctgcctggatgccagcctgtctgggcaggaaggcagcgcctgaggaggcaaggccagcacctgggctgggacctggggcctacaacaacacggctctctttgaggagagtggcctcatccgcatcactctgggcgcctccaccgtctcctctgtgagcagtgcccgctccggccggacccaggaccaggacagccagcggggccgcagctacctcagggacaatgtcctggttcgacatggctcagccgctgaccacactgaccacagcctccaggctcatgctggccccactgacctggacgtggccatgttccatcgagatgctggcgcagactccgactctgacagtgacctgtccttggaggaggagaggagtctctccattccatcttcagaaagcgaggacaatggccggacgcgggggcgcttccaacggccactctgccgagcagcccagagtgagaggctcctcacccaccccaaagatgtggatggcaatgacctcctgtcctactggccagccctgggggagtgcgaggcagccccctgtgctctgcagacttggggctctgaaaggcgcctggggctggacaccagcaaggatgcagctaacaacaaccagccagacccggccctgaccagtggggatgagacttctctgggccgggcccagcgccagaggaaaggcatcctgaagaaccggttgcaatacccactggtgccacagacccgaggtgcccctgagctgtcctggtgccgtgcagccaccttgggccaccgtgctgtgccagctgcctcttacggtcgcatctatgctggcgggggcacgggcagcctttcacagccagccagccgctactcttctagagaacagctggacctgctcctccggcggcaactgagccgtgagcgactagaggaagcccctgcccctgttctacgtcccctgagccggccagggtcccaggaatgcatggatgctgcaccaggccgactggagcccaaagatcggggcagcaccctgccacggaggcagccacctcgggactaccctggcgccatggctggccgcttcgggtcacgggatgcgctcgacttaggggcacctcgagagtggttgagcacgctgcctccgccccgccgcacccgggaccttgacccacagcccccacctctgcccctgtctccccagcggcaactctcaagggaccccctcttgccatcccggccgctggactctctgtctaggagctcgaactctcgggagcagctggaccaggtgcctagccggcacccctcacgagaagcccttgggccactcccgcagctgctcagagctagggaggactcggtcagtggccccagccatggcccctccacagaacagttggacattctttcctccatccttgcctctttcaactcctcggccctctcctctgtgcaatcttcaagcacacccttgggccctcacaccactgccacaccttctgccacagcctctgtgcttgggccctccacgccacgttctgccacgtctcacagcatctcggagctgtcgccagactcagaagttcccagaagtgagggtcactcctgaggggatgacggcgtggacgaggaacagctgagggcgacagaggatctaggctaacaggagagactccaggagtgggggcagatcccaaggcagcctcctgctccccagtggtgggtgccccagctctacctggtgtggcagggctgaggctccatgtgcatctgtgagcatgcgtgtgacaggtgcagagacgggggactggagggagacttttatacgttttgtacctttgtaaccagagagatgcttatgttatttttcagcttttctgtctcctggggggtttgaggctgggctgggagggggagggagatagagggagagatgcagtttgaccccatttgggtcctgagcaaaccctatgctcatctctctctccttcctggggtggactcagatgggtgggacacatgccttcctccccctattccacccccaagttgatctgagtatcgtcaggggcccaaagtacagaattgttctttgctttttattgaatgctccaaaggccaaacttctggggctgggggttggtcttggaaacaggggtcctctgacttcctcatgggggcttgctcataccgcccctcctggtggatgtgtgtgtttattatgtggagtccctgccacttactgccttatgacctaggactgatgctgtggggtgctggtggagcagctgatgtcgtgtttacagagcaaggcttccctgtctcccacggggaggggctcgggcctctagtcagacattcctgcagagggtcggtggaggggtcattcacctgcccctgcagcaagcaaaagttgtctgtggtgccatttgattccctgacactgccccctgcttgaattgattccgaagggtagggtgggaaggtgagcaaagggagcagaaacaagggaattcaagacccagaatgtaggtgccactgcctcctatgtttacaggatcctccgtggccctaggcacctgggctgcaggaagtgactccgttccactcctcctttattcccttaaaaagggaaaaatgactgttacgaccctgttcacaaaactcttacttttgctattttgtctgctgtccagaactgaagactttaaaattttgttactgtttacaagtccagattcaaaaaatgtttttactttgtttacaactcaaaactttgagttttacactttgtttacagtagataattttttttcctttgtttccaagtgaaaggtagggaaagtgggagagggacttggaggacccacctgtgaggaccctgacctggccatcttgaggggttttctaacccccaggtctcccaggccgaaggtcagccttgagtcccgtttaacagcagatccagaagaccttgagagtaggcgtcctctaaccacgggggagagtggctgtgcagggctggggggtggtctgtgcagacacctcctcacccaccaccccatgcatactcttgggaagcagcttcctgggagattagaaattctacttccctgactggagctaaatcccaccagccaggacccaaactctccttaccgagaaggaccccagctcttgaagggctgagtggcctgctgggggtgggagggtgtctttactatgtcctaggtttcgtagatgcccctctctggggttcccctcctccagcccagcggccctctttcctgtctgtgtaaattgttccgtgaagccgcgctctgttttgggaataaacttctatag

SEQ ID NO: 62223 - DNA, 5301 bp, Homo Sapiens; identical to SEQ ID NO: 29258

SEQ ID NO: 62224 - DNA, 1994 bp, Homo Sapiens
ggcacgagcatggcccttgtgatccaggtggggaaactaaggcccagagaagtgaggaccccgcagactatcaatcccagtctcttcccctcactccctgtgaagctctccagcatcatcgaggtcccatcagcccttgccctgttggatgaataggcacctctggaagagccaactgtgtgagatggtgcagcccagtggtggcccggcagcagatcaggacgtactgggcgaagagtctcctctggggaagccagccatgctgcacctgccttcagaacagggcgctcctgagaccctccagcgctgcctggaggagaatcaagagctccgagatgccatccggcagagcaaccagattctgcgggagcgctgcgaggagcttctgcatttccaagccagccagagggaggagaaggagttcctcatgtgcaagttccaggaggccaggaaactggtggagagactcggcctggagaagctcgatctgaagaggcagaaggagcaggctctgcgggaggtggagcacctgaagagatgccagcagcagatggctgaggacaaggcctctgtgaaagcccaggtgacgtccttgctcggggagctgcaggagagccagagtcgcttggaggctgccactaaggaatgccaggctctggagggtcgggcccgggcggccagcgagcaggcgcggcagctggagagtgagcgcgaggcgctgcagcagcagcacagcgtgcaggtggaccagctgcgcatgcagggccagagcgtggaggccgcgctccgcatggagcgccaggccgcctcggaggagaagaggaagctggcccagttgcaggtggcctatcaccagctcttccaagaatacgacaaccacatcaagagcagcgtggtgggcagtgagcggaagcgaggaatgcagctggaagatctcaaacagcagctccagcaggccgaggaggccctggtggccaaacaggaggtgatcgataagctgaaggaggaggccgagcagcacaagattgtgatggagaccgttccggtgctgaaggcccaggcggatatctacaaggcggacttccaggctgagaggcaggcccgggagaagctggccgagaagaaggagctcctgcaggagcagctggagcagctgcagagggagtacagcaaactgaaggccagctgtcaggagtcggccaggatcgaggacatgaggaagcggcatgtcgaggtctcccaggcccccttgccccccgcccctgcctacctctcctctcccctggccctgcccagccagaggaggagcccccccgaggagccacctgacttctgctgtcccaagtgccagtatcaggcccctgatatggacaccctgcagatacatgtcatggagtgcattgagtagggccggccagtgcaaggccactgcctgcccgaggacgtgcccgggaccgtgcagtctgcgctttcctctcccgcctgcctagcccaggatgaagggctgggtggccacaactgggatgccacctggagccccacccaggagctggccgcggcaccttacgcttcagctgttgatccgctggtcccctcttttggggtagatgcggccccgatcaggcctgactcgctgctctttttgttcccttctgtctgctcgaaccacttgcctcgggctaatccctccctcttcctccacccggcactggggaagtcaagaatggggcctggggctctcagggagaactgcttcccctggcagagctgggtggcagctcttcctcccaccggacaccgacccgcccgccgctgtgccctgggagtgctgccctcttaccatgcacacgggtgctctccttttgggctgcatgctattccattttgcagccagaccgatgtgtatttaaccagtcactattgatggacatttgggttgtttcccatctttttgttaccataaataatggcatagtaaaaaaaaaaaaaaaaaa

SEQ ID NO: 62225 - DNA, 606 bp, Homo Sapiens
ttttttgctgtaaaaatcgtaagtttatttgttaaaaaaaatactgtatttgaaaagtaccttccttctgggattttcaaataatttgtacactacattttattcatctacacattggaaatgagtaaactggtgaacatatagctttttatacatttaacacaaccagtgcaaattctcctgcctctgagaaggcagagaagccctttactcagaaggtcttcaattctagcattactccaactcctagggaaatttcgggtgggtgcctatggctgtatgaccatctgattcctcagggacaggacaggaattcagcaagggagcttaaaatattttaagtaattgtcaacattccatggtgactctccccaaaaatctagtggtaggaaaataatctgtacttattcctctttctgcacacaaagccctcatttaaatttgtgagcctgcttgggatccattacctagccattcagagatcctgtcaaatgcacagcagtcctacttctcctatctcttccagtcctagctgctgggatcactatactactaacagacccgcaacctcaaacacaacttccttcgacccccgccggagaagag

SEQ ID NO: 62226 - DNA, 506 bp, Homo Sapiens
gtacacaaatgttcataacagctttatttataacagccccaaactggaaacaacccaggtgtccatcgataggtcaatgaacaaatctattcgaggaagcagtactcagcagggaagagagcataaaaacaaaaactcgggacagatgctaccacatggatgaatctcaaaataactatactgagtaaaatatgcctgaccaaaaaagggatacatattgtatgattcaatttacatagaattctaggacatgcaaactaataacagggcacaagggcacttgggaatgatgggtccgttcctcacttcagttgtggtgatagttttacgcagggtatacatacgccaacacattgtacacttttgatacgtgcagtttattgggtgtcaagtacacctcctaaaataaaaatattgatgggctctacattctggagacacgggcagtagaactattattttcagcttgaaatattagctacactttggtaaaaatacttttgaac

SEQ ID NO: 62227 - DNA, 794 bp, Homo Sapiens
ttttttttttttttttttgcttataaaaaccattttaaattaaaaaagggaggaagcatcagtgcacacagatggggacacaggggcagagggcccagccccaagtacagtgtggtcaccccacagcccagtgggcaccagggcagactcccctcgcagcacagacagctgaggcccgggtgctggttcctctaggtacagctttggtccttgtgggctcagaggtctgcctttcggaaacttgctctgttcaaggagttcctgaggccgggtggggtgggtgccatcagctggggcaggcgctgggtaagcaggggctgcagagcctcccgcaggcggcagtagttgcgctccagctcacggtggtactccttctggtccggcccaatcagggccttatttttccgcagcgcatcctcacatttcttgcagaagtccttgaagcagagccgcaatttgttgtgatgccggaagagcttggggtcttccgggatctctgctaaaaacacctgggccacctccaggggaccctggttcacggtgggccctacagagccctgaagcaccatctgtagcatcttagcatctggtgggtcctgctcggtggaaaggccaactcccgtgtcttcttctggatgtcctcgatggccacctccactggcgttaacaccgtttcctcccgtgggacacacggatgcgagtcttgatgtaggggaaggcgtggtcgtgcttaaccacgtcttaagcttgggttgctcgggcaacttcccgtgtgcgcgcccattcggcgtgaa

SEQ ID NO: 62228 - DNA, 591 bp, Homo Sapiens
tttttttttttgccacaaaagacctttaatggcctcctatttattgttcttttgttcatttgttagagttgaatgaactataataacttgtctgacataataagaatgccacaggtataacagataaacctggcaggtggtccaggaatgagagtgtcacaaaataatcactcaacacaagggccacagacctggagattcttcccagccatccctcactcctgccccaggacacaacccatgcaggcccccattccataggaagaggcaggtcccacagtgtctgtggctagaccttaacactgagcagagatgcccgggaagatggcacttcctatgctcgttcccaagtgctctgctcatctgccatgcaggtcaggaccataccccgagtttgtgaggcacccacctctcatactcaccacctcatatgaccacctatcatacccacctctcctatgacccttgcaattgtcccagtgaggtgggaagagcctggactagccccatttggcacacagggaaactaaggacacactcggaccgaatgtaatacacccgtgtcatgcgcttgctgtgccctgagcttca

SEQ ID NO: 62229 - DNA, 555 bp, Homo Sapiens
  misc_feature (444)..(444): n is a, c, g, or t
  misc_feature (447)..(447): n is a, c, g, or t
  misc_feature (499)..(499): n is a, c, g, or t
tgctaagcacggaggctgtttataggctgggccgcatattacaatgctcagggctccactgcaccctctcgggggtctgctagcgctttccgtagactgtctccacgccctccccactcccagccagtccacatcctctccggagggactgcagcaaggatcgttaagtctgtccaccgggatgggggaagaccagggccggagcagattggccatccttcagaagatcgacttccgctattggggagagtctgaggagtccgttctcccacggggcctcgtcactctttgcgaagggcgcctggcaggtcaaatgacctccatttccacctcgccttccaccttcttcttttgcttctccatcactgcctccagctctgacactttctctttgtcctccagcagcgagcgctgcacggtgacctggctgtacacacgtgcccnctnctcggggctcaccgcccgcagcttctccctctgcagcgagaaaagctgcgcnccggtcagcacacccagcgcgtccacggtcccggagctaaagcccttggcctgcag

SEQ ID NO: 62230 - DNA, 451 bp, Homo Sapiens
tccaatgaaagtctatttatttgctcgtaatgagacagaacgctacaatctgttcaacactgggctggacactgcagtgattaggggcaggtgtggggcagaaatagaaatcacatgatcgccactgattcgcagtggagagggcgctgagctgggcccggcaggcaggcagcctcagcagagattcaggcagtcagcatggtgcggccctcccgccagcactgtcaggtcagcagaggttcaagcagtcagcatggcgcggccgctaggaccctctgccatggctttgtgacactgcagctatgctgggcgggactccgccccccaccccacccctgcatcggagggcagggcaggcagcaagcagcatttggaatgcagggtggagaggatgctagaagtatgtgatgcacctgcggcactgacagcatctctgccctcagaggctgag

SEQ ID NO: 62231 - DNA, 5287 bp, Homo Sapiens
gcgtccctcccagcggcgcgtgagcggcactgatttgtccctggggcggcagcgcggacccgcccggagatgaggcgtcgattagcaaggtaaaagtaacagaaccatggctcagtttccaacaccttttggtggcagcctggatatctgggccataactgtagaggaaagagcgaagcatgatcagcagttccatagtttaaagccaatatctggattcattactggtgatcaagctagaaactttttttttcaatctgggttacctcaacctgttttagcacagatatgggcactagctgacatgaataatgatggaagaatggatcaagtggagttttccatagctatgaaacttatcaaactgaagctacaaggatatcagctaccctctgcacttccccctgtcatgaaacagcaaccagttgctatttctagcgcaccaccatttggtatgggaggtatcgccagcatgccaccgcttacagctgttgctccagtgccaatgggatccattccagttgttggaatgtctccaaccctagtatcttctgttcccacagcagctgtgccccccctggctaacggggctccccctgttatacaacctctgcctgcatttgctcatcctgcagccacattgccaaagagttcttcctttagtagatctggtccagggtcacaactaaacactaaattacaaaaggcacagtcatttgatgtggccagtgtcccaccagtggcagagtgggctgttcctcagtcatcaaggctgaaatacaggcaattattcaatagtcatgacaaaactatgagtggacacttaacaggtccccaagcaagaactattcttatgcagtcaagtttaccacaggctcagctggcttcaatatggaatctttctgacattgatcaagatggaaaacttacagcagaggaatttatcctggcaatgcacctcattgatgtagctatgtctggccaaccactgccacctgtcctgcctccagaatacattccaccttcttttagaagagttcgatctggcagtggtatatctgtcataagctcaacatctgtagatcagaggctaccagaggaaccagttttagaagatgaacaacaacaattagaaaagaaattacctgtaacgtttgaagataaaaagcgggagaactttgaacgtggcaacctggaactggagaaacgaaggcaagctctcctggaacagcagcgcaaggagcaggagcgcctggcccagctggagcgggcggagcaggagaggaaggagcgtgagcgccaggagcaagagcgcaaaagacaactggaactggagaagcaactggaaaagcagcgggagctagaacggcagagagaggaggagaggaggaaagaaattgagaggcgagaggctgcaaaacgggaacttgaaaggcaacgacaacttgagtgggaacggaatcgaaggcaagaactactaaatcaaagaaacaaagaacaagaggacatagttgtactgaaagcaaagaaaaagactttggaatttgaattagaagctctaaatgataaaaagcatcaactagaagggaaacttcaagatatcagatgtcgattgaccacccaaaggcaagaaattgagagcacaaacaaatctagagagttgagaattgccgaaatcacccatctacagcaacaattacaggaatctcagcaaatgcttggaagacttattccagaaaaacagatactcaatgaccaattaaaacaagttcagcagaacagtttgcacagagattcacttgttacacttaaaagagccttagaagcaaaagaactagctcggcagcacctacgagaccaactggatgaagtggagaaagaaactagatcaaaactacaggagattgatattttcaataatcagctgaaggaactaagagaaatacacaataagcaacaactccagaagcaaaagtccatggaggctgaacgactgaaacagaaagaacaagaacgaaagatcatagaattagaaaaacaaaaagaagaagcccaaagacgagctcaggaaagggacaagcagtggctggagcatgtgcagcaggaggacgagcatcagagaccaagaaaactccacgaagaggaaaaactgaaaagggaggagagtgtcaaaaagaaggatggcgaggaaaaaggcaaacaggaagcacaagacaagctgggtcggcttttccatcaacaccaagaaccagctaagccagctgtccaggcaccctggtccactgcagaaaaaggtccacttaccatttctgcacaggaaaatgtaaaagtggtgtattaccgggcactgtacccctttgaatccagaagccatgatgaaatcactatccagccaggagacatagtcatggttaaaggggaatgggtggatgaaagccaaactggagaacccggctggcttggaggagaattaaaaggaaagacagggtggttccctgcaaactatgcagagaaaatcccagaaaatgaggttcccgctccagtgaaaccagtgactgattcaacatctgcccctgcccccaaactggccttgcgtgagacccccgcccctttggcagtaacctcttcagagccctccacgacccctaataactgggccgacttcagctccacgtggcccaccagcacgaatgagaaaccagaaacggataactgggatgcatgggcagcccagccctctctcaccgttccaagtgccggccagttaaggcagaggtccgcctttactccagccacggccactggctcctccccgtctcctgtgctaggccagggtgaaaaggtggaggggctacaagctcaagccctatatccttggagagccaaaaaagacaaccacttaaattttaacaaaaatgatgtcatcaccgtcctggaacagcaagacatgtggtggtttggagaagttcaaggtcagaagggttggttccccaagtcttacgtgaaactcatttcagggcccataaggaagtctacaagcatggattctggttcttcagagagtcctgctagtctaaagcgagtagcctctccagcagccaagccggtcgtttcgggagaagaatttattgccatgtacacttacgagagttctgagcaaggagatttaacctttcagcaaggggatgtgattttggttaccaagaaagatggtgactggtggacaggaacagtgggcgacaaggccggagtcttcccttctaactatgtgaggcttaaagattcagagggctctggaactgctgggaaaacagggagtttaggaaaaaaacctgaaattgcccaggttattgcctcatacaccgccaccggccccgagcagctcactctcgcccctggtcagctgattttgatccgaaaaaagaacccaggtggatggtgggaaggagagctgcaagcacgtgggaaaaagcgccagataggctggttcccagctaattatgtaaagcttctaaaccctgggacgagcaaaatcactccaacagagccacctaagtcaacagcattagcggcagtgtgccaggtgattgggatgtacgactacaccgcgcagaatgacgatgagctggccttcaacaagggccagatcatcaacgtcctcaacaaggaggaccctgactggtggaaaggagaagtcaatggacaagtggggctcttcccatccaattatgtgaagctgaccacagacatggacccaagccagcaatgaatcatatgttgtccatccccccctcaggcttgaaagtcctcaaagagacccactatcccatatcactgcccagagggatgatgggagatgcagccttgatcatgtgacttccagcatgatcacctactgccttctgagtagaagaactcactgcagagcagtttacctcattttaccttagttgcatgtgatcgcaatgtttgagttattacttgcagagataggagcaaaaattacaaaaacacacagggtagtgggtccttttgtggctttcctagttactcaaattgactttcccccacctttgcacaggtgctttcaataggttttaaaattatttttaaatatatattttagctttttaataaacaaaataaataaatgacttctttgctattttggttttgcaaaaagacccactatcaaggaatgctgcatgtgctattaaaaattgttccaaatgtccataaatctgagacttgatgtattttttcattttgtccagtgttaccaactaaattgtgcagtttggggcttttcccccttaccatagaagtgcagaggagttcagtatctctgttttaaagacgtatagaatgagcccaattaaagcgaaggtgtttgtgcttgtttgtgtgtatcagctgtaccttgttgagcatgtaatacatcctgtacataagaaattagttctttccatggcaaagctattaccttgtacgatgctctaatcatattgcatttaattttattttgcacagtgaccttgtagccacatgagaaagcactctgtgtttttgttcggtctcagatttatctggttgagttggtgttttgtttggggtttttaattttgcgtgtttgcatagcataaaatcagtagacaacaccactgaggtcgttacgatcaacgatatccacagtctctttttagtctctgttacatgaagttttattccagttacttttcatggaatgacctattttgaacaagtaattttcttgacaagaaagaatgtatagaagtctccctgcaattaatttccaatgtttacattttttaactagactgtggaatttctacagattaatatgaaatggagctcatggtccgtttgtgtggtaaaaatgctgtagctgaagccctgtttgtcttttaaacactagttggaagctctcaataaaaatgcctgctgctcacagcacagaaaatggggcagggggagcctcaagcacaatctagctgtcctcctaaagactctgtaatgctcactcccctcgcgttctcccggcgctgtcgggaggctgtgctggtggtcgtgtagaggtccttctcctttcacatggtgcagagagcgaggacctctcctcctcgttcagttgcacttcagtattttcacggatatgaatgtaaaatatataaatatataaacctgcggctttaacaactgtaatacaaccttttgaattaattccgtgtatagataattaaattcttcatacaaaaaaaaaaaaaaa

SEQ ID NO: 62232 - DNA, 2205 bp, Homo Sapiens
ccaagatggcgtccatgcgggagagcgacacgggcctgtggctgcacaacaagctgggggccacggacgagctgtgggcgccgcccagcatcgcgtccctgctcacggccgcggtcatcgacaacatccgtctctgcttccatggcctctcgtcggcagtgaagctcaagttgctactcgggacgctgcacctcccgcgccgcacggtggacgagatgaagggcgccctaatggagatcatccagctcgccagcctcgactcggacccctgggtgctcatggtcgccgacatcttgaagtcctttccggacacaggctcgcttaacctggagctggaggagcagaatcccaacgttcaggatattttgggagaacttagagaaaaggtgggtgagtgtgaagcgtctgccatgctgccactggagtgccagtacttgaacaaaaacgccctgacgaccctcgcgggacccctcactcccccggtgaagcattttcagttaaagcggaaacccaagagcgccacgctgcgggcggagctgctgcagaagtccacggagaccgcccagcagttgaagcggagcgccggggtgcccttccacgccaagggccgggggctgctgcggaagatggacaccaccaccccactcaaaggcatcccgaagcaggcgcccttcagaagccccacggcgcccagcgtcttcagccccacagggaaccggacccccatcccgccttccaggacgctgctgcggaaggaacgaggtgtgaagctgctggacatctctgagctggatatggttggcgctggccgagaggcgaagcggagaaggaagactctcgatgcggaggtggtggagaagccggccaaggaggaaacggtggtggagaacgccaccccggactacgcagccggcctggtgtccacgcagaaacttgggtccctgaacaatgagcctgcgctgccctccacgagctaccttccctccacgcccagcgtggttcccgcctcctcctacatccccagctccgagacgcccccagccccatcttcccgggaagccagccgcccaccagaggagcccagcgccccgagccccacgttgccagcgcagttcaagcagcgggcgcccatgtacaacagcggcctgagccctgccacacccacgcctgcggcgcccacctcgcctctgacacccaccacacctccggctgtcgcccctaccactcagacacccccggttgccatggtggccccgcagacccaggcccctgctcagcagcagcctaagaagaatctgtccctcacgagagagcagatgttcgctgcccaggagatgttcaagacggccaacaaagtcacgcggcccgagaaggccctcatcctgggcttcatggccggctcccgagagaacccgtgccaggagcagggggacgtgatccagatcaagctgagcgagcacacggaggacctgcccaaggcggacggccagggtagcacaaccatgctggtggacacagtgtttgagatgaactatgccacgggccagtggacgcgcttcaagaagtacaagcccatgaccaatgtgtcctagaaccacctgcctcacagctggccgtcacttgtgggggtccacgggacgatggctttgccagcttaaagtaaccggatggcggacacctggcccccgaggtcccccggccgccgccctgctgctgacccagcctgttttaagttctggatgcatttctctggggtatttggggcttatttttaaaattttaatatgggttcttttttgtgtgatttaaagacactttttggactcaacgttacatttttgaatgtagtaagtaaattaaccaaaaaagttacaacttcctaattttagtgacagctctgcctgtttgttagactcttactttttaaaatcttttctattttccctcgctggggcagtgccctcctacccccagggttgaggggaccaaggtggcacggtggtactgggggtgcggcagggacacccgaccacaccagagcgtgggagacggtgggccttgtcccctgcctgtgcctgcctgggagttttgtattcatcttttgtatagttgtggacatttaagacagtctttgggtacctattttcattgtaaaactatctgaaccattaaagtcgagcttttctaaagaaaaaaaaaaaaaaa

SEQ ID NO: 62233 - DNA, 4006 bp, Homo Sapiens
gcggccggccatgatcgcgtcgtgcttgtgttacctgctgctgccggccacgcgcctcttccgcgccctctcagatgctttcttcacatgtcgaaaaaatgtccttctggcgaacagctcatccccccaggtagagggcgactttgccatggcccctcggggccctgagcaggaggaatgtgagggcctgctgcagcagtggcgagaagaagggttgagccaggtgctctcaactgcaagtgaggggccccttatagataaaggactagcccagagcagcctggcacttctgatggataatcctggagaagagaatgctgcttcagaggacaggtggtccagcaggcagctgagtgaccttcgggctgcagagaacctggatgagcctttccctgagatgctaggagaggagccactgctggaggtggagggggtggagggctccatgtgggcagctatccccatgcagtcggagccccagtatgcagactgtgctgccctcccagtgggtgccctggccacagagcagtgggaagaggacccagcggtgttggcctggagcatagcacctgagcctgtgccccaggaagaggcttccatctggccctttgagggcctggggcagttgcagcctcccgcagtggaaataccatatcatgaaattttgtggcgagaatgggaggatttctccacccagccagatgctcagggcctgaaggcaggagatggccctcagttccagttcactctgatgtcttataacatcctggctcaggacctgatgcagcagagctcagagctctatctacattgccatccagacatcctcaattggaactatcgcttcgtgaacctcatgcaggaattccagcactgggaccctgatatcctgtgtctccaggaagtccaggaagatcattactgggagcagctggaaccctctctgcgaatgatgggctttacctgtttctacaagaggaggactgggtgtaaaaccgatggctgtgctgtctgctacaagcctaccagattccgcctgctctgtgctagccctgtggagtacttccggcctggcttggagctacttaatcgggataatgtgggcttagtgttgctactgcaaccactcgtcccagaaggcctgggacaagtctcggtggccccgctgtgtgtggcaaatacccatatcctttacaacccacgccggggcgatgtcaagctggcccagatggccattctcctggcggaagtggacaaggtggccagactgtcagatggcagccactgccccatcatcttgtgcggggacctaaattctgtccctgattcacctctctacaacttcatcagggatggagagctccagtaccatgggatgccagcctggaaggtatctggacaggaagacttctcccatcagctttaccagaggaagctgcaggccccactgtggcccagctccctgggcatcactgattgctgtcagtatgtcacctcctgtcaccccaagagatcagagagacgcaagtatggccgagacttcctgctacgtttccgcttctgcagcatcgcttgtcagcgaccagtaggactggtccttatggaaggagtgacagatactaagccagagcgacctgcgggttgggctgagtctgtccttgaggaagatgcatcggagcttgagcctgccttctccaggactgtaggtaccatccagcactgcctccacctgacgtcagtatatacccacttcctgccccagcgtggccgcccagaggtcactacaatgccattgggtcttggaatgacagtagattacatcttcttctcagctgagtcctgtgagaatgggaacagaactgatcacaggctgtatcgagatggaactctcaagctcctgggtcgtctctcccttctctctgaagagatactctgggctgccaatggcttacccaaccccttctgctcttcagaccacctctgcctgctagccagcttcgggatggaagtcaccgccccatgacagggctcccaggggaagagagcttctcttccagaagagctcactggatcagagactgtggaaaaatcccatgcatctagaaacttagatccaagaaacttacatcccctcccttccccctcctcgttccctttttcccacggttagactttctccaggcctggctgcgttctctgcctgtggtccttgccccaccccagcctcttcctaatcctgtgccacacactcagtggccctgggagaggcagaaggggggctcccccttccttccatgtatccagcgctcccccttgatttttaattaccagggttatgggagttcttgatttcattggttatttgctttcaggccgtttcttgatgtaccttctgacctgaccttttccctgccttcaggacttctgggcccagccctcttgccaggcatgcatatgtgagatatgcatatcatgtatgtgtcctcttggggtgagacttctgcacagccatgcctgcctctgaccagtccacttttcatgttggggctgtaggcctggggcaggttcagagtctacccaagtacctatgtatgagcaggcagcagcagggcatggccccatctctccttttagcctctgtgtttcattaggcattcatcctgccaaccagggcaggcccggcgtctgggctctgggaacaaatggggcccacatcctggagtggcaaattttgggggatgcgctacctgtcccagcgggccctgtgcctccaacccagagctccccacagacctggtgtaatttcacaagggccatccctttccccaggcttccctgagggaggcggaagtttgaacccttatgtggggttcattgggctagggtagtggtatgaggtttaaaactatttaaggattaggaggagaaagagtcttcaggaaactcttgtttcactggactctgcagcctgcagaactggggcaagggtaggagttccagtaggggaaggagcaggtagactcttcagctgcctcagctgggactgaagacctaagctgattctctttcctctccactcctaagaagcaattttctgttcctctccttccaccactttttactttctgctatctcccatctcccgcttcccttccatttcctttctagaaaaccctggtatttagctcaggccaaactgcctcagcagaaaggtggccttggacaaaactggtccaagaatttgaagtggcagtacttgcggattggctctgtccagcaaggcctcagctgcttgttgcgtctgctttccctcccctaacagaagggtaccctggcttattcaggggactccttagtccacactgtgtcacctgcatgccttaatctttcattgctggggtgtggccttgggagatcctgggccagcccctccacacatctccctaagtcagagtggctgctggccctggtagatttgacttgctcttgcctcactcgacctccaaagtgggactgaagacagtggtcaagagacttgagttcgggacagtaagccaggggttaaggttctttcctttttttgaaagccaaagacccagtttgcattgtgctgctgcattcatggttagaagctttccatgcctaggttctagggaatttatttttctatgtgtatatattttcaaactttgtttcctgggtactgggcatgtgcctgtctgagccccaggtctgtctacaccccaccattcattctgtctgtctgttccctggacactgcctaaaagggtctcaagacagtgccctgtgggttcctaggactagggcccatcactgttctcttctgctgggaaatgcagctttaaaatggctaaccacagcagagggcagatgcttgatagattatcttttccttgctttcttgtttctgttttgaaagtgaaatggggttttaaattgttatttaaactctttttccaaataaaggtttaccttttttcccccc

SEQ ID NO: 62234 - DNA, 4130 bp, Homo Sapiens
ggaactgtctggggacgaccaaggggatgaggaagaggatgaccacgcctatgagggcgtccccaatggcggatggcataccagcagcctgagcttgtccttgcccagcacaatagctgcgccacaccccatggacgggccgcctgggggctccacccccgtcacaccagtcatcaaggctggctggctggacaagaacccaccgcagggatcttacatctatcagaaacgatgggtgagactggatactgatcacctgcgatactttgacagtaacaaggacgcttactctaagcgctttatctctgtggcctgcatctcccacgtggctgccatcggggaccagaagtttgaagtgatcacaaacaaccgaacctttgccttccgggcagagagtgatgtggagcggaaggagtggatgcaggccctgcagcaggccatggctgagcagcgtgcccgggcccggctctctagcgcttatctgctgggagttccaggctcagagcagcctgaccgcgctggcagcctggagcttcgtggcttcaagaataagctgtacgtggccgtggtcggggacaaagtgcagctctacaagaatctagaggagtaccacctgggcattggcatcaccttcatcgacatgagcgtgggcaacgtgaaggaagtggaccggcgcagcttcgacctcaccacgccctaccgcatcttcagcttctctgctgactcagagctagagaaggagcagtggttggaggccatgcagggagccatcgctgaggccctgtctacctcggaggtggccgagcgcatctgggctgcagcccccaacaggttctgtgctgactgcggggctcctcagcctgactgggcctccatcaacctctgtgttgttatctgcaagcgctgtgcaggggagcaccgtggcctgggcgctggcgtctccaaggtgcggagcctgaagatggacaggaaggtgtggacagaaacacttatcgagctcttcttacagctggggaatggcgctgggaaccgcttctgggcagccaacgtgccccccagtgaggccctgcagcccagcagcagccccagcacccggcggtgccacctggaggccaagtaccgtgagggcaagtaccgccgctaccacccgctctttggcaaccaggaggagctggacaaggccctgtgtgctgcagtcaccaccacagacctggctgagacccaggcgctcctgggctgtggggctgggatcaactgcttctcgggggaccctgaggcccccacgcccctggctcttgcagagcaggcggggcagacgctgcagatggaattccttcggaacaaccggaccacagaggtgcctcggctggactcgatgaagcccctggaaaagcactactcagttgtcctgccgaccgtgagccacagtggcttcctctacaagactgcctctgccggcaagctgctacaggaccgccgggcccgggaagagttcagccggcgctggtgtgtccttggtgacggggtcctgagctactttgagaatgagcgggcagtgacccccaatggagagattcgggccagcgagattgtgtgcctggcagtgccccctcctgacacccatggctttgagcacacctttgaggtgtacacggagggagaacggctgtacctgtttgggctggagagtgcggagcaggctcatgagtgggtcaagtgtattgctaaggcattcgtgcctcccctagccgaggatctgctggcccgggattttgagcggctgggacgcctaccctacaaagctggcctgagcctacagcgggcccaggagggctggttctctctcagtggctcggagctccgtgctgtcttcccggaggggccctgcgaagagccgctgcaactacggaaactgcaggagctttccatccagggggacagtgagaaccaggtgctggtgctggtggagcgaaggaggacactgtacatacagggcgagcggcggctggacttcatgggttggctgggggccatccagaaagcagccgccagcatgggggacacgctgtcggagcagcagcttggggactcggatatcccggtgatcgtgtaccgctgtgtggactacatcacgcagtgcggcctgacctccgagggcatctaccgcaagtgtgggcagacatcgaagacacagcggctgctggagagcctgcggcaggatgcgcgctctgtgcacctcaaggagggcgagcagcacgtggatgatgtttcctcggcgctcaagcgcttcctgcgcgacctgcctgatgggctcttcactcgcgcccagcgcctaacctggctggaggcctcagagattgaggacgaggaggagaaggtctccaggtaccgagagctgctggtgcggctgccccctgtcaaccgggccacagtgaaggcccttatcagccacctgtactgtgttcagtgcttctcagacacgaaccagatgaacgtgcacaacctggcaattgtgtttgggcccacgctcttccagacagatgggcaggactacaaggctggccgtgtggtggaagacctcattaaccactatgtggtggtgtttagtgtggatgaggaagagctcaggaagcagcgggaggagatcactgccattgtgaagatgcgcgtggctggcactgccagtgggacccagcatgccggtgacttcatctgcacagtgtatctggaagagaagaaggcagagactgagcagcatatcaaggtcccagcatccatgactgctgaggagctcaccctggagatcctggatcgccggaacgtgggcatcagggagaaggactattggacctgctttgaggtcaacgagagggaggaggcagagcgccccctgcactttgcggagaaggtgctgcccatcctgcacgggctgggcacggacagccacctggtggtgaagaagcaccaggccatggaggccatgctgctgtacctggccagccgtgtcggtgacaccaagcatggcatgatgaagttccgtgaggaccgcagcctcctgggcctgggcctgccctcaggtggcttccacgatcgctacttcatcctcaacagcagctgcttgcggctctacaaggaggtccggagccagaggccgtggagcggggcccctgagaccagtcaccggcctgagaaggagtggcctattaagagtctcaaagtctacctgggagtgaagaagaaactcaggccacccacctgctggggcttcacagtggtgcatgagacagagaaacatgagaagcagcagtggtacctctgctgtgacacacagatggagctccgggagtggttcgctacctttctgtttgtgcagcatgacggcctggtgtggccctcagagccctcacgcgtgtcccgggcagtgcctgaggtccggctgggtagtgtgtcactgatcccccttcgaggtagtgaaaatgaaatgcgccggagtgtggctgccttcaccgcggaccctctgtctcttctgcgcaacgtctgagcacaggagcccatccttggctctaggattccgccgctggaagccttctgttcagacaccccttatgctccaaggcctgatgtgagccagcggggggtgcatgggaaactgcaccccacaacccacatcctccatcctgactgcagcatggggttccccggcaggggtgggaggcagcaggggtcagcctgggcaggaacctctcccaactctgtccaggtgttcagacctcttggcccaacctgctcaccccaccgggttcactgtccttgtggggctggagagatgggcataagtcaggaacttgggaggaccaccaccctttcagaggcgtgaggccctggggccctgccggaagggagccccctgctcctcccaacaaactccagaacagcagaaagcgggtgctgtagaggagcactcagctcacggggagggagctcttggctgagcttctacagggctgagagctgcgctttggggacttcagccttccttccagtctgggctgagtggggggtccagactacctgatgccccttccccaatttggggactttttgataatataaatatatctgtatatttt

SEQ ID NO: 62235 - DNA, 4469 bp, Homo Sapiens
ggagttgtcagtcgcgcagcccgtggccacctagacccgaggtgcgggcgcctgcgaagggcccccgcggggtggccggggccgccggggcatgcagcgcgggggcgcggctcggtgacgccgcgggcggggacccggcatccgggcaggctgcgcgcgggtgcggggcgagggcgccgcggggactgggacgcacggcccgcgcgcgggacacggccatggaggacgcgggagcagctggcccggggccggagcctgagcccgagcccgagccggagcccgagcccgcgccggagccggaaccggagcccaagccgggtgctggcacatccgaggcgttctcccgactctggaccgacgtgatgggtatcctggacggttcactgggaaacatcgatgacctggcgcagcagtatgcagattattacaacacctgtttctccgacgtgtgcgagaggatggaggagctgcggaaacggcgggtttcccaggacctggaagtggagaaacccgatgctagccccacgtcacttcagctgcggtcccagatcgaagagtcgcttggcttctgtagcgccgtgtcaaccccagaagtggaaagaaagaaccctcttcataaatcaaactcagaagacagctctgtaggaaaaggagactggaagaagaaaaataagtatttctggcagaacttccgaaagaaccagaaaggaataatgagacagacttcaaaaggagaagacgttggttatgttgccagtgaaataacgatgagcgatgaggagcggattcagctaatgatgatggtcaaagaaaagatgatcacaattgaggaagcacttgctaggctcaaggaatacgaggcccagcaccggcagtcggctgccctggaccctgctgactggccagatggttcttacccaacgtttgatggctcatcaaactgcaattcaagagaacaatcggatgatgagactgaggagtcggtgaagtttaagaggttacacaagctggtaaactccactcgcagagtcagaaagaaactaattagggtggaagaaatgaaaaaacccagcactgaaggtggggaggagcacgtgtttgagaattcgccggtcctggatgaacggtccgccctctactctggcgtgcacaagaagccccttttctttgatggctctcctgagaaacctcccgaagatgactcagactctctcaccacgtctccatcctccagcagcctggacacctggggggctggccggaagttggtcaaaaccttcagcaaaggagagagccggggcctgattaagccccccaagaagatggggacattcttctcctacccagaagaagaaaaggcccagaaagtgtcccgctccctcaccgagggggagatgaagaagggtctcgggtccctaagccacgggagaacctgcagttttggaggatttgacttgacgaatcgctctctgcacgttggcagtaataattctgacccaatgggtaaagaaggagactttgtgtacaaagaagtcatcaaatcacctactgcctctcgcatctctcttgggaaaaaggtgaaatcagtgaaagagacgatgagaaagagaatgtctaaaaaatacagcagctctgtctctgagcaggactcgggccttgatggaatgcctggctcccctccgccttcacagcccgaccccgaacacttggacaagcccaagctcaaggccgggggttctgtagaaagtcttcgcagttctctcagtgggcagagctccatgagcggtcaaacagtgagcaccactgattcctcaaccagcaaccgggaaagcgtcaagtcggaagatggggatgacgaagagccgccttaccgaggcccgttctgcgggcgtgccagggtgcacaccgacttcacccccagtccctatgacacagactcactcaagctcaagaaaggagatatcatcgatataatcagcaagccacccatggggacctggatgggcctgctgaacaacaaagtcggcacgttcaagttcatctacgtggacgtgctcagtgaagacgaggagaaacccaaacgccccaccaggaggcgtcggaaaggacgaccaccccagcccaagtctgtggaggatctcctggatcggattaacctaaaagagcacatgcccactttcctgttcaatggatatgaagatttggacacctttaagctgctggaggaggaagacttggatgagttaaatatcagggacccggaacacagagctgttctcttgacagcagtggagctgttacaagagtatgacagtaacagcgaccagtcaggatcccaggagaagctgctcgttgacagccagggcctgagtggatgctcaccccgagactcaggatgctacgaaagcagtgagaacctggaaaacggcaagactcggaaagctagcctcctatctgccaagtcatccaccgagcccagcttgaagtcttttagcagaaaccagttgggcaattacccaacattgcctttaatgaaatcaggggatgcactgaagcagggacaggaggagggcaggctgggtggtggccttgccccagacacgtccaagagctgtgacccacctggtgtgactggtttgaataaaaaccgaagaagcctcccagtttccatctgccggagctgtgagaccctggagggcccccagactgtggacacttggccccgatcccattccctggatgaccttcaagtggagcctggtgctgagcaagacgtgcctaccgaggtgacagaaccgccccctcagattgtacctgaagtgccacagaagacgaccgcctcttccacgaaggcccagcccctggagcgagactctgctgtcgacaatgcattgctactgacccaaagcaagagattttctgaacctcagaaattgacaactaagaaactggagggctcaatcgcagcctctggtcgcggcctgtcaccccctcagtgtttgcccagaaactatgatgctcagcctcctggagctaaacacggtttagcaaggacgcctctggagggccacagaaaaggacacgagtttgaaggaacacaccatcccctgggcaccaaagaaggggtagatgctgagcagagaatgcagcccaaaattccatcacagcctccacctgttcctgccaaaaagagcagagaacgccttgctaacggactccaccctgttcccatgggccccagtggggccctccccagtcccgatgcgccatgcctgccagtgaaaaggggcagccccgccagccccaccagccctagcgactgtcccccagcactggctcccaggcctctctcagggcaggcgcctggcagcccaccaagcacaaggccgcccccctggctctcagagctccccgagaacacaagcctccaggagcacggtgtgaagctgggcccggctttgaccaggaaggtctcctgtgcccggggagtggatctagaaacgctcactgaaaacaagctgcacgctgaaggcatcgatctcacggaggagccgtattctgataagcatggccgctgtgggattcctgaagccctggtgcagagatacgcagaggacttggatcagcccgagcgggacgtcgccgccaacatggaccagatccgggtgaagcagcttcggaagcagcaccgcatggcgattccaagtggtggactcacggaaatctgccgaaagcccgtctctcctgggtgcatttcgtctgtgtcagattggctcatttccatcggtctgcccatgtacgccggcaccctctccaccgcgggcttcagcacactgagccaagtgccttctctgtctcacacttgccttcaggaggccggcatcacagaggagagacacataagaaagctcctatctgcagccagactcttcaaactgccgccaggccctgaggccatgtagccaggcccggaatgggcctctctggacaagagccaccctttcactgtgcatatgatgctgatgcaattcctccatcatctctggacgtgcagaccagatccagaagaaaggcctggcgtgtggccaaacagcgtgaaaccttggcacaggactgaggatcctctcctccagaaaagccccctcgaggaaataaattagtgcggttctctttgacctccaaagacaagacaagcacttatttttattttcagaagacaaaagaaccaagatgccaactggctgcgaatgctctatctccagtctgtctctgtgtactggtagaggctgggaggagtagggggcagcctgttccatttctgatagtgcccttgctcttctgtctgtcatcttgcaggatgcccgagggccagatgggcttagctaggccaaagtaacagactcaagagttattgtacattactgaccacgctcatttgttcaaaagttagaacatctggctgcaccagg

SEQ ID NO: 62236 - DNA, 504 bp, Homo Sapiens
  misc_feature (455)..(455): n is a, c, g, or t
gcggccgcaccatgagcgacatccgccgcccaccccgccctgcccacgcaccccggccacaccttcatctccggcgtgacctttcccttcaggcccatccgctaggctggcccgtgtgtgccttctgcgctctcgctggacgaagcctttcgagatggaaggggtggccggactcccagaagagaacctcggggaaggggtcgggcagcccctccccgccggcagaaccgtcttggtgtcacggagtccaggtgcttcccacccggtcgcattctttgacatgcagattggatggtggagggaagagtccagcctctgccgagagcctgctgcgtgcatttttaaaagatgccgatcctgggagcctctgttctctgcgcatttcagacacagcctgtgtggcgaggagtgtgacggcaggagccacgggtgcaagcccgtgtgtctggcctctntcctcgtgaagacgatgtgtccccgccagaaaaagtgggctccttctgc

SEQ ID NO: 62237 - DNA, 561 bp, Homo Sapiens
  misc_feature (299)..(299): n is a, c, g, or t
  misc_feature (360)..(360): n is a, c, g, or t
  misc_feature (363)..(364): n is a, c, g, or t
  misc_feature (366)..(366): n is a, c, g, or t
  misc_feature (435)..(436): n is a, c, g, or t
  misc_feature (524)..(524): n is a, c, g, or t
  misc_feature (529)..(529): n is a, c, g, or t
  misc_feature (553)..(553): n is a, c, g, or t
tttttttttttttttgggataaaatttttgaatttatgttcaacatgtttcctgcagatttagtggaggaaaaatccacgcatacccccatcccaatccgcgagattttcttcaagatgccgcttctgttgttggaagagttgactgcctcgattctgcataagagtcccaaacactgagaactagggtgtcttccccttcctttccttccaaaaaggccagcagcctcaagcaagccaaagtcctttcctgttgaatgcgtagtcgtgtgaactccactgtcttcacaaactcagcanctggtggaagctctctgaagaagggagacaggatgtggggctgctctgacaccagcctttnaanntnacagaggaggtgagggcttgttggacgccatccctactttgagaggagacagaggaggtgcgtgcaganntatttcacagagagcggggtctcggtcaggaggggggttctgcttttcagacagtagggggagtggagctgatgctgctctcacacanccacnagtctcactctctcccacagcatnccacagat

SEQ ID NO: 62238 - DNA, 1064 bp, Homo Sapiens
aaaagtgaaagcaatgaggacctttttgggcttgtgccctttgatgaaataacggggagccagcagcaaaaagtcaaacagcgcagcttacagaaactgtcctctcgccaaaggcgcacaaagcaggatatgtccaaaagtaatgggaagcggcatcatggcacgccaactagcacaaagaagactttgaagcctacctatcgcactccagagagggctcgcaggcacaaaaaagtgggccgccgagactctcaaagtagcaatgaatttttaaccatctcagactccaaggagaacattagtgttgcactgactgatgggaaagatagggggaatgtcttacaacctgaggagagcctgttggaccccttcggtgccaagcccttccattctccagacctgtcatggcaccctccacatcagggcctgagcgacatccgtgctgatcacaatactgtcctgccagggcggccaagacaaaattcactacatgggtcattccatagtgcagatgtattgaaaatggatgattttggtgccgtgccctttacagaacttgtggtgcaaagcatcactccacatcagtcccaacagtcccaaccagtcgaattagacccatttggtgctgctccatttccttctaaacagtagatacttctgatggattctcggcattaactcctgtttcaaaaaagtgtgaacagttttatgaatttgaaagaaaatttggtagctctttatagcattcattcttaaagatcagtcagaataggtgatttctaaataaaccaaatagaagaatgaagtatctctacagggtagtaacttgattcctcttcaggagaaaagggagctaaattgcaagctctaactaagggtttctgctactgacatcacaacacagaaatgcaagtgtggtacttccagtgaaagcacatggcacctttctaggtgtgtagccactgagaagggacagtgaaactgttatttttgatatcagaatgtcatttttatgtgcatatccctaaaattagggttatttctacatacactagttcacttgt

SEQ ID NO: 62239 - DNA, 3583 bp, Homo Sapiens
  misc_feature (2924)..(2924): n is a, c, g, or t
  misc_feature (2946)..(2946): n is a, c, g, or t
  misc_feature (2973)..(2973): n is a, c, g, or t
  misc_feature (3077)..(3077): n is a, c, g, or t
cggcaggagcgcggagccgcgagccccgagccccgagcccggcgcctggctgagtagatgtccatgaggagccccatctctgcccagctggccctggatggcgttggcaccatggtgaactgcaccatcaagtcagaggagaagaaagagccttgccacgaggccccccagggctcagccactgccgctgaacctcagcctggagacccagcccgggcctcccaggatagtgctgacccccaagctccagcccaggggaatttcaggggctcctgggactgtagctctccagagggtaatgggtccccagaacccaagagaccaggagtgtcggaggctgcctctggaagccaggagaagctggacttcaaccgaaatttgaaagaagtggtgccagccatagagaagctgttgtccagtgactggaaggagaggtttctaggaaggaactctatggaagccaaagatgtcaaagggacccaagagagcctagcagagaaggagctccagcttctggtcatgattcaccagctgtccaccctgcgggaccagctcctgacagcccactcggagcagaagaacatggctgccatgctgtttgagaagcagcagcagcagctggagcttgcccggcagcagcaggagcagattgcaaagcagcagcagcagctgattcagcagcagcataagatcaacctccttcagcagcagatccagcaggttaacatgccttatgtcatgatcccagccttccccccaagccaccaacctctgcctgtcacccctgactcccagctggccttacccattcagcccattccctgcaaaccagtggagtatccgctgcagctgctgcacagcccccctgccccagtggtgaagaggcctggggccatggccacccaccaccccctgcaggagccctcccagcccctgaacctcacagccaagcccaaggcccccgagctgcccaacacctccagctccccaagcctgaagatgagcagctgtttgccccgcccccccagccatggaggccccacgcgggaccttgcagtccagccccccgagccttgcctctgggcttccttggtgaaggggacgctgtcaccaaagccatccaggatgctcggcagctgctgcacagccacagtggggccttggatggctccccccaacacccccttccgtaaggacctcatcagcctggactcatccccagccaaggagcggctggaggacggctgtgtgcacccactggaggaagccatgctgagctgcgacatggatggctcccgccacttccccgagtcccggaacagcagccacatcaagaggcccatgaacgccttcatggtgtgggccaaggatgagcggaggaagatcctgcaagccttcccagacatgcacaactccagcatcagcaagatccttggatctcgctggaagtccatgaccaaccaggagaagcagccctactatgaggaacaggcgcggctgagccggcagcacctggagaagtatcctgactacaagtacaagccgcggcccaagcgcacctgcatcgtggagggcaagcggctgcgcgtgggagagtacaaggccctgatgaggacccggcgtcaggatgcccgccagagctacgtgatccccccgcaggctggccaggtgcagatgagctcctcagatgtcctgtaccctcgggcagcaggcatgccgctggcacagccactggtggagcactatgtccctcgtagcctggaccccaacatgcctgtgatcgtcaacacctgcagcctcagagaggagggtgagggcacagatgacaggcactcggtggctgatggcgagatgtaccggtacagcgaggacgaggactcggagggcgaagagaagagcgatgggagttggtggtgctcacagactgatccccggctgggtgggcctggccccttctcctctggggaagaccttgtcccaactcgatgggcacagccagccaacctaagactatgttggtacttggacttgttcgtgccccagaagatgggcaaagctgtgcacttggcagatacattcatgaggggagaggcgccctcccttcctgaggagcgtgttggcctgggtgggcaggaactgcagtatggccatgggctgagcaggctgagcacctcagcctttagggcttatggccaggggacactgtatgactctcctctcctgcaggtgtctatccacctggggtatggcatctaccgacctgtctccctggggtcacatgctttgtttccattcttgtcctggctggaccagccactgtgggaccaacacccctcccacactcccccagactgctcgtctatcaccaggatcgctttgtactttgtgcaaaagggtctggctgtcccttgctgttttcatctctgccaagcctattgtgctctggctgctgtatgtgtgcgcgtgcacgtgtgtgtgtttcatctgttcattcactgcacaagatatttattgagtgcccactacgtgccaggcactgttgctgagttcctgtgggtgtgtctctcgatgccactcctgcttctctgggggcctctttctgtgcttctctttgtccccaaattgctacctctttgtcagtctgggtgtctcaggttctgtgtgtccttgtgtgcatttctgtctctctctgtcctcgtctctctgcaaggccctctatttctctcttaccttggtgtctgtcctttgccccctgtgccctctggattctctgggtctatgtaggcccctggtctgccctgggctcatcagccttcctgacctcctcctgccctccccttcactccctccctggctctgccagtcggttcccacggagccatttttagctctgatcagcatgggaatgtgcctcggcctccaangggctttgtcctggtgcccccncccctggtcccaacctgatcccacganggagttgggacaggaggattgatggtgctccccttcctgccagcgttagaggccctggagaggggctgtccatggcagctggtctttattcctccctcatgagnacagggtcgggggggtccccattcttggaagaggttgagaagactcctgggcttcagcctctcccacccagccctgcccctcacctgcctgccctcccctcccccactctatactagggactggatctcagcctctgatccagttccacaaagtttgttccctaaggaaatcaaatcccattgtcacctaactctgaagatctaaatagcccttggatcagtacgggaaccccaaatccacagggccagatgtggagtctgtgtctgcccccgtcttctctccatcctcaaagccccctcttctctccaggctgtttctttttttatgactgtaaacatagatagtgctttattttgttaataataagataatgatgagtaacttaaccagcacattctcctgtttacactcgggggatttttttgttttctgatgacataataaagacagatcatttcagaatctggcccttgtgcaggggaggagggaggctggcctaagtcca

SEQ ID NO: 62240 - DNA, 4221 bp, Homo Sapiens; identical to SEQ ID NO: 22366

SEQ ID NO: 62241 - DNA, 127168 bp, Homo Sapiens
gatctgagcatgatctcccgggtgttgcctgtcagagtggcctcctgcactgcctccacgtgcaacctgcggggacccttcccccacccaccagtgtacagggcctgggagctgccaggctggtggagcagtcagggtccccacaggaagcagatggggtgctccagtgggaccagccctggaagggttatttacaaagggctgggcagggcatggggcatccatgagaggcggtgtgggacccagggctggaggcagtgccagcggagctgcgatggcccttagtcctagagcatcaagggaaagggcagattggagcccagaaagaaggggtcatggtcagaagccacaggagagggctgcggaccacccaggaggggcacagctaaccagggaccctcctgacacccctcccctccctcactctatcctcccgtctggctccccactggccaaagccaccagaagccatggggtagggaaccctcccaggcagggagcaggcagagtctgtttatttttcctttctgcctgatgacattttagacgagaaggtttattggtctaattcaccttcagcaaaaccaaagggtacattggagtcggacgtttttccaggacggtcttttcaaaggcaggcacttgtacatttgtgtggcgctccgccaagcacagatgaacaacacagcccccacgcccacagccacgccgggaggtttggggccgagtggagcattttcagtcgttgcttcaccccaggctggttttttgtttgtttgtttgtttgttttttccctcaaggctggtttgaaggtgtgtccacaacttcaaaagggtggacatgcctgacggaaaacgttctccccacttgagaatcggttttgccctcattatgcttaagtgtttgctgctcctccatcgccctcggcatcctgggtgtttgggaagtgtggggagaagcttattccccacggagacagtgctagggaggggccgtctggaaggatggggatcctcggggctgcactgagcgggtcattcccttactgtgcttccctgaggctgcctgcggggatcacgtttagaccccaccttgttccaggagctcctggcagggtcggggacacagacgtgccagcaagatgtttaacggggccctggggaagcaagggtggctcgtgtccacctgacctgggcatcttctaaagccagctgagcctgcccagagcctggagcacagtctcctggccagctggggaggcagggacatgcaggggaggtagtgcctgacatggacaccaggcagtgtggcccgctggggacccgtgagtgagctgtgcagtgaggcagtgaggtggagcgccaggaggcccagagctgctgggagatcccgcatgaagcagatgtgggaggcggtgagcagccgcgtcaggatttcccacctgggcactgccgccccttggggacgatgacccttcattgtgaggcctgttctgggcagcattcctgacctctggtcactagactccagctgttcccctaacccggttttgacaaccaagaggtcttcatcattgtcaggcccctgaggtcatgccctggatgagaaccactgggctagtgagacgggagctcagctagcgggagtcctggtagcttcaggtggagatgcgagaccctgggccggagcttgaggcagcagcctctacgtgggcagcaggtggtctccaaggggcactcggcatccgtcacctggccggggacgatgctgtgctggtcgcgatcgccatgctggccacgggtggctagaccacacgcaatgaagccccatgcctgagctggctgctggagtccttgggactctgcctcggcaatttggcttcctctggttctggtgattctgagatggcgcggggctgtctttggcatgctgcggaaagtgcttttataaagacagcatgaggcccggttgcaacaaaccggaggaccggcctctgcttctgttgagcagaggatgtaagtgctttgagatttccatgaccttgagatgaccgctaggtcctgctgtcattagggattgctcacctgttgcttgtcaggtcattcaaaacctcttgggtctgtgctgcacattaaaccccagagtcccaaggagagtgggagatgtacccccggagcacccctggggtcgggggagcttctccgtttctgcacatgttctaaaaactcgaggacttccacccagacacttgggtcagggtgaggttttttgatgggaccctttctgggctctacagatctgccgtggttagacagttgtgtggtcccctgggtgaggccacgtagccttccctttccctccctccttctctcccttccatgttaattgagtgccaattacacgcacagaatccaacttacagaaacgaacttggaaggtatttaatagaatataaggtcctccgacagcggaacgtcaacaaccattgccaacagtgcggtggggttctgtgcggtgatgaggggaggagctcccaggatcttgttactagattttaaaagccatagttgtagggtgtattttatttattttatttttgagatggagtcccgctctgtcgcccaggcgcctttgttgctgtcttggctcactgcaacctctgcctcccaggttcaagcaattctcctgcctcagcctcctgagtagctgggtttacaggtgcgcgccaccacacccggttaatttttgtacttttagtagagattggagtttcaccatgttggccaggttgttttcaaactcctgacctcaggtgatctccctgccttggcctcccaaacagttaggattacaggcataagccactgcacctggccgagcctggttcttttagtggagggtggcatttagaaatccagatctgggtgcttggtgtgctcattgctttggggtgtctcactcccagtctctcttactgggcagagctaggacatagacgtctgtgtaggtgtgtgtgtgtgtacatatatacatgcacacacacttcatattgatctttttttcctatttatctatcactccctattggaagccatgaacttcactggagcactgctgcgtttgctctgctctgcacattcacatccccctgatgccgtcccagcccattcgtgctgcctggtaacagaacacacaaggctgggtacttacaaaccacagagattgatttctctgagtcctggaggctggaagcctgagcacctgcaggtttggggcctggcgaaggcccattcctcataaatggcagcgtctggggtcctcacatggcggaagaatgcaagacagtggacccactcccatgggcccttttattgaggcccttatcccattcttgaggggctcaccctcatgactttaccacctcctaaagggcccatctcttgaaaccatcccattggccatgaagtttcaacacgtgaactttgggggacacttcagaccatagcacccccaaattgctatattgaaatcctcacccccaaggtgatagtattaggaagtgcagcctttgggaggtgatcagggtctcccgcgagtggaatgaatgtccttataaaagagccccaagaccgcccctcaccccttctgtcatgtgaggatgtggtaagaaggtgtggtctaggaaccgggtggcgaacccttgccagacgttcaatctaccagcaccttgattttggactcgcagcctccagaactgtgagaaacagatgcatgttgtttacaaggcgctcagcctctgttacagcaacccaagcagagttagaggtcattcttgttgtttttcctcttctatatgtgtaactctttaccagttagaaaccttgttctcattttcctcagtatagttagtgatttttctcaaccttccattatctaaacaaccttccaacctcaccaggctgcagcttcactcagccccctccccggctgcgccctccccagccttgctgctctgcctcactcagccctgatggtactagccgactccagcagttggagatgggtctgcatagagacgtgactgaaatatttcattattcaaaaaagaagggaggaagggaagaaggaaggtttttaaaacaaatttaaagggaataaaaatccaaaataacaaaagctgtgggctgcagctaaagcagtgctgagagggaaatgtatagcactaaatacttacattagaaaagggggatgtttcaaatcaataatctgagcttctgcttcaagaacctagaataagaacaaaataaacccaaagccagcagaaagaaggaaataataaagataagagcagcagtcagtgaaattgaaacagcaaaacaatagagaaaatcaatgaaacaaagagccgattctttaagattaacaaaatcttttcaaagcgggggaaaacttctagcgtgactgataaggaaaagagaagacaaattgccaatatcaggaataaaataggctttgtagatgttaaaaagggtaataagggaataattaataaaaagaactctacatgtgtacatttaaaacccagatgcacggaccaactcctcaaaaaacacaaactactacaactcacccaagatgaagtcagtcctttgaatggctgtatacactattgaggaaatagaatttgtagtttaacattcccaaaaaggaaatctccgggcccagatggcttcacaagagaattctaacaaatatttaaagaattacatcaattctgcaacatctcttccagaaaatagagagcacttcccagttcagttcatgaagcattaccctcattccaataccagatgaagacagactaaacaaaaccacagaccactgttcctcatgaatatagatgtgattcatgttgacacagaaacctgcacacaagtggtacagcagcttttcataatatccccaaatgggagacagcccagatggccgtcactgggtgaatggttaaacaaactggtatgtccgtaccatggaacagggaatacttcttagcaccaaacaacttctcactctgctgagtgggaaaaggcaacccccaaaaggaccatactatgtgattccgtttgtatgacattgtgtttttttgtttgtttgcttttcagacagagttttgccttgtatcccaggctggagtgcagtggcacgatctcagctcactgcaacctccacatcctgggttcaagtgattctcctgcctcggctcccaagtagctgagattgcaggcacacaccaccatgctcggctaattttgtatttttagtagagaaggggtttcaccatgttggtcaggctggttttgaactcctgacctcaagtaatccacccatctcgtgcttccaaagtgttgggattacaggcataagccactgcacctggcatttatgacattcttaatacgacagaataacaatggaaaacagagtagtggttgcctgggattgggctggggacaggagggaagtgggtgtggctgtgataggacacaggcagggtccttgtagtgatggaacgttctgtctggactgtgtcagtgtttgtacctgggtttgatattatactatctttttgcagggtgtttccatggatggaaactgtaaggggtacatgggatatctctgtattattgttttacaattgcatgtacctctaaaattgtctcaaaatagaaagtttcatcaaaataactttcaggccaggtgtggtggctcacgcctgtaaccccagcactttgggaggctaaggtgggaggattgcttgagcccaggagttcaagatcagcctgggcaacatagggagaatacatctcttcaaaatacaaagtaaaaaaaaaaaaattagccgggtgtgtggtgcatgtgcctatggtcccagctgcttgggaggctgaggtgggaggattacttgggcctggaaggtcgaggctgttgtaagccatgattgtaccactgcactccaacctgggcgaaagagtgagactcttgtcttaaaaaaaaatttttttttaagatttacaatgtttgctggtatatacatatgtttttctgaaggataaccctatgctctccaaaacaacaaacttgtgttttttttctttgtttgttttgagatgcagtctcactctgtcacccaggctggcacaatctcggctcactgcaacctccgcctcctgagttcaagccattctcctgccctcagcctcccaagtagctgggattacaggtgcgcaccaccaccacgcctggctaattttggtatttttagtagagatgggatttcaccatgttggccaggctggtctcgaactcctgacctcaggtgatccaactgcctcagcctcccaaagtgctggattataggcgtgagccaccgcacccggcccatacttgttaatagtgctcatcggatagctttttcaaggtcataaactgcctaaagcatggagtctttttttttttttttttctgagacgaagtttcgctcctgttgcccaggctggagtgtaaaggcgcgatctcggctcaccgcaacctctgcctcccaggttcaagcaattctcctgcctcagcctcccgagtaggtgggattacaggcctgcaccaccacgcccggctaattttgtatttttagtagagacggggtttctccatgttgaggctggtcttgaactcctgacctcaggtgatctgcccccctcggcctcccaaagtgctgggattacaggcgtgagccaccgcgcctggccagcatggagtcttgatcagatatttattattcctggtgatgcagtggtttggctgctggttcttctggtctatgcgattcagccagggctgtgtgaaggcctcactcatatgacctggccgttagccatggcagctggggcctctcatcttccagcaggccaccctggccgttcacttggtggcagggggttcctagcagccagagagggcgagtcccagtgcacggtgctttccaggccttatctcgtgtccttgtgccctgatgtcctgttgcccaggtcatgtggccaagcccagcctctaggtagagacatggaccattggtggcaagagccaggaggtggcattgcagaggccagacgtacagtgcaggaggcatcatcgtggcccttatagcaaaggtggataccaatgggaagaagaatgcaaagtgaggtggatttcgtgttccttttatgcccttctgtgccttcttacatgcacttgagttctttgtatttaaaaaaacaatatagcagttatctgggtcatgggactatgagccattttttttttttttgagatggagtctcgctctgtcgcccaggctggagtgcagtggcgtgatctcagctcactgcaagctccacctcctgggttcacaccattctcctgcctcagtctcctgagtagctgggactacaggcgcccaccaccatgcccggctaatttttatttatttatttatttattttttattattattatttttttttagtagagacggggtttcaccgtgttggccaggatggtctcagtcacctgacctcgtgatccgcccccccttggcctcccaaagtgctgcgattacaggtgtgagccactgcgcccggccctggttttttcttttaaatattctgtttaaaaaaatcatttgagggccaggcacggtggctcacgcctgtaatcctagcactttgggaggccgaggcaggcagatcacttgaagtcaggagttcaaaaccagcctggccaacctggcaaaaccccatctctactaaaaatacaaaaaaattagccgggcgtggtggcaggtgcccataatctcagctactcgggaggctgaggcaggagaatctcttgaacctgggaggtagaggttgcagtgagccaagaccgtgccactgcactctagcctgggcgacagagtgagactctgtctcaaaaataaaacaaaaaaaataaacaaaaagataattggatatacagaatatgtaagataaagaagctaaacttttacaaagttaattaagccttgcaaagtatgtaaaatccttatgataaaggaggtggccatgcaggctggtaattttgccctcagggccttgttggctttgattctgtctcataggaagttccgtgtttaagaggaggggatggggatgctccccaggtgttccgtggctgcgtgaaaggtcacgcccttcgtgagcttccctggcttctccagccccagcaggtgttctgtcaaatccactagtggggcctctgctaaggcagtctgcacgtgctcccatcagttggtgaagtcggcggccactgcctttacttaccctgcatctcggactcaggatgttcctgcctccttgagcccaagtgatgggggcatagaagccgatagaggggtcttcaggtggctagcgagctctgccagaaaggtggtgcagggccctgcttgcaggcgctgtggcaggtgggggctgccccgatgctgctatgtgatgtgacagataagtcacttggtttccgttcccaaacacaggcctggtcaggtggtagaaagtcacctgctatggaaacgtggtgattctcggaggcaagcgccgccccaccctgggcctttgtgttacagaaccctgttatggaaagtcgccccagggctggagcagccctcagtttcacgcccggctgaggttgcttcctgtctggcatcatagccactgtcctccagcagcctctgtctcacccccatccttcccaccccacccaacccctcactgctggggctctgagatgcactgtgccacggctgcctccctcccctctctgggctcctggcctttcccgcctctacccccccagcacctcggcagggagggtggtggtggctgaagtgtactggctgatgtcctgtcttgtgccaggctcatgtgtgtcccccacgtgatcctcatgttagctcctggaggaggaggtgctgttgctgtttcacagatgaggaaactgaagcacagagtagatgatgggagggccgggtttaggcggagccatggacccagcatctctcacccacccgtgtatccgctgctctgggacgtgccatccgagggctgtcgcgttttcctgccgtgaccatccccggcccccaccttctccctgtcttatccaggcgcttccatgctctgtcccccaattcagccctctccccaccttcaccttatcacacagatactgagcatgtcaccccttagtgggatgcaggccaggagggagggaggctggtcagaaaggtcatcagggcaagaagaggcagggggactaaggaagggggtcccgcgggcccagatcgaggacagagaggggactattaggtctttacaggagcaggccatgactttgtatgagcatgtgttagtgtgcaagactgtgtgcaaggtgagtgtgtacaggtgagtatattgtgcaagcatgagcacgagtatgggtgagcatgtgtgcacacaagtgtgtgctagtatatctgtgtgtgcacatgcaagtatgaatgatgtgagtgggtgtgtccacgtgtgcacacgtgtgagtgcatacgtgagtgggtgagtgcacctgggtgagtatgcatgtgtgtgggtgtgtgcacgtgtgtgaagaagcacacgtgtaaatgtgtgggtgagtgcacatttgagtgggtgagcatgcacatgtgggtaaatgtgcacatgagtgcacgagtgggtgagtgcatacgtgagtgcacatgagtggctgagtgtgcatatatgagtgcacgtgtgtgggcgagtgcatttgagtgtgggtgagcatatgtgggtgtgaatgtgggtatgtacgagtgtgggtaggtgtgcacatgtgagtatgaatgagtgcacgtgtgggtgagggcacatttgagtgggtgagtgtatatgtgagtgtgaatgtggatgagtatgcacgagtgtgggtaggtgtgcacatgtgagtatgagcgcacgtgtgggtgagtgcacatttgagtgtgagtgtcggtaagtgcacgtgggttttgagtatgcacatgattgtgggtgagtgtacataagggtgagtgcacgtgtgcgtgggtgagtgtgcatgagtttgggtaagtgtacgtgtgagcgtatgaataaatgcacatgaatgtgagaaggcacgtgtgggagtgcacatgtgggtgtgaatgcgggtatgcacgtgagcgtgggtaaatgtgcacgagtatgagtgcatgtgcatgggtgagggcgcatttgagtgtgagtggtgagtgtgcacgtgtgggtttgagtatgcacgagtgtgggtgagtgtacacacgtgagtgtgagtgggcgagtgtacacatttttggtaagcttttttgcttgctcagaaaagtcattttcgagggaactgtagcccacctgccatccttcctgaagttttctcctgtttttcccgggacactcaggctactgtgttgtgggggctgagctcagaggccccatcccaggcactctgtcccggtgcccgtgtggaggaggcaggccccgggaggctgcagctcggaagtgtgcgttcctccttgtcccgcttgtcaggatttctctagctgggagtagcattaggattgagatgcctcccacccatagaggaacatgagtgagcttcttgttgagtgcttgaggagggtccctcaggttgtaccaagcaactttttgcctataaaatccccaagagaaggaacgtgttgctttccaagaaggcgctgtatctcactgcattttggcccttcatttgtcattggcaagaagacccccctctgagcaaatccccatataattcccaggctcccaaaacacctgggggagtagcctggccgcagaggtgacctggtcccgatggctgagccccaaaggagcagggctgagatggccctggcttcctcccatggaactgggggctttggtccagggtctggctcagtgggggctggcacggtgccctgctggatcatttccagaacaaaattaactaccacggggatcatggagctctgtaggaggagcttatctccgtccagtgctgaacacgcatgcccaggggactcctgcctccggacccacggttcttgtgtttccaaatgtactgtatacgtccatcaggaaagcacagagctcctcacttttgtctttggccagaatcatcggggaaacgggttagacccccttgcctgagaaataaaaggctttgtgtgatttctttaagaatctctaggtgaccggttggttctgacctttgttgaaaacttttctaatgctcccacaataagcctaatagcaccgtgcattactttcttggatagttgaataaatggaggaaatggcgggccagtgcccgaactccaagctgcaggtggctttgcgtcttagctcctggagaagagcctgcgggttcagcggagaggctaattgcacgagttgcttacttgctgcttttttctttaaagatgtaaaaatcaactttatgattttatgttatattttattttaatttatttatttatttattctgaggcggaatcttgctctgtcgcccaggctggagtgtagttgtacaatctcggcccactgcaacctccgtctcccgggttcaagcgattttccacctcagccacccaagtagctgggattacaggcccccaccaccatgcctggctaattttttttgtattttttcagtagagatggggtttcaccttgttggccaggctggtcgcaaactcctgactgcaagtgatccgcccacctcggcctcccaaagtgctgggattacaggcgtgagccactgcgttcagcccctgtattatgttattttaatatagggaagtattaaaacagcaaaacttgagaaaaccacttgcatgttattttgcttttcttcacatcttttcaagaagtaacaatagcaggcatggctgcaagcacttcacacatgtcattcatgtcgtcccacgaggaagatgctatttttacccccagttgtacagccaagtcctggcatgcagggaagtcatgtgactttcccaagtaggggcaggatatggacccttggctttaaggaggtgatgtccattggatgctgtggacactgctgtcctgtgagccccccgccggccttgggcccgcccagctggactctgagttgagaatgaggatgatagtaatatcagccacgccagctcagacactgcacagtttcagatccgtcctttcatttcattcccaaacagccctagagatagcagctatgcacttaccccctttctagaagagtctgcctaggctcatagagtatgtcttctgccccaggtccctggcaggtgagggattcaggagcacctgtccccctcagccagagttgggcagaggaacttgagttccccttacaacctgggatagtgtggagctgccctccccacccggtggcccagtggctcagttgggcttccagacggtttgctgctgacagccctgggggaataccgcacccttcgagccaggtcatcaaaagcagccggcagcccctgtgtagagggtggctacctggcggaacagggtcctgttacctgcctaggggtattgggaccaccaggaagtagcagctcggtctgaggtttgcattctggcaaagtcctgtccgaggctcctgggaggccagtttgaattctggaaggctgcgtgcatctgcgtgaatttgctcctcgtgacccttcccaccactttcccaagcagcttcggagaactgcagtggctgcctccgagggagagcttgtcgtctccatgccagaactggcacggggtcttgcccacatttcctggggcatttgtcggccagacaggcctgaactttgtcatcttgagaaatgacagcatggaacgttcagcgctgcagtttgactctgtacagacattcctgaggtccagccatctgtgaattctttgatatgaacgttggttaatcatttctgacacagagcatgaattcattcatttcctaagacgtgcccctcccacccccccacaccgccttcccctgctaccttccccagcattgaaaccgtacccccaccggcctcccaatgcagaatcgtctgcagcaggttaaaaggctggagaaatgtgagcacttcgtaaggaccaaatgcttttgtgcgcacacagaaactcccagcactgcgtagagcggctgagtggaagccaaggaggagggcctgcacgcagggaagaaaatacctcgaaggaaaataagaagaggctggaccccggggatgactcctggagcaggattccggatctgcacagcttagcgcttctgggccactccttgcagtgctcagcggcactgtaggttttttctcaggtggctgcaggagtgagcatgtggcttttccttgctggctctgtttccgcctgccccagggagcctgtgctggccagggttgcccgccgaggggtgtagaggtaccgtgggcagcccctgctgtctccagtcactgtgtgcgctgcctgccttgctcggcctgagtgaccaggtccagctactgagctttatgtcctggaagcgaggcctgggaattgcctttcctgcaaggggtgttggtgcaggggttggggggggtcctctgggcctggccggctgctgcgcagtacccagctgagccctggaagggcaggtgccggggcgctggggcctccaccgtgctggccttggcccatcctgtgcccggcgctttccaacacaagaattgagaaaaaactcagacacaaccctgtggcccccttcattcccacgctgtctttttcttttgtataaatatgtggcaaactttaaaaattcctcttagaaatgtgaggaggcggttcgtctgtctcattccttatccgcccccctctgcaacctgtaccattcatcgtcagctgtgacccagccaagccaccaagtgcttttcctggctggaaaactcagaggcggacacgccaccccacagtcgggagctgttaccaccacgtagtcttttctctgccgccgcctcgtgctccacgccggcctttcagcggagacgcactttgtcttcctttgacaaaaatggatgatctgagcccagatcacacacatctgctgctgttttcacttatccctattcaagccgcctgtgtaattgtccatgcgcctctcgacccctcctggagaatgttcacctctctgactgcgttttatcactcatagccacctggcaggaaggccaaataatgcattttctctccatgtcagggaaaaattggaaggatcttcccgaaagttcttcaggtggagagtggcagggggctggtgaggggggatgcccacccaggaatctttttttttttttaattttttccttattgaggtgaagttcacatagcataaaattaagctttaaaggggcttctagtatattcagagtattgtaccacaccacttctattgagatctaaaatgttttcatgccatcagttaaccaatagtaactttttaaaaaataataaaatattttcatcacccaggctggatggtacggtggctcatgcctgtaatcccagcacttcgggaggccgaggcaggtggatcacttgaggtcaggagttcgagaccagcctggccatcatggtgaaaccccatctctactaaaaatacaaaaattagccaggtgtggtgatgggcacctgtagtcccagctacttgggaggctgaggcaggagaatcgcttgaacctgggaggcggaggttgcagtgagccgagatcatgccacggcactccagcctgggtgacagagcgagattccatctcaaaagaagtattttcatcaccccataccattagcagtcaccccccatcctcctccctgagctcctggcaacatctgtctgctctgtgtctgtggatgtgcctgtcctggacattgtgtaggaatggagtcacgcggtgcatggcctttcgtgtctggctgctttcactgagcgcgatgtgttccgggacccccgcaccgttgtgtgtcagcgcttcgtgcctttcggtggctgcgattccggtgcagggatgggccacagtttgcccactcatctactgatggacatttaggtggtttccacttcttgtgagttgtaaatagcaacgccgtcaacactcatgaactggtttttgagttcctgttttcagttcttttgggtacacgcctggggctggtggtgctgggtcatgtagtagttctgcgtttaatgctttggggacccccgtctgtgcgtctcaggtcacccacagcaccgtgtccatgcactccctgcctccgtgacacttgctggcctcaactgcagagtggacggttagcctgcgcgttaaacccacactcgccgagaggcgggagagtggacggttagcctgcgtgtttaacccacactcgccgagaggcgggagagtggacggttagcctgcgcgttaaacccacactcgccgagaggcgggcattttaaaccagagcctcactcagcacctattcaggggtgacaggagagggatgggccatcgggatgctgtgatttctcctccgagcagcagggacctcagaccccacagatccccccgctcctctgtgcagccctcctgctggttcttccagctctccacctgagaacattcggctctttcgccaaaagtgctgttacttttgacccagtggccgccggtgggtgtctctgggagtcagaatcgagcagcacatcctgggcgctgtctatcagagaccgtttcctaaacgccctgtgcctgctgctctgattcacgaaggccagactgaagtcaggtgtcctagcagtgggtgtctcacatgagtcagtgccactcgaaaaacaagcgtggattgcattggctttgtcttttgcctccagctttctttatcctgctgttttttgcttgaatccgtagctctgagccattgattaccagcagcagtttacagcaactgcagttttgtaaacagtagcttaatgtcatgaaagccttcccagtgtaaatgctacttacgcccttcctccagtagtctcacgcccagccccaaaaatgtaaattataagttgtaaagataaggtggggctcacaaagtgaggggaggttctcctttccctgggatcgcatctcacatttaagcgtcccataatgggcacttccacgcgttttccaaagtgggccgcgttacacagcgagaaaacagatgatttttaatgcactcgcctacctgttgcttaaccaaaagtggagtctttaaggagacagcttatcagaccttgtgatttcatcagctgatgtaaaagaaaaatgaaaaaggtgatccatgcattcgaataccaggggtcatggtagaagcctcccttggatttacagacaagggcgtgtgggaaactcacgtatctctgttgatatcatcctcaattccctgtaacacagagaggacgtgtgttctaatagtaaatcgttatcttgcacaaaaagaaattgaggtacagtcatgggtctcactcacgttagatgattggataagagggaggagaagcctcagctggggtggccacatacagttgtgcaggctgcccactgcacaactccaggcagggcgtgctgcctgggtgtccagggtccccagaagtcatgcaacttggccatctggctgagctcctgtttccagttgtgtgtcctgcttttcagcctcgtttccctgatcaaaatagatactttgttcctattaaaaactgaagatttatttttgaatgaactatgtggttgttattttcctattaaaaggcactgaggatgatttaattaaattctacgtttttacaacgatctatttccacgttttataaagaagcatgagattgtatcatgctataaactcaaactgaccccagaactatcaggaggaggcatcgaacccatcctttataggggtggtgggagggaccctgctgggactggaagaaaaggttctctctggggtggagggggaggctctgctgcgcattgtgtgccaattgtggggcatggtggcacttgcctggcgatctcctggctcatcgtcacggccacctgtgggatgtaggtcttgttatccaggttgtgcagatgaaagacattctgttgcctgtcccggttggagctggcaccaactgtgtttctggaactttgagacccacatgcttaagttccgtggccagcatggattgtgtagggcgggtgctgcttttcctcctggaagggcgtctgaggctggctgggtggatatgcttcgtgtcctgggagggactgaccaggagctgagacctgcgagggctgtctggggaaagtgggctcgtccccggatggcaaaccacagtctcttggagaagggaaaggtttcacccaaggtcactgattccagaagaactcttgtacccaatcctggcccagagagggagttccacgccttagaggggagatgtggggccgtctgcaggccgggcagtggcctcctggtgtctgtactccaggagcacgaacctggccaggtgccgtggtcaggaggacacccccagaagagcagaagcgggtgttcacaggaggggccccaggacttgggtgttggctgcaacttcatttcctggggccaccatcacaaagtaccacggacagggtggctcaaacaacagacatgattctctctcagtctggtgcctagaagtcaaggcgcgggtagggccgtgcctcctccgaaggctgaaggggaggacccttcctgccttttcctagctgtcggtggcccaggtggcccttggcttgtaaacagctgctccagcagctgcctccgcggtcacgcagcttctccctgtgtgcctttgcatctcagcatctgtcctcttaagaggacaccagtcatcttggatcagggcccgcctactccaggacgtccgcatcttagctaattccatcagcaccagctctttgtccagaccaggccacgttctgagattctgggaagcagaacttgagggggcattgagcagcccagcacagctagtttggggaactaaaggccgggggctcctcatcccttgtctacgtgccgcccaccctgtgccatgtcctcctcgctctatgagtgacaggtgcgcctgctgagggcactggtggagaaaacgctgacaccttctgtgctttctcttcttacagcccaatattggccacctgggcctgccccatgggccgtccggggaaaagatggccgtggtgacagtggatgattgtgacacaaccatggctgtgcgctttggaaaggacatcgggaactacagctgcgctgcccagggcactcagaccggctccaagaagtgagcatcccaggaggggaggccctgggggtccgtacccccaaacatgctcaccctgcggccttcccagggcagggccccacgtaggcactctgggtgcagtgccctggcgacctcattccaggctagagtcagacatcctgtccatggttggggcaccttccctctgaccttctagaataagtctccctaagtatgtgtcaagagtggccaggccgaccccagggttgtgatggccagcttgcagaccccgagacggtctccagccccatctccacggatcactggctttgtccccgcaaattctggtacctgggactccaggactctgttaagtgaagcactgtgtcagccagctggtcccagaggcttatgtttttttgttgttgttttgtttttttctgagatggggtctcgctctgttgcccaggctggagtgcagtggcacgattctagctcactgaagccttgacctcctggactcaagccatcctcctgccacagcctcccgagtagctgggactacaggcatgcaccaccacgcccagctaatttttgtatttttagtagacaccatcctgttggccaggatggtctcgatctcttgacctcgtgatctgcccgcctcagcctcccaaagtgctgggttctcattttcttctggcctcctttcaaggcccttccttttcctagaaggtctcagaggcaagggtaaagtatagtccctgctggccttgacctgtgctccctgcgctcacatcctgtctcggtgtggaccagcctgggtgggcggggcttggtggtcactggtgagcgtgaaacacccagatcgtcaggactgaacacaagtgtgagcaaacggaggcagtggcggcaccagacacaggagccccctctgactttggcctctccccgcctgtctgcttggtttctgaagtagttatggtggtagaggctacacagaggcaactgcggagcccagcccgccgtggccgcctctccccgccctgacgtcacagaagatggctttacctacccaggtccctggatctgaccggccctctactcctggggggtgtccccaacctgccagaagacttcccagtgcacaaccggcagttcgtgggctgcatgcggaacctgtcagtcgacggcaaaaatgtggacatggccggattcatcgccaacaatggcacccgggaaggtacgggtggccgtcagggcgtcggagctgccgcagtggcatctggctggacgtcggcagccacacagaggtcactgcttgcagatccctggggagccgtgtttttcttagaaatgtatgtgtccagcggtgggcagctcctgggatggaacccggagtccaggctggagatgtgcatctccgcagttcctgcatctgcagtttggggttgccttggcactgctggcccagccagctaacccgaggcgcacatgatcctagggtcttgcatatgtgtcaccaggtgaccgggccggctgccgtgatggcctggcgtcccagcgtctccaaatgtggtcagtgcgttcagcaccttcttagttcccatgttcctgccgttgccaggggcgttcagacctggtctgacttctgtccagccccgggtccattccgtcctggtttcccacgccacgtctggcgccggggaccccgggcggttcctccgagtcaggctctgccgcacgctctgtgttgccaggctgcgctgctcggaggaacttctgcgatgggaggcggtgtcagaatggaggcacctgtgtcaacaggtggaatatgtatctgtgtgagtgtccactccgattcggcgggaagaactgtgagcaaggtgagtggccggcgtcgtccatccccccggtcacggcggcctgggaggcattgctccttgatgtgcccgggaccaccgtgagggggcttcacatccaggtccggcagcctctggtggtatatgctgcatttactgtggactcacaccgccctctccaagagactgtcctccgcagagcccctgctcctgcttctggggtccccagtccctcaggtgtggggtgggacaggtaggctgggccggcagagcccagccccagcaccccagccacggagcccagggatcctgaacccgcccccgtctgcctcctgtcaagcctgagagccccttaccacgcccatctgtggctgggagcctgcagatcttcatgcttcccagcaaggaggctcacgtcccagggtgcgcttctctggagcccacgtggctgactgtgagggctggatgcgtcacagaggggaggctcagacccaccttcgtgttaaagtgaaaaaggcccaggcctagcctgcaggcccatcccccgcccctgcagccaagtccgcggccgtgtgatttcgggagacacctgaggtccctgggcctgtgtccgcagccatgcctcacccccagctcttcagcggtgagagcgtcgtgtcctggagtgacctgaacatcatcatctctgtgccctggtacctggggctcatgttccggacccggaaggaggacagcgttctgatggaggccaccagtggtgggcccaccagctttcgcctccaggtgactggggccccgtgccaccaaggcacctgctaggtgggtgcccgagggagggacccaggcgctgggcttcctggtgcacactcgggcacctgctactcgcccttcctccggcgcccgcccctggggttctccgaagagggggaaggggaatatcagccctttctttcctctgggaggcggagacagcgagggagcatggggctgggccaaccctggggcccagcagagctcagcggcagttctggtctccctctagcctgagggtttggctggagcgtgggcattgcagaactgagggaggtgccgagccttcaggcggaaacagtgagcctcaccagttaaagctgcagccaggtgcaggccggggtggtggctcatgcctgtaatcccaacactttgggtggcggaggccggcggatcacctgaggtcagaagttcgagaccagcctggccaacatggtgaaaccccatctctactaaaaatacaaaaaaaattagccaggcttggtagtgggggcctgtaaccccagctacctgggaggctgaggcaggggaatcacttgaatctggaaggcggaggttgcagtgacccgagaacgtgtcaccacactccagtctggacgacaagacagagactccatctcaaaaagccacagccaggtggtggttggcaccaatgcacgtccactttctctgggagcttgagatgcctcagcccagaaatgcctaaagccccgctctgtcgctgtctgcctgttttctctgtcttattgatctttactgtttcgtttatttgaaacaaaagtttatttgttggataaaaattccgaacagcttttagaaggtgattcgaatgcactctttcctccggttttctgcgccacacggtttctgctcgcatcttccatgctccgtagacactttgtttgagaaacagttatgagccctgtcttctgtcatcgggctgcccttctgccacaacctccgccgcatgaggcagccatggggaccctccccaggagggtgcccggccctcggcttgccctcttgcccctctgcctgtgcatctgaaggtcattctcgtctgtagtgatggcggggcacgggcgctctcctgtaaacccagctgctgtgaccctttctgatcagggtctagctctgaaaactcactgggcaattctccctcctaaaaagctccctttatgtctctccttaggcctaattctcatcccctggcacgggagtggcctgtgggagccgtgcctgagcagggcgctctgtcttgatttgacagattcataactgagttattccttccttcatcctaggttttttttgttttgttttgttttgtttttttgagataaagttttgctcttgttgcccaggctggagtgcgacggcgtaacctcagctcactgcaacttctgccccccaggttcaagcgattctcctgcctcagcctccattgtagttgggattacaggagctcaccaccacacctggctaaatttgctgtatttttagtagagacagggttttgctatgttgaccaggctggtctcgaactcctgacctcaggtgatccactcgcctccgcctcccaaagtgctgggattacagatgtgactcttatgcttttctccaagtttgtgtgtgtgtgtgcgcatatctccgtgcaagtgtgtgtgcatgtcagtctgtgtatgtgcatctctccatgcgtgcacatttgtgcatgtctgtgtgcatgtggctgtatatgtatgtgtgtgcacccatgtgatgagacctgggtgcacatggtctcagagcagcactgacttccttctggttgttcattatctccaaccagagtgagcctggggctccctcctgacctcccttcagcgcacagagatgctgcccttaggttagcctcctctcctgccttggggtcggccacacgggaacactcaccctgttctcccaggatgaccccccctccccgctcctgcggtcaggaagtccctcccaaagcggcgtctgggctgcgtgtcctccgccatcagctgtgtgccgtggcggagccatgccttattgcctttgctccgttgggctctgggcttcttttgctgccgagtgtgtcctggacaccatcccgcatcaggggaagctgggctaaggtcagatggtgagaggtgagatggattttacggagtgcctgctccaagctctcgttccacacacgggaaactgaggcgtagaggctcttcactagggaccctatggttcttttcctgcccaggttcctgggacagccacaggcccttctctgtcactcctaaggacagcccatctagaaacagttctgtatagccaagattggcatgagggttggcgggtggacagagggactgcccagcacatgccctccccatcatgagtgcctggttggagtgtggcgggggcaggaccgagagtgctcccagcaggctggtggaggtcagtccctcagcagatcagcgagggctcaggagatgggtcggggctgtggggcaggggctcaggcctggacagggagcctcctgttcctccccatcacagctcgggagcattttccagcacagacctctcggattgcctggaaggtgtggtgtgcgccagggatgattacagctggcctgtgggcccttgttaacctgtaatttcatgagtctcccaggcagccccagaagcttgctccaggccaaaacttggcaagtgcggtgctgcctggggatggtattttctgtgtggtggtttcactgtcagaacaaattaaattggctgttggatgcaggtgatgaactggagcttgcaagttgtcatttggcagtggggtctctgtaggaaaaaagtgcgctttcagtaggaatggtgctggaagccacagactccggtgctgtttgtgtaattacatcatggagggctcatccccagattaggaattttgccagggactacagccagccctccctgtggaagtctgggtggctggaggggtggccttgaggggatgctgcagaccccactgggcacccagaaggcccccagggcagctcgcagaggccggtcaaccacacgttaccgaaggttctgggggatttctccttgccattatcagcttgcaggcctcccgtgggcctgtgagctccgtaaagcagcagtttggctgtccctcaaaggatgtctcctgtgcccctgccactgtggtgggacaaagaagactccattgtaatcccacagcccaagcaatttggataattgctctcgggcacccaaaatccacccaccttgtcaggtgggataaccttgagattgctgaatgcctctctgactgagagctggggacacactctcagttacctcccataaaacaggttcatcctgtggatatcacttttgtttgtagatataacatcacttttatcactgatctgctcactttggagttctttaagcaagaacaatgcaagagatggcaaaggaattttttttttttttttttttttgagacggagtctcgctctgtcacccaggctggagtgcagtggcatgatctcagcccattgcaagctctgtctcccaggttcacgccattctcctgcctcagcctcccgagtagttggggctacaggcccctgccacgacgcctggctaattttttgtatttttagtagagacagggtttcaccgggttagccaggatggtctcggtctcctgacctcgtgatccacccgcctcagcctcccaaagtgctgggattacaggcacgagccactgtgcacggccaagcaaaggaaattaataagctgacttctatagaacaaaagaaaacaaaatggaggctgggtgcagtggctcacgcctgtaatcccagcactttgggagactgaggcgggtggatcacctgaggtcaggagtttgagaccagcatggccaacatggggaaaccccatctctgctaaaaatacaaaaattagctgggtgtggtggtgcatacctgtaatcccagctactccggaggctaaggcaggagaatcactcgaactcaggaggcagaggttgcagtgagccaaggttataccactgtactccagcctgggtaacaagagcgaaactgtctcaaaaaaaagacaaaatagaaaaaggtgaaaagttatcttcttaaaataactatcaggccaggtacagtggctcatggatgtaatcctaccactttggaaggccaaggcaggtggatcacctgaggtcaggagttcaagaccagcctggccatcatggagaaaccttgtttctactaaaaatacaaaaattagccaggtgtgcatctgtttttttgtgtgtgtgtgcccccctcccccaccaaaaacccaaactatcaatagagaccaaaaagcaaaatacagttttagttacataatctttacagccagttaaaacctgtatcctgttttctctcatgaatttatcttagactgatgtgatatttagaagtagatttctaggttagcaagcatgtagcgttttcttttcttttttctttttcttttttttttgaaatggagtctcactctgtctcccaggttggagtgcagtggcgtgaactctgctcactgcaacctctgcctcccaggttcaagggattctcctacctcagcctcccgagtagctgagattacaggtgtgtgccaccacgcccagctaatttttgtatttttagtagagacaggttttcaccatgttggccaggctggtctccaactcctgacctcaggtgacccacccgcctcgatctcccaaagtgctggtatttcaggtgtgagccaccgcgcccagcctcatgtagcattttctagtaaatcattttggtattgtttttagcataattgcaggtcaaagaatgtataccatgtggtttcagagctttgaaatgtggtttacagcccagatctagtcagttttttttttctttttttctttttttttttttttttttgagacggagtttcactctgtcaccaggctggagtgcagtggtgcaatctcagctcactgcagcctccacctcccgggttcaagggattcccttgcctcagcctccttagtagctggaattataggtgcctgccaccacatccagataatgtttgtatttttagtagagacggggtttcaccatgtaggccatgctggtctcgatcccctgacctcaggtgatctgtctgcctccacctcccaaagtattgggattagagttgtgagccaccgtgcctggcctctagccagttttgtacacatgcccctgtgtgctctgcagttgttatctgtactgttctatatacatcaagtaggttaaatttgttaatcgtggtattcaaatattctatatcgttattgttttttttgtgtgtgtgacagagtcttgctctgtcgcccaggctggagtgcagtggcttgatctcgtctcactgcaagctccacctcctgggttcatgccattctcctgcctcagcctcccaaatagctgggactacaggcgcccactaccacgcctggctattttttttttttttttgtatttttagtagacacggggtttcaccgtgttagccaggatggcctcgatctcctgaccttgtgatccacccgcctcagcctcccaaagtgctgggattacaggtgtaagccaccgcgccagcctattggttttaattattgtttttttgtctttgtctcctcacttactgagagaagttagttacaaatctaccttgactgtagatttatctattacttctcttagtaatcttgatttttgctatatagattttgaggccaggttattaggtgcatacaaatttagagctgatttatcttcccagcaaattgacttggttatcattatgaaattcctctttttctgtagtgaggacttttgccttaagtctactttgtctcatattaacatagctataccatttgtcttttggttggtatttatatgatgtatttttttctatccttttactttcaacattttctgtatccttatatttcaggtataatataagcagtgtgctaatagttgtttttctaaaatctaggctattttttgaagttatctttaaatatgagcatcttaggttagttacaaccttgttttctgattcttcttacatgtacttaaacatggccgtttgacccttatctctgtaacacctacacccagaagtaagtctaattgtctcactgagtctgtttccttgaaagttttgtggttcccagtgttatttttgagtctgtgtctgatgaatctgtggtctgttgccactcttccttgcttctcttggttttcaagcatattaccttatatcctcgtatacttggctattttttattgagtgctagacattttattgaaaaactagagagcatttgaaactagaatgggggccaggtgcagtggctcatgcctgtaatcccagcactttgggaggccaagacaggcagatcacctgaggtcaggagttcgagaccagcctgaccaacatggagaagccccgtctctactaaaaatacagaaaattagctgggtgtggtggtgggtacctgtatctcagctactcgggaggctgaggcaggagaatcacttgaacctgggaggtggagtttacagtgagctgagattgtgccattgcactccagcctgggcaacaagagtgaaactctgtctcaaaaaaaaaaaaaagaaaaagagaaactagaatggggatgatggggatgtcattatcttccatgtttgcttctggcaaccactaggagcactttccctcccagagcacttgaatgcagtcacagacttttttgtttgtgtgtttttgagatggagtctcgctccatcgcccaggctggagtgcggtggcgtgatctcggttcactgctacctccgcctcccgagttcaagcaattctcctgtctcagcctcccaagcagctggaactacaggcacctgccaccacgcccagctaattttttgtatttttagtagagatggggtttcaccttgttggtcaggctggtctcaaactcctgacctcaggtgatccacccgccttggtctcccaaagtcacagagtttaatgcagtcacagactgaggtggttcaaagctgggcttccagtcctgcaaaggtggctctttttcgtttttatcgttagtgtaaacccctcagggttccaaccagaagccaaggaacaacccttggcagtccatgaaccccagtttttaatcctccagccccatgaacctagaaagcttttaggcatcttgagactctaggtcacaggcgactgatggagcgtcgtaccacctgctgatagggctgaagagtgccaaggagggcaggggtttcaggtacctggcagccgtgacctgactgcacgctcagcctccactgtgtcttccagaaccagctgacggccttgcagggaagcacacgccacgctgttttgcagattctgtcttttccttggttgtgagcctgaaactctgttttgcctggagccacttcagtgtcttcaaacagacattctttaatattttgtctcatgttcgtaggtgatttcaagaggagaggtggtccaaattgccaagtcctttcttaggagatctaagattttcacgctgcccttggcctaccttattttaaaatatgagtgttttaggccagttgcaatgctgatttttgtttttttcatacatgtaattaaacacagaggattaaatcttgtcttataaagtataatgtttacatccaaaaataggagcccagtagttacctgaatcgagctgggtcccagtacttaaaagcctaatggggcttgttcttggcgcttcccttacttgacctccatgaagcgattgatcctttttcccgtagaataagacaagcaattctgatcagtgttaaaggcaacagcaacaaagaacaactttgcctatactttttttttttttgagacaggttctcactctgtcacccaagtcgaagtacagtagtgctacctaggctcactgcaacctctgcctcctgggcttgagtgatccttccacctcagcctcccaagtagctgggattacaggagcacaccaccatgcccagctaatttttgtatttttagtagacacgaggttttgccatgtttgccaggctggccttgacctcctggcctcaagcaatccacccgccttggcttcccaaagtgctgaaattacaggtgtgagccaccacgcccagccaactttgtctaatgatgattattattttgagacagagtctcgctcttgtctcccaggctggagtgcagtggcgcgatctcggctcactgcaacctctagtagactcccaggttcaagcgattctgctgccttagcctgcggagtagccgggcttacaggtgcctgccaccatgcctggctaatttcagtatttttagtagaggcaggtttcaccatgttggccaggctggtcttgaactcgtgacctcaggtgatccgcctgctgtggcctcccaacgtgctgggattaaaggcctgagccactgctcccagccaactttgcctaactttttttttttctcgagaccaagtctcgctctgtcacccagggtggagtgcaatgctgcgatctcagctcactgcaacctccacctcccaggttcaagcagttctcctgccccagcctctgagtagccaggattacaggcacctaccaccacacctagctaatttttgtatttttagtaaagatggggtttcaccatgttggccaggctggtcacgaacttttgacttcaggtgatccacccacctcagcctcccaaaatgctgagattacaggcctgagccaccgcacctggccaactttgcctaatttttaagcctatcttgtatctggtgccacataatcagtctcctttcacagcttccttgtttaagtgactgcaaaatgttttctctttcattgtcattgtaccaatcagtcggtgtggctctccctgctccagatcctgaacaactacctccagtttgaggtgtcccacggcccctccgatgtggagtccgtgatgctgtccgggttgcgggtgaccgacggggagtggcaccacctgctgatcgagctgaagaatgttaaggaggacagtgagatgaagcacctggtcaccatgaccttggactatgggatggaccaggtgagctggcacctgcacctcctctggggatagacccttcctccggcccagggaaaaacagaatgaccccttgacgtgccaggacccaccagagaccttgtggatttggggaggcactttctgggtccccgcaggtgggcttctgttctgccctgtactgaggtcactggcatcttcctcacctccttcatccggatgccccgcccccggcagtcagcagctgacttcctccagctgcatttctcatcatgatgctgttggtgccttcagcagtggtttcttttagcaaagccatcttgagcaacacctgcaggctcagcaccatgtctttagggtactgaagtagcaatgctggggcccgtgccctcagagcatggatggggagcaaaactgggagagcagtgagacccaggtcctggacaggcctgtgagacaccagggagccacacatgtcccaggcaggcaggtggtggtatcccagacaatgttcggaacacttaaccaaactaggtttccacagtttgcaggcaggtaacccaagatgttgtctgtgaaatgcccacacacttaaggggcgacctgggatctccaagagctcttggagccaaggctcatcttacaacacagacctgggagtaaataggtgtgttccaggcacctgcctttctgggactggatctcagccgagaccctcttgggttcccacagtgttaatgagtgagcggatttccgttcactgcagtcttcctgactcgccaagctctctgtcacagcgtggctggtttagtgttgtgcccttgacggaggcgggacagttgcccacgttgaccccactggccgcctcagctaggctggggcatggacacccatcctctggcctggtcccctcgccctggtcatcacagccagcctcgctgtccagctgggcccagctctctctttggaggcccagatgtcctcaggctctgcggagtttgttgaagtgactgtttagacttccagtgtatccttcccatctgagagacgtttctaggatggtggatgcagcccccagatccccggcccctctctccgcacagaacaaggcagatatcgggggcatgcttcccgggctgacggtaaggagcgtggtggtcggaggcgcctctgaagacaaggtctccgtgcgccgtggattccgaggctgcatgcaggtgcgtgggggttgtggggggcggggggaggcctgcccctcacaggcagctccgaggctggcagcaccataggtggttccgttggtcaacctgttagctttcaacgagtgaagaatttgtctgacaggcatccccactttaacagctcctgtttcctcttcagacccattctcccctgcggttccccttggcatccgggccgtccctggcccccacagctccccaccgccatgccagccacctgcccctctgcctttgtgaagtgtcctgaatcgagccccttgccgccacccccacccagtccaaccacagacgtcacccaagtgggccccgtgcctgtcccctggagccaggggttccagctacggccgagggagctgctctgagtcgttcagctctcagccccctcggcagggacatccactcctcacgcccccaccgcgcaccccaggagctcaggctggcgtgccctctgagctcctcacccagccctccactgcactccggccagcaggccgtggggcaagaggaacaaccctgcccgccccagctctgtagataaatgaggcatcacagatgaatgcctcgcaagggaccagagaggtctcagggttcccttaacccctacatacctttccgggctcctgtagccccagtgccgtttacttaatgcagggagtgaggatgggggggacgcccaccaacgtcgccaccctgaacatgaacaacgcactcaaggtcagggtgaaggacggctgtgatgtggacgacccctgtacctcgagcccctgtccccccaatagccgctgccacgacgcctgggaggactacagctgcgtctgtgacaaaggtgggaccgccctcccggggcccttcagtgacagggaggtctcttatggctgaaacacaggaggggggctcagtttagacattagcgtccccagccaactccctgtggttccgtggagccctgagctttattttataacaagcgggcccctcctagagagagactctgagcctcttccttactcaaggcacagagtgccccaggcgctctcctcagcacatggggtgatcagcaaagaaacagtgaaaagtaaggccgggtgcagtggctcatacctgtaatcccagcactttgggaggccgaggtgggtggatcacttgaagccaggagttcaagaccagccaggcaacatggtgaaaccccatctctacgaaaaaaaaaaaaaaaaaaaaaaaagcaaaaattagccaggcatggtggcacgcatctgtagtcctagctacgtgggaggctgaggtgggaggatcacttgagcttcttaggcaaaggttccagtgagctgagatcatgccactgcacctcagcctgggcaacagagcaagactcttctcaataaataaataaataaaagaattagtgaaaagtgcatattaagaaaatcctccattcagggtggcctcagagttttgaggtgcttaagtcatcttctgctggtggccattccccatgtgtcctggggcagcctgggccccgtgttccaaggctctcaccctccttggggcagcccgggaaggccttcctctctgcatcactaagtctaacccgcctaacgctgtgttttcggggactctgtggcactcttcctcttccctctgctgagtaccagggaaagtcagatcttctggaggggacaggttgctccagatattttaacgtggaaggtctcgtggattgtgggtggaggtaatgctggctctgtccttgcagggtaccttggaataaactgtgtggatgcctgtcacctgaacccctgcgagaacatgggggcctgcgtgcgctcccccggctccccgcagggctacgtgtgcgagtgtgggcccagtcactacgggccgtactgtgagaacaagtaagagcagcccctggtgcctccctgcaccttcagagtccatgtggctgtgttccctcgactcagtgtcttctctttcttattttgacccaaagatatgtgtgattctgggtaacagggacatatttttttttaatttggcatgaattaagtgaaaatcaaattttttttaatttttattttatttttatttttttgagacagagtcttgctctgtcacccaggctggagtgcaatggcgcgatcttggctccttgcaacctctgcctcctgggctcaagtgattctcctgcctcggcctcccgagtagctggtcctacaggtgcccgccaccatgcccagctaatattttgtatttttagtagaaatggagtttcaccatattggtcaggctggtctcgaactcctgacctcaagtgatccacctgcctcagcctcccaaagtgctgggattacgggtgtgagccaccacgcttgggcaatgagaatcaatttggacgtctcaaactaaccccattggatcatgtgtccacacctgaaacatgcaaatgactcacctggagtcctcactgggcccagagcaaacaggccccatgagatgcagggagacgcatgtggtttacagagaatgctttctctgtcgagtcgctgggcttgaagtcatttctgatgtgtgcggagatcctagtgtggttaggacaggcagcagcgtgctctctgggctctgggctctgtaccctttgcacggggatcgctgggtacaggtgcgtagtcatcacaagcgtcactttgtccaaggtggagctgctgggttcttcataaaccaaggttccaggccgccgtggaggtgatgcccctgtggctcattgtcctcagctgctggtggccatcaggtgcagggacacctgctatgctccgttctttgtcctcccgagcctagagcaggtgctgtgatcccggctgtgaccccatgagtgggaagcagcctgtgccctggagctggtgacctcacgagaagatggcaccacatcattcttggatatcagcaagatgtgatgccagggagagcgccgcggaggtgccctgggagtggagagggaggtgggagccagtgtggctgaagcgggagggcattctgggagcgaaagcaacagagccaagctggagaggagtaaggggatgaggctgatctagagaggcctgggtggggacagaggtgggcccgcaagccaggaacagaattcggctgtgtggaggccgtgggggcccagcactaaagtggcaggacctggtcttagggaacccccacctgccgcatggagcacagcttggagcagggggagttgccaagaggctgatccagcatctccatgcccggcgccacagtcaccactgctgcagggggatgaaggttctggggcccccacgctgcacacacacatccataaacgccagactctatctctggcctggttgtctttatgaccctgatttgtacacagtccttaatacttgctcgccaagtgagtgaatgctagaggctggcagctgggtggagggaacttggttagccaggggggattgcaggagcccgcaggacactcgggcggggccgttgcaggcaggtgggccttcaggtgactgcgcaggtgcagccctgtcaggaacaggtagggagactcatgcacagcagcggccagcacctcggaggcctggctttgtccctgcagtgttgctcatcttcagtgtctgttgctctctgccgggggaggctcagggaggcaggactggcttctgctggattccgagtgcacgggcgcatgccgccgtcctaaggggcatgctacaccagggcatggctgccctgagcatctgtgggtctgggggccaggggacctgggggacaacaaaagctacaaaactccctgtttaggagcttcctgcgggcatctcatgctggcattcaccccaagaccactttgagaagttgtgccaggcagctgagctcagtctgcctggggctgcatcgtgaaaggccagccttgcagtgggggttcattgtcattaagccccaatgagtcaggcatcatgtggacgtggggcacacggtggacagagatgtcatcccagtcgctttgggcatggtggatctgtgggtggggggtgaggttgggagccggtagaggggagactgaggccatgtaacgtggaaggggaagctcccagagctggacccagccaggcctcctgggcaaccatctccatgctgcctgcaggcctcttctcattccagaaagcacagttacataaaccttccagctgccctcttattttccccacagactcgaccttccgtgccccagaggctggtgggggaaccccgtctgtggaccctgccactgtgccgtcagcaaaggctttgatcccgactgtaataagaccaacggccagtgccaatgcaaggtgaggccccgcccccatgatccctgcatgctgtgtttgctcacacacatgcacagctgcccctaaatacacacacgccttcacataccctgtcggtacacactcacacccctgcacacacacctgtgcccactcacatcacatttgtgtacagatgtggtttttggtttccttgctgctcccccgtgctctgtgaatactccatggctgctttccacgtgtaaactacgggttcagccctgccagcccccgcccgtggaacaggaatccctgcctcctcccggcctactgcccatggctgtgggaagcccacccgtttctgagggctggctcatctatggcaccaccccggccctcctggcctcctggttggccattttcctggtctttttttttttttttttgagacagagtctcgctgtgtcgcccaggctggagtgcagtggtgcgatctcggctcactgcagcctccgcctcccgggttccagcaattcttctgcctcagcctcctgagtagctgggattataggcgcccaccaccatgcccagctaatttttgtatttttagtagagacaggatttcaccatgttggccaggctggtcttgaactcctgacctcaggtgatccgcccgcctcagcctcccagagtgctgggattacaggcgtgagccaccgtgcctggccattttcctggtctttaccaagctggtgtcccatgatgacagcagttttaaaatagaaagtgtcactaagtgcgttatgccccacgcctgtccagggcggtcagtcctaacctgcatgcagcacggagctcacatctcgtgtctccagaaatgcacacgcgttctcagtgcagactctagggacccctccccagccctctcaggatacatcacctccttcaggatcttcgtgtacaccacggccatggcgctcacagtgacttgaaacccaaatgttaggtctgagggtaacaggagcctgggcgagggacgtgagcttcctgcagatgcggctggccctaggagggaagctggtaccagggcacccttggatgccatctcgtgatgtcagtagtgtccccccccagtgcctgcggtggttccaacagcaaatgggacttgtgtcctgaaaggctcaaattaaacagctctcctgggtcagggtcggtccacacgtcaccagatggcggtggtggcatagtgggtggcagagcagagagaacatggggagtgcattggcgaaaacttgcctacgatttttttctcatccaaagttataggcagggcgtggtggctcatgcctgtaatcacagctactctggaggccgaggcaggagggattacttgagcccaggagttcaagaccagcctgggcaacatagtgagactcccatttctacaaaaaataaaaacattagctgagcgtgctgatgcttgcctgtgatcccagctactcaggaggctgaggtgggaggatcacttgagccctggaggttgaggctgcagtgagctgtgactgcaccactgcactccagactgggcaacacagtgagaccccatctcaaaaaaataaaaaaacaaagttatacaaaatgtaataaaaacccataaagatcgcagtcaccccatgcgcctcccagctgtgattgttagtgttttagcatctcttctgggcctgtcgttcactgtcattttacacacagtcggagtccccacctgacacacaggtctgaacgttgctcacgagtctgcccaagtcacagcctggtcacagcctgccccgttttccggggcggggttgagggggtgctacttgggcctggggagtcccggtgaccagcccaggcaatgtagctggtaaacggcaagggtcaggcatgaacccaggactttctgaacccgaagtacaagctcttgattgtcaccctgacccacccaatggtggacgttcaggtggcttctaatttttcaaaacaactttaaaaaaacgcccaagggctatccccatacgtaagcctccatttggatctctgattctttttaggacaaatacgaaggtgcccactgttgagacttgttaagacatgagggagggcgtgcttcccggaagaactgctctcctgggtccggccttgtggggccttgggaggcagcccccgttgggtgtgggatgtgggcagagggtagccatgaggggtgggatggctggcggccaacacacacacccgggtgggagtctggacgtcgctcgggaaacacgctgcaaggtagggcctctcccgggcatctgaagtcacaggccctgcctctggcttttgcaggagaattactacaagctcctagcccaggacacctgtctgccctgcgactgcttcccccatggctcccacagccgcacttgcgacatggccaccgggcagtgtgcctgcaagcccggcgtcatcggccgccagtgcaaccgctgcgacaacccgtttgccgaggtcaccacgctcggctgtgaaggtccgcgttgcccctcgacaccctgcaggttacagcgcggggacaggctgctgcactggcgtgcacgtgtgtgcatgcacgctgggtgtttgggggaccctgggctccctcgtgttctgagttctcttgaccttctagaaacctggttctgcgtgagggggtgtgggtcagagcctggtcacccctctccagctctgacatggatgggggcaggggagatgctagggttcggttcttggtgggagcagggcctcctgcagggaggcgcatgcagacagtggtgcctgtttgtggtcgtgggtgtggcgtgccccgctgagcagacttctctcttctctaccccagtgatctacaatggctgtcccaaagcatttgaggccggcatctggtggccacagaccaagttcgggcagccggctgcggtgccatgccctaagggatccgttggtgagtcgccgtggcctgtgtgtagggaactgaggcaggcgtccttgtgggaggagccagtcgagatgtggggactcatggaatgtttcgtgttgaaaaaatatccgcaggcaaagtgctggggagaaatccgatcgccttttccctaccaggaaatacacaaagcaggcagagggcgcaacagaaacatgaacagtgcagcgcgtgtggggacgcccgccagtcaggcccggccagtccctgctctgccgctcaggctggggcaccgggacaagtggcttcactgttcatagcatcgggttacctctgtgaaatggggacattgactgtgtccactctgtgaggggcgtctggaaaatccagtgaggcaaggaaaggcccagccgaaatggattcctggtgcatgggatcgtggctgccggcagatggtgttgctgatttctttcctcacggacttgctcggaagtgctggctcctgttggctgggctcccgaaacgcctggttgtcagtgtcagagcagcttcggccgtggccctgacatgaaagaggggcgctggtgtcgacctcctggcccccatggggttctaaccaccacgcagtgttctgggtttaagtatattcagattgtggattgaaatacacaagcattgatcaacagtttgagtttcaggctttgcacacctgctctccttccccaggaaatgcggtccgacactgcagcggggagaagggctggctgcccccagagctctttaactgtaccaccatctccttcgtggacctcagggccatggtaggggcgcctcggggatgtgtgttcagcaggggcacgtgtgtgttcgtgtatgcgtgagagagtttgtgtgggccgaggctcctgggctggggagtgttggggcggctgggatggcgcagggacagccccacgggcccgcagcctggagccagcaggttcctgtggacttcggggtgttggcacctgagccaggcacccccacgtggacttctctcccccagaggacccagctctgtgtctttggttctgaaaacacggggtccctgcatttgactccatttgccctctgatcctgccctatttcatggcttttgttcccacgtctcccactcgctatctttctctgagccctctttggcccaccagaccctcgtttccatggtctagctgtcagcagtgctcatttttgggctttttgttttttgtttctttttttggagatggagtctcactctatctcctaagctagaggacagtggcacggtctcagcttgctgcaacctctgcttcccggattcaagcgattctgcctcagcctccctggtagttgggacttacaggtgcccaccaccacaccctgctaatttttttatttttaaaatagagacatagagtagagtattttcaaaatagagagtagagacgggttttcaccatattggacaggctggtcttgaattcctgacctcaaatgatctacccgccttggcctcccaaagtgctgggattacaggcgtgagccaccatgcccagccaggcttttggattttttaaagttcctttctgacaaggaaacttgcaccagacagtagtgagttgctgagtaacagcagggactgaaagcggccgaagtgggtttgcacacatcacgactgcctccctgttccagaatgagaagctgagccgcaatgagacgcaggtggacggcgccagggccctgcagctggtgagggcgctgcgcagtgctacacagcacacgggcacgctctttggcaatgacgtgcgcacggcctaccagctgctgggccacgtccttcagcacgagagctggcagcagggcttcgacctggcagccacgcaggacgccgactttcacgaggtaggcgggtggccgccaccctggctcggggacactcggggacactcggatgcccgtgggtgggtgctgtggggctgggcgtctacctcagttcgtggaagacggttgtgtccaggatccccatcctcatttctcaaatgtgagccctggcgggtgcagtgcctgactaaactgacgacgagcgttagggagtgttctggaaggaaacatgcaggtcacagccttgctggtgatcctggtagtgcctgtagtgtgatctaagtggcttctaagggattctaagtggcccacctgcatcagcccctctcccttccatgcagcctgtgatggagtatcgtccacccatttgacaggtaaggaaacagaggcacagagagctaaggcgtttgcccaaaggcacagcttgtaaggggcagggcccggcagtgggcccccatgtccactcccacccgcagctctgaggtcctgctttcagagggccacacctccgcctcaaccctctggctgtgtgtgtggaagttgtcatcccctgagcagtatcgttttagggtgaatgcagaggggactcacgcagcctgatatttggaaactgctttcgggggctccagaagtttcgttgtggctctgctgcaggcctcttcgtccagacaggacccccagaggagtgcctgtccacacagagcccatgggggacaccctgtccctcccacccatccccacggagccctcagggacctcctcatccacaaagggcctccagtccatgcagggcccccatggaaccttctagtctgcataaggccgccagagaccaggcagggtccccttgctgggatttgagtcccagcctgagagttgggccagtggcgtttgttctccatgcgtgactccacaaacaagtttcctttctggtttctttttctttatttctttttttttttaagatggggtcttgctctgttgtccaggctggagtgcagtggtgcgatcttggctcactgcaacctccacctcccgggttcaagcaattctcctgcctcagcctcccaagtagctgggattacaggcgcccgccaccacgcccggctaatttttgtatttttggtagagacagggtttcaccatgttggccaggctggtctcgaactcctgacctcaggtgatccacccgcttcagccacccaaagtgttgggattacaggcatgagcaaccgtgctcagccctggtttctgtcttgggtgtggtccccaagcccctgagcacagcctcatgcctccacccagtctttcacacagaccctggggtgcacagaggctgagggtcaccctcggaggagctgtccacatgtccacggcggcctcagtgtgggacctctgcgcagcccaggttgtggtggttccatcactgcttgacgtggttggtggagttcaggaggagttctgatgtaataaccaggggcatcgccacatgtcttccctgccttagcgtcttggggtatacgtggaaaaacccctggcagggctcactctgccagagtcccagcctctgacatttgaatcacccacagtctctctggcttatttgatggggttcaggatttatgaaaatcacacattaaaaaatgacttctggccgggcgcggtcgctcacgcctgtaatcccagcactttgggaggccgagatgggcagattgcctgagcccaggagttcgagaccagcctgggcaacatggtgaaaccctgtctcttctaaaatatgaaaaaaatcagctgggcggggtggtgggaggctgaggcacgagaattgcttgaacccgggaggcagaggctgcagtgagccaagactgtgccactgcactccaggctggacaacaaagtgaaactctgtctcaaaaaacaaaaacaaaacaaacaaacaaaaagacttccttatctatttgaattcaactttgattaatgtttgatcctatttataaacttagaccatgaaattcccctaagtattttaaatggaattaatatatgtcatgtagttgattttttgttttgtatttcaattgttcggctagcaaacagaccttccaagcatttaagcagtgcttgtacatctagtaaattaagctaagaatatgaagcatctttaattctctagattttaatatactttgtgagcttagtaacatttttttattcctcttaagataaactttttgaaaaaatatttgggaactaggccaggcgtggtggctcacgcctgtaatcccagcactttgggaggccgaggcaggtgaatcacctgaggtcaggagttcaaaaccagcctggccaacatggtgaagccccgtctctactaaaaatacaaaaattagccgggtgtggtggcacatgtgtgcctgtaatcccagctactcgggaggttgaagcaagagaattccttgaacccaggaggcggaggttgcagtgagccgagatgacaccactgcattccagcctgggcgacaagagcggaagtgtgtctcaaaaaaaaacacaaaaaacaacaaaaaacaaaaaacaactaatattaaagagcacagtctaaagtgtagggctggaatgaatgaatgagcccactaggcaagcaaaggctttcagggcaggtgtccctccgtcccacgagccaggcctccgcaggctgagtactgagtgctgtctgtctgaccaggacgtcatccactcgggcagcgccctcctggccccagccaccagggcggcgtgggagcagatccagcggagcgagggcggcacggcacagctgctccggcgcctcgagggctacttcagcaacgtggcacgcaacgtgcggcggacgtacctgcggcccttcgtcatcgtcaccgccaacatgagtaaggcgctggctgcgttgggggtggaaccctgctaccatcaggggtgtgccccagagctaggcccccatggggtgaagcaggtgggctcccggcccccccttggccatgctcttagaaaaatgattgtgaggccgggcacagtggctcatacctgtaatcccagcactttgggagatcgggacaggcagaccacatgaggtcaggagttggagaccagcctgggcaaaatggtgaaaccccatctctactaaaaatacaaaaagtagccaggtgtggtggtgcatgcctgtaatcccagctactcaggaggctgaggaaggagaatcacttgaacctgggaggcagaggttgcagtgagctgagattgcgccattgcactccagcatgggtgacagagcgagactccatctcaaaaaaaaaaaagccgggcgcggtggctcacgcctgtaatcccagcaatttgggaggccaaggtgggcggatcacagggtcaggagatcaagaccatcctggctaacatggtgaaaccccgtctctactaaaaatacaaaaaagtagccggtcgtggtggtgggcgtttgtagtcccagctactcgggaggctgaggcaggagaatggcgtgaacccgggaagcggagcttgcagtgagccgagatcatgccactgcactccagcctgggcgagagagccagactccgtctcaaaaaaaaaaaaaaaaaaaaatattcggcaggtaggcctctgtttcctcatctgtaaatggagcctttgggaagacagtctgtgatgacgtacccgtggctcccaggggacaggtcccgggctagggagatgttgggccatgatcttgggggtccggcagggcttccaaaccctcaggtgtgagactctagaagggtgggtgtcgaggaccccgcctcactccaggctcactgtagacaggtgtaagtacaggcgggatgcaggaagttggaagtcagttctgttctaaagatggtcagtcagctgggcgtggtagttcacacctgtaatcccagcactgggaggctgagatgggcagattgcttgagcccaggagttcgaaaccagccaggcgccatagtgagaccctgtctctattaaaaataaaaaataaaaattagccaggtgtggtagcatgctcctgtattcccagctacttgaggctgaggtgggaggatcgcttgagcgcaggaggacgaggctacagtgagctgagattgtgctactgcactccagcctgggtgatagagtgagatcctgtctcaaaaataaatataagtaaataggctgggcgtggtggctcatgcctgtaatcccagcactttggaaagccggggcatgcaaattacttgaggtcaggagtttgagaccagcctggccgacatgatgaaatcccatctctaccaaaaatacaaaaaattagccaggcgtggtggtgcctgcctgtaatcccagctacttgggaggctgaggcaggagatattgcttgaatctgggaggcggaggttgcagtgagctgagattgcgctactgcactccagcctgggagacactgcgagactccacctcaaaaataaataaataaatatggccagccagcgtcagtgtgacagttgtggtcattttgaaaacagcaggggttcaagaaagccctgggagttatgtctgattaaaggaactgtccccccagttcttgctgtcgacatctttgacaagttcaactttacgggagccagggtcccgcgattcgacaccatccatgaagagttccccagggagctggagtcctccgtctccttcccagccgacttcttcagaccacctgaagaaaaaggtaaaaccgcttagaaacctgctgctgccctcggagtccccagcgttcagggaggggagggccccgctgcgggcatcgcaggacctgcgcactgaagatctgggccagagtgttccgagtgctctctggtgccaggtcctgttggtgacagcaggttgttttgttcaagtgctcaggtacaggctgaacatcctaatcctgaaatctgaaatgccccagaacctgaaccttcttgagcaccaacctgacacttaaaggaaatgctcattggagcgtaagcatgaaacaataaaaaaatcaaaatccaggccaggcgcggcggctcacgcctgtaatcccagcactttgggaggccgaggcgggcagatcacctgaggtcaggagttcgagaccagcctggccaacgtggtaaaaccccgtctctactaaaaaatacaaaaaatagccagctgcggtggcgggcgcctgtaatcccagctactcaggaggctgaggcatgagaattgcttgagcccacgaggcagaggttgtagtgagccgagatatgccagcctggtaagactccgtctcaaaaaaaaaaaattccaaaatgttcccaagcatttcagctgagggatactcagccatgtaattgataatgtcagaaagaaaagagaactgaaatttgtatgtgagctggttgtctttggtgtgcagtgaaaagctgcttctagctgggcgcagtggctcatgcctgtaaccccaacactttgggaggccgacacagggaggattgcttgagcccagaaattcagaaccaacctgggcaacatagagaaactccatctctactaaagaagttttttttaattacctgggcatggtggcgcatgcctgtagtcccacctactcaggaggctgaggcgggaggattgcttgagtccgggagatggaggctgcagtgagctgtgatcgtgccactacagcccagcctgggcagcagagcaaaaacctgtctggttggggggaaagctgcttctaaatagaaataggcattttagaatcaccttccccttcccgcaaaaaaacaacaacaaaaaagccagaatgctgtctgtgtatgaacaaatcttcaatcctgggttgagattatgattcaaaacagtttgaacattttgaattttcttaaggtgcttttttacagatccatgacaattactaaaaccttccccaaataaaaaggacgtgaaaaggtaaactctgtaatggacagtttaaaattggaaatgttgttagtaaatggattttgtcaggtatatgatgttatctcatgtgtcttaaaaagaggggtgactctgatgtggggtcatgcttgaaactaagaggacgaggtccctgactctccattgcagccagctctctctggaactaatagagtgagaactcgctcattaccaagggcggggcaccaagccattcctgggggatccacacccatgacccagacacctccgaccaggccgattttcaaccctgatcacatttcaacatgagatttggaggggccacacatccaaactgcatcagatacattcatgtttaaacagtccatctccagaactctttccagcctgcagatctgaaactctagcccacgaaacactaactctcctccccagcccctggtgcctaccgttctttctgtctttgaatttgactcctctagggacctcctgtaagaggagtcacacgatatttgtccttttgtgattggcttatttcaccgagcctaatgtccgctaggttcacctgcgccgcagcaactgtcagacttcccctccttttgaaggctgagtaatattccattgtgcggatggagcgcgtgttgcttatccactcacctgttgacccatgcctgagttgtttccaccttttggcctgtgtgaatggtgctgctgtgaacatgggcatagaagtatctgggtccaggccgggcgcggtggctcacggctgtaatcccagcactttgggaggccgaggcgggcggatcatgaggtcaggagatcgagaccatcctggctaacaaggtgaaactctgtctctactaaaaatacaaaaattagccaggcgtggtggcgggcacctgtaatcccagctactcgggaggctgaggcaggagaatggcgtgaacccgggaggcggagcttgcagtgagccgagatggcgccactgcactccagcctgggcgacagagcaagactctgtctcaaaaaataaataaataaataaaaatagaagtatctgggtccccgccttcagttccttggggtgtatacccagaagtgggcttgcagggtcatgtgataagtcctgtttttgattttttggggacccacggtactgttttctgtgggacatctgttggtttttgagaagcacctgctggcactgacggcagtcttggggaacacaggtgctcctgccagagtcctcaccttctgctcacattgcagaaggccccctgctgaggccggctggccggaggaccaccccgcagaccacgcgcccggggcctggcaccgagagggaggccccgatcagcaggcggaggcgacaccctgatgacgctggccagttcgccgtcgctctggtcatcatttaccgcaccctggggcagctcctgcccgagcgctacgaccccgaccgtcgcagcctccggtaaggcctgggcacggggcacacggggagggcccgttctggaggctcctgaggcttccacaggtcaaaatcctgatcctgatcaagcacaggtcttcacagtgacatttcaccgtgaccctggcccagagacagagaccattgccttgtggtggtccttggagggagattctgggtctgccacaggataccacaccctggaacattgcacaccctttgcctgggctcatcctggtgtttgtgccagaaatgccccctccccagcatacaccccatcttgtgcccagagggaccccattctgtccccacacacctggcccaaggctgtcatgggtagtgcctgctgctggccccggggttaggtctgctcagctagtcctggctggaaaggatgaatgtcccagaagcagctttgcaacctgctcggtgggagcagcccaaggctccgccctccttcttcctgccatttcccagatacttccctggctctgggatcctcgtgttcacgtggttctcagtgactgggtgattcatccccatgagctgccattattttggtgtcttttgctggacactgaaaccatcccctgtgattctgccattagctattatgggctgtgacatctttgcacctgtgccttctctttctttttaaatttctgaagtcccaatttgacccaaaggtgacacctctctctgtgtgccctgtcagtgataaaacctgctctagggatgaagatactgtggggtccgtgggtccgagctctcggagtgtgattctgtctcccctagaaacacatcatggcgtgtcctcagggcatttgtgcgcgggatttaagcagatgtttcctcaccgtgtttgtccccatgctctggcttcttgacctcaggttgcctcaccggcccatcattaataccccgatggtgagcacgctggtgtacagcgagggggctccgctcccgagacccctggagaggcccgtcctggtggagttcgccctgctggaggtggaggagcgaaccaagcctgtctgcgtgttctggaaccactccctggcgtaagtgtgacgccaggagccccatgtgagggctttgccaaggcagagtgcccccgcagggtcgggggctcagtggcagagcgccccaagaggacggtctcttgtggtctgtgtttcccctttaagtcccccgtgggggcagtgagcctcctgctctgcttctgtgggaatatcagagtcctcccctagatgtccacacacagatgcacacagacctgcacgtggagatacagatgtgcaggcgcacagagagatccctcaaggctgacacccaggaaggggacccctcacctgcgggactcccgacatgcagcggccaacactagtgtagtgcccagttcaccgccggataagacaggcccattccggtcacacacgggagacagaacccagagactggcctaagagcccatctgctgacggtcttgcccgagaggctgacacagtctagctgtggggactggcttcacccccaagaggccacacctggccgcagcacagtttatctggcccgtttcagaagcagcgtcagagagtcacagagtggcgaacgcaggagaatctgtgcgcgagaatctgtgttctagcatccatgcaagcgagggaaaggcgtttcgtcgttagaaaaatgcaaaatgagtgattctcacccacacgtgagactggattcagcaccacagtgtggctcccgtctgctgggagccagtagtgtttgtgctttggttttgctttttagctgcagagttcacgtgaggtgtggacatttgagttgctctatcgttacagggagcttgccttttctctgctggttggttttcacttttgctgtctctgtttagaagaaggcactggaacgggggtgtggtgggaagggccctgttgccgggatgggagcacagtcagggaggggaagacccactgcctccccacacaccgggagggagtgccgggaaggggagacgccatgcaggagtcaggcttgaatctgcggagcgttgtgcatctggggacgtctgtgcagcaggaacgctgcccccatcacagttgccctgggcacagtgaggagccgtgagtgggggctgtgctgggggtggcgctatggtgagcgagcccggttagcccagcctcattcttctcctgcttctgtgctttccaagttctagttaataagcaaccagcatggcacctggaatgtagtaggcgcttggcttataaaagagagaagaaaggaacccattccaccacgacggacgtcaggcccggctgtctgtcttgggcattcatctgcgtcctggcaattagctccagctctaatgacctgctctctgctttatgttgcacttattattcccagattgtaaagtttgtgccaaacatattaatgctaacatcccattttacagattagcaaagtaaggatctgagaggttatgtgatttttcccagagtctgcgagggcagggccctgtctgaagctgagacacaccttataacaccttgttatttggggcttcccatcagtaaaacgggagtcataatggggccctggcttctgggcagttcccataaaacattgtgcaatctgaagatgaaagtgtcagaggaaggtgagatgtcctttctgagagcgtctgccctcagaaggagacgggaccgcatcgcagctgtgtgaaccccgggcagtggttccagcagcggggcggacgcgagacagccccatttgagttttgctgctagatggcacgtagaacttgaacttcagagggtgctccttggaggccctgaccagacacagaagggaagggagactgttcccatggtcctgcctccgcggcagtgaggctgctcttcttacagccaggtggctcttgtcttcggtgtagggggctggtgaggaacacggtggggagcagcctgcgagggcgctgggctttcagcactcacggcacctgctgtttggtttggccaggatggcctgggagcccccagggctgggcaaaggctgccctttacagactcatgggcagagggaaccgtcttacccctgccccttctctgtcctctccgcagcgttggtgggacgggagggtggtctgcccggggctgcgagctcctgtccaggaaccggacacatgtcgcctgccagtgcagccacacagccagctttgcggtgctcatggatatctccaggcgtgaggtgggcatcctcccgtggccactgtgccctctgggcctaccgccaaacctgcccctcccccccaaacctgcacctccccgccaaacctgcccgtcctcaaacctgctgagcctgcccccaaatctgtcccctcctcaaactaaatcttccattctaagtgcttggaacaaaacaaatcaaccgattaaaacacatattcgaggattggccagagtctgaggatttccataacaaagccccattataagggttttcagagagccctggttatgtattaaaccccggaatggcagacccaaagctcaggctccgaggagctctcggaacctgcccctcacttcagtgcgggtctgttggacggtgccgctccccacctgctttgatcctaagggaggtgacagctgctgggcgctctccctcggggccacacgcagggcagcaggacaaaaggctgggcggctaatgtttaacctctggcattttaagcggcctgggaatgtgagccggccattgtgggctgcagatgaattggggaatggcccgagcgctgtcctggcctcccgttatccagacaggagggaggtgggagccagcctggccatggcctgtgtgggaccctggggtctaggagtcagaaccaggggcctgggtagcctcccccggcccctccccggggttgcactgtggctcaagggcccaggccactgtcctttccgagggctttttgatgtgaagtggccctggtttctgtcacattcttggaagggtgagtcagccctcaggcggggctggaggagggcagcggcctcttgtgcaatatgcaggtgaagctgacccgcctctgcccctgtctcatgggcaaatgtcactccccagcaggacccagcctggagacggggtcagtgattagtggagtttgttcatatgtgggcggggttggggcttgtctcatggccaggatgccaggtgacatgtgggccaaggaagctgaaattgaggcagaagaaaggaggctggagtgagagtccgaggctcccatggcctgggcgccccaaagccagaggtctctgaacggcccccaagccagtggagggagcctggcgtgctgccgcaggccccagggatgcccagggcccagggcattgaaggagcctcaggaggggcagttccaggcccagagccatgagcactcggcctccccagcccagcctgatcctgccagccttgatcgtttcataagcaagtgtgtaatttatctctgttatgcaatgaccagatctgagcctcggcccttaccttctctcctgcctttaaccctcctgcccatagaacggggaggtcctgcctctgaagattgtcacctatgccgctgtgtccttgtcactggcagccctgctggtggccttcgtcctcctgagcctggtccgcatgctgcgctccaacctgcacagcattcacaagcacctcgccgtggcgctcttcctctctcagctggtgttcgtgattgggatcaaccagacggaaaacccggtatggccactctgctcccctccccactgtctgggccgcagcttggagcagctaccatagtcctgtcctggccactccaagcaccctggctagctcctcctcaccacccccacctctgcttcacagatgccctttcaggaacgtgcctggtcacaggctgtgggtggagatgtgggattcactggcaggcccaagcactttgactctattgggagatggggggccctttctttctttctttctttttttttttttttgagagtctcgctctgtcaatccaggctggagtgagatggcacaatctcagctcactgcaacttccacctcccaggttcaagtgattcttgtgtacatccccaggaaaatacaactcttgtcaaaagtgatttaagggcagtggctcatgcgtgtaatcccaccaggatccctttgggaggctgaggcaggcagatcacttgaggtcaggaagaccagccttgccaacatggtaaaacccaatctctactaaaaatacaaaaattagctgggcgtggtgccgggcacctgtaatcccagctactcaggaggctgaggcaggagaattgcttgagcctgggaggcagaggttgcagtgagcagagatggagccactgcactccagcctgggcaatagagcgagactgtctcaaaacaaaacaaaatgatttaagatgtagaaagactaaatagtcctctcaccgttagagaatttgcattgcagtataaaaaccacggccaggttgggtttatcttaggaatgcaaggatggtttaacattttaaaaatctatgaatgccatttacctcaccagtacatttaagggaaaaatattatttttctcagaaatgaatgtacaaaagaattttgataaatgttatgctcattaatgattagaaagaaagaaaaacctttgaacagactaggactaggggaaactttaatctaatgaagacatctacagaaaacctgcagttgcaataaataacaatgggaagatactggaggcatcccctgtaacatcaggaacccactcacgttcaccactgtggtgcagggtggccttgccagtgcaatgaataaggaaaacaaaagcatagagatcagaaaggaagaaacaaagctgtcattattaggtaacatgaaggatctcatagaaaaaatctaaaatagtctacaggcacgttatgagaaacaattaggctgggcacgttggttcatgcctgtaatcccagcactttaggaggccgaggcaggcagatcacttgaggtcaaggagttcgaggccaacctggccaacatggtgaaaccctgtctttactaaaaatacaaagattagctgggcatagtggtacgcacctgtaatcccagctacttgggaggctgaaacatgagaatcgcttgaacccgggaggcagaggttgcagtgagctgagatggtgccactgcactctggcctggacaatagagtgagaccctgtctcaaaaaaaaaaaaaaaaaaaaaagagcctggcagcaggtggacgacgggcagaagatcagagcagtctgataatgcgcaggcctgggaggtggggtggagacccagaactgaagccagggcactgggcacggggagaaaggagggacaggaccaaccggttatggagcaggcaggaaggaggagtcaggggagtttgacgtctccagaagggagaatgagtagttgaaggtaccacccattgagaggcagggtctgggtgagatgggacacctgcagaggccaaggaaggtgtggcgcatgagccagggaggccgcctccaactcgtgggtggagacggtgtctgtggggctggaccggccctgggaagggaaacggaataaaaagaccaggctggaaccttccggcgagctgctcagggccacgtgcagacctgagctgctcctccttttttacggcaagcggtgggaccagacccctcttacctcaagagggaaggcaggcacccccacctcgcaggtcacccttgagaagcctccatggcttcccagcagtggtaggtggagcaccaggcctggcccatgaaggacgagccccgaggcgtgtgtcagaccagccagggccaaccttccccgccgcctcccaggtgcttcccgaggccgaggccccgggctggcgggggctccgtgtgcggggcccatatggcagggtcgctgctcctgcggaggggtttcttcacatccgcagccgggcgcatccccgcaatgggcacgttctcatccgcgcattggtctgggaaggctctgagaagtgtgcggatttcatctcaaaacccctctagtgtgcttttgagtggcgtgaatgggggagaggggagtcggtgcaggccactccctgcaactcaacaccccagcgaaactgaggcggcccctgggttcccacactgactcgtcgcctgccggagtgagcgctgtcccggcagccacgcacggctgagcatggagaaggaaagggcgacccggcagcgttctaggggcttggcagagtgcctgggctttatggtttttttgtaaacccacaatcctatctctgggcgaggtttttcatctctcagagcgctggcaggctgaaatgatttattatgcatccgcttttgtctttgttctatttctggaaaaggtggtacattggttagggaagcaggtacgaccctgctgcagccaggatggcacagccctcgcactttgttttcaaaaggtggtttcgtgggtttacttttcgcattacttgaagcagccatccagccaaccaaccttctcacccccttccttttcctgagccagtgtgatttccactcaggaaaccagggtgtttggtgtagagttctccagccacacgctcgcgcctcctttcctgaccgaggccacagtctgaggcaaagggcctgtctctggcataacttgagcctgcgttccctgcttcggttcctgctctgttccgtatctgacagatgcgatgctgacttggggccctccccacctcgggggcgttgtttctggagggtggctggcccttcgaggctgatgtgtcagcaggggcacccttagggtgccgtgacccagtgcctgagcaaagtggccttaagcctggggttgaggcgggggccctcgttctcctcctacgcttctgtgtctgttaaagggtatctccctgggaccccctggtagggtggactgatgggatggctgctgaggattagacagtgtgtccagagcaggccggttgggggtggggtcagggtggtgggaccctcccattgctcctattgctcccattgctcccatctcccccatctcccccatctcccccttctcccccatctcccccatctcccccttctcccccatctccccattctcccatttggctggttcagcctcccgggacccagaggggagcctgccatcctctcccagctggcggcagctttgggagcactggctggggcagcctctcccagagcactgggcacgaagctgcccctcccagagcgctgggcgtgaagctgccccccccaccccagagcactgggtgtgaagctgcccccccaaccccgagcactgggtgtgaagctgcccccccgccccgcccagagcactgggtgtgaagctgccttggggccacatcttcaagtgcagttccggggcatgtgggactgggtttgtgttcatggcctcagagactagtctctctctgtcattctcacactgctttctgtgtccaggcaggcagggctggctcacctgctggctcagctgctccgtggatgttgattttcaattcctggctctcagccattggccagacatgtagccctgctcagctgaggacagacacatagggtggtccgaattgtgagctctcccatcccccacccctcactcatgcctgtctgacctcagcctgggatgcaggggcccttgctgagcggcccctccctgcgcagtttctgtgcacagtggttgccatcctcctccactacatctacatgagcacctttgcctggaccctcgtggagagcctgcatgtctaccgcatgctgaccgaggtgcgcaacatcgacacggggcccatgcggttctactacgtcgtgggctggggcatcccggccattgtcacaggtgaggatgcacagagtggccctgcataaaaccacagatttccaacagaccccagctgtgcaggaacgctgccctcctttctcttccctgcccagccccaatgcttgtccagcccccagcagaggaggcctcggccctgcacactgcgagtgcatgcacaggggcactcgcagacacctggggcgacgtcttctgtgaggtgtgagctcattgagagctgggtccaggtctgttcagggttatttctgcagcacttaacagacaaaagttccacgtctacacatgggagggatggagggaagagcgagtgagtgcatgagtgtgcaggtggatggatggaggggtgagtgagaggatgaatgggtgggtggggggtgagtggatggatggatggggggtaagcgagtggctggatggatggggggtgagtggatggatggatgggggtgaatgagtggatggatgggtggaggggtgagtgagtggatgggtagatggggtgagtgagtggatggatggatgggtggggagcgagtggatggatagatggggtgagtgagtggatggatggatgggtggggagcgagtggatggatggatgggggttgagtgaggatggatggatgggtggaggggtgagtgagtggatgcatggatgggtgagtagatggatggttggaggggtgagtgagtagatggatgggtgaggggtgagtgagtgggtagatgatggatggatgggggtgaatgggtggatggaggaatgagtgagtgagcagatggatgggtaggtggatggagggatgggattagtggatgggtgggtagatggatatagggatggagagacgagtgagtagatgggtgaatagatggatgagtgggtagctggatggatggaggagtgagttgagtggatggatgggagggatgaagggctgagtgagtgagcagatgggtgggtgggtggatggagggatggagaggtgggtggatggatggatggatggatggattggataagtgagtggatgaataggtggatggatggagggatggagagatgagtgagtggatggatgggtgggtggatggatgggatatgtgagtggatgaataggtggatggacggatggagaggtgagtgagtggatggatgggtgggtagatggatggatgggataagtcagtggatatgaataggatggttggagggatggagagatgagtgggtggatggatggatgaaatgggtgggtggatggattggtagctaatggatgacaatgaaatgagtaaatggatgggtgggtgcagtgggtggatgggatgagtgagtggatgaatgaattagtgaatcagtgagtagaacaaacagtacttcctcagcacacattttgcttaaaatcagaaagttggtttgctccctactgagaaaaatctacctttattcacaaaaagaagaaccccttttcctgggtaatccctgggttctggggattagacgcagtctgaggccagaggcactggggtgggggggtgttgctcccagggcagcacccagcagccacctggggccagtgccatggtcacttgctggaccgtcctggtctccacagcaacgtcactgaccagcctccaaccaggcaggctcctggctagggtgttctgatgtgactcatctcccttactctaagggaccctgaagaacctttttcacctccacccagggccactgaggtgggggcaggttgggcggggtggcagccgccacttcctgatgtgacagggaggcgataccttgcctagattaggtgcttactgtgagagacgctgagatgaagaacatggcctagaaaggggctcgtatggctttgtcgaaaagccacctcgatgtccaggcggagcaggtctctgcgatgcctctgccctttggactctaaatccagatagttcacgtttcctacttgctttaaaaacaggtttcggtttgttttgtttaacacttaggtctgtcttgtacaagatcttaaaataactcccggggagcctcagactgagctgcaggcactggtcactggctgctgcctcccccggccatccagggcttccctgactgtcctcagtggtcctggttaactggctcctccagagggcagtgggaagtgctggagggtgttaaacaggagggagctgggatctcttcaatatttaaataaggagagtggggaggagcatagcctaggccagggtggggcaaggggcacagaaagaccaggtctcacctgctggttgctcctgtcccaagtgtcaccttgatgctctgcatggacaggcggatctggtttgtcacactgtggctgggagtgacaactgtgcttcagagcatttcttcctctatctaaacaagcagctcgtatagcaggctcggtggtgaggcagtttcgggggtgtgtgtgtggtgtgcacgtgtgtatggtgtgtgcctctgtggtgtgtgtgtatatctgtgatgcgtgtctgcacacggtatgtgtgtctgcatgcatgtgtatagggtatgtacatgtgtatggcatgtgcacgtggttggatgtggtatgggggtatatgcgttcctcacccgctcacatatggccctgtaggtgacgccgtcctccatctgttttggagcctcatcccttgcaccttgggtccatcatggcctcctgacctctacatggcccagctggcagggtcctcccaagcaccgtctgccttcacgatccctcctgcaccatctcactgccaccctccagggtctctggtcttcctcagcagcccccggcccagatacgccccctgcctcatggggccaatccaggagcagctcctgccacctgggccagtgagcctgagaccctacacggagagactgtgcttggaggggccctgggctggctccctggactccttgctccttcctctgagaagggagatgctgagtcccccatttcaccccaccctggctggtccttggcatggggtggccactgggcacgtggccctcacccttcccttcctccccgctgtgttcaggactggcggtcggcctggacccccagggctacgggaaccccgacttctgctggctgtcgcttcaagacaccctgatttggagctttgcggggcccatcggagctgttataatcgtgagtgtggggccttcacgggagtccgggtgccccaaacatgcatgagctggaagggctgttctgggttggctggggccaccaactcctctgagcagccgacggggggcaggaagggccaccttgtaacagtcagcaaagccgccagggccctcccggacctcaccctctgatcgtggattcaggtctcgcgtcgtgtccgcatgagaccatctgcgtccagcacccaggagggtcccgcacaggcaggctgggtgtggtgggcgctgtggggcagtgggtggacaggtgtgcttcgccccacaggccagggttcgggtcctcctcacccagccacccctccctgacagggcgaagggcctcaggcgcttttggcagttggaggtctgcagtgacgagagagaagacattgatcggcttgttttgttttcagatcaacacagtcacttctgtcctatctgcaaaggtttcctgccaaagaaagcaccattattatgggaaaaaagggatcgtgtaagtggggctgaacctgaccggccagccatgtcggctgggccctgagaccccgacgtccagtctctgcggggtggggccccatgagagcgtgtaggcctcatggaggagggctgggggcagcctgggtgagccccagggctccagagaggtttgccacgttgcacctgcaggggctgggggaggttagctgaggggagggggctggaggaggttagctgaagggagggggctggcagccagtcctgggcctcagtccctcccgcctggcacagaagtattgggctgtctggaatccccagagtggagatgggtggggtgggggagatgaaactttctggtgggtggtgagggtgttgctgaggccactggaggggaggagacccccccaccccactgtcagagggtgcagtggaacaggggcccagcacagagggaacctccagtgttctagggaggagaggggaccttcgaggccccaaaggagcaggtggcaccgcgggaggactcagcacagcgtccaggagccacgacagggtcaggaggggttgacgggggcatctgtcagacaacaaggccagcccctggtgacctggtagctgagatgggactgagccagggatgggcgaagggataatgcttgcgcaggggctgggtgtcaggaggagtgtgaggctcccggcccgggaggagagagccgagtctgaaggggggtagggcagagagggagaggcagtgagtggcctggaaggccggatatgggggtgcacggggggtctggggccttgtcagttcctcgtcttcagtgccatccacgacctgtggaccttgcgggctctgtcacccggattcactccatcccctctgaaccctgggaggggatgcgcctttgtcttccccttgtacacatggggagactgaggcagagctcaggaagctgattgcagggtcacagctcaagggcaggtcctgggctcttcctcttgcctctccacagggtatctcacgggagctagtgcagccatgggcatggctcaggccccttggcctggtgtagtcctcacagctcctgttttctcatttgcttcctaatgtattccaccaccacccccactaacacgagctctgtctggttcccggatgagtccgtacctggctacgaggggaggaagggagcaaggtggatgatggctgggtggacaggtggacggacagatagatgggcggacgggcaggcaggtggacaggtggacgtgcagagagggagggaggaagggagcaggtggtggcgatgggcacaggcctgatcctgccctcccgcagctccctgctgaggaccgcattcctcctgctgctgctcatcagcgccacctggctgctggggctgctggctgtgaaccgcgatgcactgagctttcactacctcttcgccatcttcagcggcttacaggtaggtgacggccgagttgcccgcgggacccctgcctggccgccgtgacaccatcgctgtgatgcgaagcagtggaggcctctgcggtcccaaaccagccctgcctgggtcccgcgtgggggcctcctgtggctgtgaggactcagtcccttgtgcagccggcacgggggctggtgcctcctccccactgtgtctggggacgatgaccctagtgccaggccagcacaagtccacttgtgtctccagggaacagaagtggccatttctagtcataccaagggccacacagcaagtggacttacgacacagtggggaccccagaggggccccaaggactgtggaaggagtgcccagaagactggcctgagccggggccctcactgcctccagcacaccgggggtctggcccaggcatctcagtttctgagctcccccacctggcctccagatagcagcagtccctgaggaggggaggcctggccgtgtcctgggccgtgtggccggacatgttgtgtgcactcaaggctgtatgcgcatctgtgctggggcgcctaagggcaggtgcctagggaggcagcagcaggtgctgaccccaccttcctccctccagggccccttcgtcctccttttccactgcgtgctcaaccaggaggtccggaagcacctgaagggcgtgctcggcgggaggaagctgcacctggaggactccgccaccaccagggccaccctgctgacggtaggaggcgccggggacaccgcgggactgggggctgggcggcatctcgaggggcgggggagggtgatcgagcctcagccccagtcctgcggcccgtatgcccctcacggtggggatggcagagccgcccgcggtgcacggtgtggctgccgcgtcagaaccagaaagtgacagaatcggccagatggggcctgggtcgcatcctaaccctgctcttccaggccttagaaagagagggtcaggaccaccgaggatcctgaccagaagcagtggccgtagggagggcggcagcccctgaccacagcgcgggccaggatgtgcttccctcagctgccaggaggctctcgtttgcagtgagggttgactgcttggggccagctcctcctgtgtgccaggcaggggcccagccagggtgtgggtgtggggggcttgccgtggggacagagtcattccccgtggtggtcatgtggtggccaccacttggcagtgaccagcccctcccctcccttcagcgctccctcaactgcaacaccaccttcggtgacgggcctgacatgctgcgcacagacttgggcgagtccaccgcctcgctggacagcatcgtcaggtcaggccgcagctccgggttcggggaggtggctctcgaactccctcaggttttgcccctgccaccccaacctgtgtcctgccattcaaccaacatcaccttccacccccaactttccacccgcaccttcttcccacccgcaacttccctccctgccccgcaccttccctccccgcctcgcaccttcccttcccctgcaccttcccccaacaacctttcccccaccaacttcccccaaccaaccttttcccgtgcaaccttcccccccgcaccttccccgcactgcaccttccccccgcagccttcccccctccaccttccccctccacctttcccctgacaacctttccccccaacctttcccccagcaccttccccccaacctttccccccaccaccttcccccccagcctttccccccaccacctttcccccacccagcctttccccccaccaccttcccccacccaacctttccccccaccaccttcccccacccaacctttccacccaccaccttccccccacccaacctttccccccaccacctttcccccacatactcgggaggctgttttgtctgtgctgttgttgggaacacagaaggggtaggggcagagaatcttccagagaactttccagcacctcctgttccctgacggatgatactgagcccaccctccctggcctctctagggatgaagggatccagaagctcggcgtgtcctctgggctggtgaggggcagccacggagagccagacgcgtccctcatgcccaggagctgcaaggatccccctggtatggcttccctggagggggaggaccccgtgggttgtttttcccacgtcccttcggtcactggacagactgcccctgaagaagcactagcagcctcgccatgctcagcgtcagcatgccaggggcccagtggctctgcttggccctcggtgggactccctcacctcccagggcctgagcctccctgtcccccgcgcatccacaggccacgattccgactcagatagcgagctgtccctggatgagcagagcagctcttacgcctcctcacactcgtcagacagcgaggacgatggggtgggagctgaggaaaaatgggacccggccaggggcgccgtccacagcacccccaaaggtgagtgtgtggggcacattgggccaggctgggctgtggacagcgggctcggggcaggccttggctatggctgggtcccttcctcccaggatatgcccagcagcactgcagccacatgaaaggacagcctggggtggggggactctggttgggctcccccacagcctctggagggctcctccaggccaaccccctgagcggaggcaggaactctcaggggggtctctgtggactgtcaccgcaaggtccaggtgaggctgccagtgggggattagcctgtatagttactggtacagatgcggcgggggctcccaacaagggccctgctgccaggactcgccctcctgggcctcagtttccccacctttagggttcagccctaccaggcctgcaggttggggagaggtgggtcagagccaccagacccatggctctcaagggagcagctcgagtggcagtgccgctgcctgctgagcaccgctctcgtgcctcaggggacgctgtggccaaccacgttccggccggctggcccgaccagagcctggctgagagtgacagtgaggaccccagcggcaagccccgcctgaaggtggagaccaaggtcagcgtggagctgcaccgcgaggagcagggcagtcaccgtggagagtaccccccggaccaggagagcgggggcgcagccaggcttgctagcagccagcccccagagcagaggaaaggtgcctggggaggccggggctgcagtgaaaggctggaggacccagaagggccagtccctggtctggaggtgggagtggggctggggctggtggggcaagtcagggcctgggcagaacagacgtggcctcctggcctagccctgggacccggggaaccaggaggaaggacaggggctgaggctggctcagctgcacacggcccagcagctgcccccggcagcatcacccggacttgaccttgccgtgtctcctcctcccaggcatcttgaaaaataaagtcacctacccgccgccgctgacgctgacggagcagacgctgaagggccggctccgggagaagctggccgactgtgagcagagccccacatcctcgcgcacgtcttccctgggctctggcggccccgactgcgccatcacagtcaagagccctgggagggagccggggcgtgaccacctcaacggggtggccatgaatgtgcgcactgggagcgcccaggccgatggctccgactctgagtgagtagcctgggcctccagggcggggatcacccacttcccccttgtcctgagtcaggagagagagggggcagtggtcagggacctgacacccacctcacctggagccctgagtgcagaggaagcccaggcggggatgggggaggggggaggcgctgcagctgaggtcaggaggataccccggagatgggcagaccccctatcctggggacacgtctcaggcctctgggactctgaagccctggccagccccaaaatgctaggacctaaggtgctgggctctgcgtttgatcagcattgtctccgcctgggaccactgccacccaccttgcagttgaggatactgagggtcccggaatgccaggggtgaagggggcggggtggagctggggtcctggccccagacctctccctgtcgcccctccctccctccaaactcacaagggagaagccaggtcttcagaatgccccttccaaaagtcactgtagagatggccggtttctaacgtggattccttgcgctcttctgaaagaccagcaacacagaggcccacaggctggtcctggtcccctctcctgcctcccaagggcagcctcatccaacatgagcttgccctccctggagcccccagacgccccctctaccctgatggggtgatcctgcccccccgtgtgacaaccttgggccccaccaagccgctaccctcactgacccttcacctgcttgctggcttcttcccacgcgcagaggcagtaatgaaacttcaatttgaaccatcagtaatgaaacttcaatttgaaccatcaggaaaccgtgaggcaagcccgtcaccccacacaggctgcggcatcaccctcagaccttggagcccaaggggccactgcccttgaagtggagtgggcccagagtgtggcggtccccatggtggcagccccccgactgatcatccagacacaaaggtcttggttctcccaggagctcagggcctgtcagacctggtgacaagtgccaaaggccacaggcatgagggaggcgtggaccactgggccagcaccgctgagtcctaagactgcagtcaaagccagaactgagaggggaccccagactgggcccagaggctggccagagttcaggaacgccgggcacagaccaaagaccgcggtccagccccgcccaggcgggcatctcatggcagtgcggacccgtggctggcagcccgggcagtcctttgcaaaggcaccccttgtcttaaaatcacttcgctatgtgggaaaggtggagatacttttatatatttgtatgggactctgaggaggtgcaacctgtatatatattgcattcgtgctgactttgttatcccgagagatccatgcaatgatctcttgctgtcttctctgtcaagattgcacagttgtacttgaatctggcatgtgttgacgaaactggtgccccagcagatcaaaggtgggaaatacgtcagcagtggggctaaaaccaagcggctagaagccctacagctgccttcggccaggaagtgaggatggtgtgggccctccccgccggccccctgggtccccagtgttcgctgtgtgtgcgtttgtcctctgctgccatctgccccggctgtgtgaattcaagacagggcagtgcagcactaggcaggtgtgaggagccctgctgaggtcactgtggggcacggttgccacacggctgtcatttttcacctggtcattctgtgaccaccaccccctcccctcaccgcctcccaggtggcccgggagctgcaggtggggatggctttgtcctttgctcctgctccccgtgggacctgggaccttaaagcgttgcaggttcctgatttggacagaggtgtggggccttccaggccgttacatacctcctgccaattctctaactctctgagactgcgaggatctccaggcagggttctcccctctggagtctgaccaattacttcattttgcttcaaatggccaattgtgcagagggacaaagccacagccacactcttcaacggttaccaaactgtttttggaaattcacaccaaggtcgggcccactgcaggcagctggcacagcgtggcccgaggggctgtggaacgggtcccggaactgtcagacatgtttgattttagcgtttcctttgttcttcaaatcaggtgcccaaataagtgatcagcacagctgcttccaaataggagaaaccataaaataggatgaaaatcaagtaaaatgcaaagatgtccacactgttttaaacttgaccctgatgaaaatgtgagcactgttagcagatgcctatgggagaggaaaagcgtatctgaaaatggtccaggacaggaggatgaaatgagatcccagagtcctcacacctgaatgaattatacatgtgccttaccaggtgagtggtctttcgaagataaaaaactctagtccctttaaacgtttgcccctggcgtttcctaagtacgaaaaggtttttaagtcttcgaacagtctcctttcatgactttaacaggattctgccccctgaggtgtaatttttttgttctatttttttccacgtactccacagccaacatcacgaggtgtaatttttaatttgatcagaactgttaccaaaaaacaactgtcagttttattgagatgggaaaaatgtaaacctatttttattacttaagactttatgggagagattagacactggaggtttttaacagaacgtgtatttattaatgttcaaaacactggaattacaaatgagaagagtctacaataaattaagatttttgaatttgtacttctgcggtgctggtttttctccacaaacacccccgcccctccccatgcccagggtggccgtggaagggacggtttacggacgtgcagctgagctgtccgtgtcccatgctccctcagccagtggaacgtgccggaactttttgtccattccctagtaggcctgccacagcctagatgggcagtttttgtctttcaccaaatttgaggactttttttttttgccattatttcttcagttttcttttcttgcactgatctttctcctctccttctgtgactccagtgactcagacgttagacctcttgatgttttcccactggtccctgaggctctgttcacctttcttcattcttttttctgtctgtccttcagatttggctatttctggtgctccgtcttcaagttcactgattttttttcctctgtcgtcttaattctgctactgaactcacccagtgaatttatttcaaatactgtaattaagttttaaaatttccattaggttcctttttatttctctgctgggtacttctggttttccactcattccaagagtgttcacctttacttcatgaagcatggttataactaggactgcagtgaattctgggataatttgaacgtttgagcatcttggggctgaaatcgtcttttctgtttgcattttcctggttgtgtgctgagtaactgcaagttgaatcctcactcgtcatgtggaatgttaggttagactctgggttgttaacaccctcgttgtaagtgtcatttcatgtgtttgtttcagcagcaggcaacctggtttaggttctgaccactggttctgtctctctttccacgagcagcaggtccaccaccaggtcagcccttggccttggctgtgctgttttgggtcgttgcctgcactcacaggtggggtgggcagggacgtgtgtcagcacatgtagagaatctgggggtctgcttctccagcactctccttgctggaatttgccttgcattttctcacttctggggtcccttttcttggtttctctgtccagaaagatgggtttctcccagagctctagccacctgcactgtctcacgcttccacccttaaggaaacagggctcacccttaaggaaaagtagtgacagcaaagagagaaaaatgggaaccccaaccctctctagtccacagtgcccccgtttcccaggcctctctggagttgttgccctggtgctggctgcacaggaccacagattagggccacccccgggtcaaatctgagagaggaaaaaccacccatgtgcctgaggtcatttttcaagttgttgctttctcctcagttcacctgctaacgtttacatcctagaatgctcagtggctaacatgatagaatatttctacctcaaccccaaagccatgattagcaggaaaatactagaagcatctgagagagagaaagcagtccaggtagcccggagcaggcctgtccatcagccaggccaggatgtccatgtgaggaccacgaagtgctccgcagagcatccgcagcagaccgtgacgggtgagggctgaacgagcccctctgtgatcctgcctgaacagatgacagcacaaacaccggccaagccacagggcgtcgactcccccggcccaggtgacaggggtgaccgcagctgcttcagtcacagcttcagcctcgccttgggctcctcagcctggaggcaaggcttgttaagacccccaggagggtcaggcagtggtccatgtctgtaatcccaacagtggctggctgaggcgggagttccagaccagactgggcaacacagcaggactccatctctacagtttttaaaacttagcacagtggatcatgcctgtagtcccagtgctttgggaggctgaggcaagatcgcttgaggccaggagctcaagaccagcctagacaacatagcaagactgtttctaaaacaaaattaaagttagctgggtgtggtggtgtatgcctgttgtcccagctacttgggaggtcaaggctgcagtgagctgtgatcacaccactgcgctccagcctgggtaacagagcaagaccctgtctcttgaaaagaaaaaaaaagaaacctccccaagaaggaaggggcttgggcccaggcaaggctccggcacagggcaacatgggagccagagactggggagaaggcaggctcagggtgtttgaaaccagctcagggcctcgggaaggagcctcccaggtgtgaggtgagggggcatcatcctaggacccatgtatcactgagattatccgggaacaacgtagggggagaggagagcgagggctttgctttcatttgtatcacaagcagggagtaggtgtaggtgtacaggcacccagctcttggcctggaaaatgttcccccatcgtcttcatggataggtgtggcaaggggctaaggccaggccactgggggtacccttgcaggcagaaggggctacctagctacctgtgctcctggaggcccccaggtcttcaagaagtcatctgaggggcacagcctctggagtgtgccagccttgggtgctggggagggtaggaaagaggccagaagagcagcctggagacttggtcccctggccaacagtttctgctgaatctctgagacatcgcaccaaagccctccagagttggccagtggccttgtagggggcagggcaggccattgtgcctgctagagaggggagccctgccagtcaggaagctgtcaccatggagcctgggggctcaagggggcagaggcaggtttgtgtccccgcttcctccactggccgatgcacaggccctgaggctggcaggacggtggagcccgctggaggttggagcgggggcagccttagcgctgctggcctggtgcccacaccaccttctgcctggctgccccacctcccacctactcatgtttctgtgacctgggagggttcacctagggcagagcagtaggcaccacaagggctctcccaccctcagttcccaggctggaggcccgaccacagccataaatcagggaacccctgagcccagggaggctccgtgctgggctgagctggcagaacaaacgcggcgctttagctcggcctccatgcccagctgggccgaggatccccaggggcctgtctggtcccactggccagcgctctgcctgcctggtagagctggggcttgcccctggccagggcagcactgaccccacaccccccacctccccaccccagcccagcaagggccacggctccaccttaggccccgtttcctcacctggcctgcggggttctggcccactcctcaccctcaggacactccctgctgcgtgggggcctaggctagaaggaagggtgccccaggtcaggggacacccagtggggagatgggaggaggggtcaggatggacagtgggccccatggcagcccccaccctgacgcaccagcaagaactcagggcatctgggcaaggccctctgcgcaccacctggctgcctctggaaccttcccacccagagaaggggaatgcacctctggtccccgcaggaacctgtcttgaggcaccaacaacacgctacgaaggactcaagcccagcaagaggaagagagccaaggacacaggtcagcatcgcaggcacctactctggagtccaggagcagggatacgggggcagaggatggagcagctgggacctcagggagaggtacgcaggttgccatggctgcgtctgcagtccacctgcctttccacgccagggagtcagtgatgtggagccccctgggccccagtggaagcagcgatcagactatgtgtccttgaaataatgtttattccacgctgtcccgacagccccctctgcaggtcccctcggtgtactctgaggtgggaaaccctccctgggggcggtgaaggggaactcgggccaccccaccagccagcagatgctccagcagccagagccccagcctggagctgaggctcttcctggggctcgccgggcccctgcaggcttttcggaccctcagccagcccggcttcctctgctttgggcagcagcaagctggcccttgggcacctggactgctcaccagccgcccagccatgggtcctgctctccaggttccttctagcagatccatctctgtcagagcaagggactcaggcctggaccatcttctgggctgtcactggggctctcagtggccatcccagctctgcgctggcccttctggagcgtgtaggcagacggccccagccgcaggatcttcccgctgcccaggcactcgtcccccttgtagaacacagcaaactgtaggggagagaccctggcatcaggggtgccacagggagccagccgagggcaggcaggggcagagtgctcccctatggggcctggcctgtgctcggagcaccaggcactgagctcccaggggagcagggttttgctgctgctgctgctgctgaacaggagaggagaggcctggggcacccagtggcttcactagggagggtcttcagggtacctctccctgagtgggacagtcacaggggcctctcctgggactccaagggactggcaggtctctgcaccccttgggaatgtggagctgtgacaggaaggagcatggtggcagccagaggatgcttccgcttccctcaccccaggttccctcccaccacctgcccctggagattcctcaggcctacacccaccaggcgcccaccctgggagctcctgcacactcggcccacaggggccccgaccctctgcctctttgagcactgtcctcatgccccttccattttctgtcctcgcttctggggcccgggcagcagctgagcctctcagggcccgagcaggaactggctggttggtgacaccagagtggaaatcctctcacagttgtcactgtgggaggagcccccagggcagggctggtggcactctgccctcaccagctgtgtgacccgagcacaccctactcctgggcctcagccccttcctctgtaacccgggtgccctggcagggtgcagagcagtacagtcctccccgggctcacccccacaccccacgcacctgtcctgtggcaagggcacgcacagcctgcacagctgtcacccacacggtgccatcttgattgagggtcagcacacagggcactgggtagaagagaggggcccttggagggggcacaggcctttcctggtcgacctcaggcccccagggagaaaggagcaccagcccacggggtcaaaaacccctgcttagaggggaagggcagggcaccagcctgggccctggacgcagcaggacactgcggggcagtgtacacacttgcttcagcccaacacgccggggcctgcctgcatctgctcccagcacccccaggcctcgctcagggcaggcacaggacacgggagttctaaatactttaggtaatctccaaatgatctccacaacgggactttcctaccccagggtctcccatccctggcccaaatctggcctcaggaagctcagcttcaaggggcccgtcctcaggagccctcccgtcagtcacctagtgccatctggtggcggaatcggaagtggcactccatcatcttgtcccggaccagtgctgcgggaggctcctccgcaatccagtgcacgcggctggtcctcagcaggtccctgtacagggctgggtggtctgtccggggggcctgcagaatggaatgtgaaggtggggacgccgaggggcacctggccccaaggccggcctcagtgtggtccctgggaacaactgtcctaccagcacacacacacacaggtaacggtgctggcaccgctcgaagtgttctacccacagaaattcatctcatcacccgccgggcctttgaatccccattttacagatgaggagactaaggcccaggaaggaagtaccatgtcagagtgggcaagaggcaggggtgagatccgagcccatgacagtgaatgctgcaggttcaagtctgactcaggccctctacctgcaaccacctgtggggcagcagcacggcccccctcgaggactggtttttctattcgcagggacaggggccagccacaccacgggctcttctctcaaggccaccccaggaattcctccacacaccaaatggctgaggagaaaggagggactggtagctgctggcttcccacaggtgccccaggactggccctggtctggggggccccagataccctaggttggttctgaggcccctgctccctgtcacccacccatggcctcgggccattgagacctggcacctcctgggattgtgccaagccccgcccctgaagcaggacgaggagcatgaagttaagggctttgggttctaagcaggcaccaagacccgtccagggacaggaggccgttggttaacccttctggtcttctcacagcaaactgaaatctagatcatttaattcattcgcagccaggcttttctccccacaggtcttcctagtaaggagatgtcctggaatcggtgggtggggcctgctggcccccgcctccgtctaagagaaggcgccccagcattcgtgccagaacatgagccggcagccagggtgctgagagtgggccttctcagctccacgcgccaaggtggaggccgggtcactcagggaagaggctgtgctgaacacggcaagcagcatccccggcctgacccacagatgcagcagcacccgcgtccttgcttttccacccaagctgtgacaaccaaaaatgcctctagacactggcaaggtcccctgaaggtggggtgagcttgccgccactgagcggccctgctttgaggccagggtcacagtggtaaggtccccactgtggtggaaggcttggtttgatcctggcttggccatctgcacctgcctgacaacaactcactggatcctaccatggtgggcaccatccttggcactgaggccatgccctctccaccggatgagccacccaagctctgggcgtcgctgtcctctttcataaaattggagaaactgtatctgtgtatcggggttcagggatgattaagagaccagcatacaactcagcctaatgaataccttaaaactctcctgccaccatggccagtcccaggaaaggcaggggaccaaggacaggaacagagttagtcacagcctccaggaagccacggctgctggaggccttctcaagccctggtctggaagcactgctggccctgccagaaccagccccagtgctgtctcagaggccggcccactcaccacaaacacgtcacccttgacgctgtccttctccaccacgtaccagggctctctcaggccacctatgtttgctctctggcccaaggtatacaggaaccaacctacagaaagacagtttctccatgaggctgggcaacaagttacagcccacatgtcacgcctcatcatgaaggcagatgctgggagggcagcccagagcaggcccagcaatggtgtaactcactaggaagatacgattctccaaccaccaaagccagccctgaccaagcacctgagcacatctcatcattgtccaggcctgggctggacatggggtgtggtggccacaaagaaggcaccttgtgccccagaaggtgcaggttccagctgtaggagcccctgaccctaggcccaggatgcggctgggtgccctgtgtgacgccaggggcccttcttgctgagcccatgacatagctgcacgtcttcacagtgtccatctaatgcagtaactgcatcagggctacccccagctgctctgcgcaccctcacaatgtcacacagcagatggcaaactcactgcctccctcccctgcagtggggcacacaggcagagagaacctcatgggatttaccacgtggcctgggccggcagccttcttcagtgaagtgaactgcaggtggaagccatgagtcatccaactggctcctgctggggccagggctggcagatacatgggcaatcctgtctggcagttctgtcccaagcaaagctgtcacctccacctgtctcaggaatgcctagccccggctccgcctgccgtctcccctccacaagaggtggaagatctccaagtgcaattcactgcaagacgccctacacctgagctgcagcctggctctcctggccagtcccacagctcaggtctgtgctgtgtcaagacctgcctgatcatcacgccggcaggcacatccccgccactgtactaacccaacaatggctgcactctgtccccacagcaggactgcacactgtgactgactcggagcctgtcccctgacaccaggcacagcacaggctcacgcaggcctcaccgcagtaagggtctgcacatgagcgagcagcactctggccagcgcggacgcctgatcccatcgctgcatgtggtccttaatcattcacaccatgccgggacgtccaccttactccctgaatcagagtggagttttgtgtagtttaacattttccttacacaggaaggaaatcattctttttacagggacttgatacgtaactcacagagtatagtccttccaagtcagaggcgcgcttttcatgaactccagcatctcagctgaggccacatctggaagtgcacccagccaccatcaaggcaactgttccaccctaggccgtgcccgcccccggccgccccacagagccttctacaattctccagccaagtggaagggacgacaggaactctggtctagtctcccagagctgaaacgccacagctctaggcatttcagatgacaagtggcagagtctgcacctcacctttatgtgttcccagaaccttattgtcttctatggaaataaagtgaccaggtcgaggctgcagatactggaaaacaaacatgtcattaccgacggagatctaggcccagggcagacacgcagccccatctctttgtgtcaaagagcagcacgcacctgaagaaggaaatgttcaaaattcctcttcccgatgaaacacatgcccatgctctgaaatgagaagacggcagccgtgagaggagcagaagtggcggtggcccaagctgtacccagacgtcctgagcgggccctggggcctcccggcctcaccccacactttgcttccagggtaggggcccggctgcccaccggcaccctcggccgccagtcacagccggcgcacacgatgccagagccttagagaacgcctcattgtctcggcccgcggggtctgaccctgcgcgggagaccctcacaccagctgccccggggaagaaagcagaacccggtcaggtccttcaggccactgtcctgcgaggagtgggggagagacagggaccagagaaggggcaggtagcaggaaagccaggcctgaagctaaggccttaggggagggctccaggggagtcagaggagagaggcgccttcctcaagcacatctgccctagctggggagcctgggtggcgtgcgctctccaccgtggccccatcaggggctgcatcgtttactctggtttgtgtctctcaagactgcccttccatccctgcggctcccaccacagagcgacaccggaaacggaaaacaagaggagaggaggacgggcggtgggcgtgctcttcagggaagatggctctgatgaaaggtatggccgtttccattaccaggaagagacacgaaggagcaacagctcccaccgcactggcccctgaagaggtgaggctcatcccacagcgccctcgccctccatccccaaggccctcccacgggcttcatcctagttccgccaacactccgggttctctctttttgagacgagtttcgctgtgttgcccaggctgtcctcaaactcctgggtgcgctcgatcctcctgaggagctggggccacaggcaggcacccccacagcggctccctggcttctcctcgcctcaaggcctttgcactgccgttccctcatctggactttcccagccctctctgggacaccggatcctctcctccttcaggtctcaggttccatgtgacttcttttgaggccgtttttggcatctccattccctactctcagaccccactggtgcttcccacccagggtcctacacctccctccgtagacattttctaggtttacactgattggcctcctgcctgtgtcccccactcgcgggcgggctccatggaggcgaagatggaactgtgtgcgcgtcaccaattcctcgcggcccagcagcacagcgcccgaacagatggcaccgaacgagtctgtgccgggcaagcgggtgacagggcacatgagtgtgcagacggcggcacagcacctgcccctccaggggtctcggggctgcatcacactgcctggcactcacctggcaggcaggccatcccaagagcaccccaccagctgctaaggctgtggggaaagctgcctaccacataggggcagaggagaggaaaaaagcaaggagtctcgtataggctgctcccgatgtcagcagagccctgtaccgtgcgcctcagcaaactcctccatctattgctccaaggcccgcctttgatgttaggtcctggagaaggggaagtggtgcgggacccacaggtccagctgctccgtgccatgcagtcgggaaagggaaacaggcactaatcaaaggcaactgctcactcgtacctctttcttctgaagcacatgatgaagtctattctcagcagcgattttctttacaaactctttcgttaatccccccagagggaagatggttctcctcagggcatcctgggaaacctggctgagaaagaaggtctggtctttaaagctgtcagctgcctggaggagttttaccgctgccaagaataaagaacaaaagacgatgcaggaataaaaataatgatacttcactttcaacaatgtccttctgttcacttagacagactacccctagcctgtcagaggcagacatcaacactcaatagcaactactagggaaaagaccaccacgggttaatgtaagaaaaattcgcacctccaaaaaaaaaaacaaggattttacatgacaaagaaattattccagctcatacttcagattataatattttcaaagatgaaacatcacatgaaaaaatgttctcaagtgataagaaaaaaaaaaaaaaacacctaaaataaattcagccaaatcttggaaaatggagtaagctagttgctggcagaaaattccactgatatagtgtcagctgtgccttcttccaacaaccacaggatgtgttcgtgccacagtggtttcaaggactctacactttccaggttcactgcccggcggccagcacatgcctccagcagcgccctacctgtgaaggcattagctttcttggtaaaaacgtttttttgttgagagtctcagctgacatctgttaggtgaccctgcagttcctccgacattccctatgtgattgtaaagaaccatttctggctttaaggcaacggagcagaggtgtgagtaaacctggcttagaaccgtccagttctccactctcgagttcaatgatcaatggcaaaaaactaagacgaacgtcagttttctggcttctttcaatctttctcataaacttctcctttcgagttacactcagagcacgccacatgccgtgacggtcagacagcacacctacccttcctggcttggcagagccacgtgtacagtacacactctgcgtagctagtgttttccatctgccgattcccacgttagccgtgagagggagaattctccccacgttacagaggggagactggagccggcccagttcatcacatatgactcgcccaaagtgatgcaggtggaggcggtggggctggaggctgcccagcctcccgagtccccctcccttacttggcaggtacaaacagcagaactgagtgacaagtgagaccaagttcagccgaccagtcgccacggaagcagagcactttccagagtccacttttttttttttttttgagatggagtctcgctctgtcgcccaggctggagtgcagtggcacatctcggctcacggcaatctccgcctcctgggttcaagtgattctcctgtctcagcctccagagtacctgggactacaggcatgtgccaccatactcggctaacttttttttttgtatttgtagtagagatggggtttcaccatgttggccaggctggtctggaactcctgacctcatgatccgcctgccttggcttcccaaagtgctgtgattacaggcatgagccaccgcacctggcctcagagtccactttcaatcccaaactaactgcagtcaaacactgcatgtgtgtaaaagcctcagaaaactaggagccatttgcattttctcctagttctgcgtcattttaaaacaaactaaaaatctatgattttcaaaaaagcaagctggcgaccctaactgaactgctatagaggaaaaagcacagaaaggaatgaacaacatttggaggaggctgcctgtgctggagcctcactgacacgccggctgccgtgctggctctgccaggccggtggtagcacgctgtgtgggggaaaatcagcccagtcacaggccaggcctaggagcgctggtctcaggtgctgaccgaccctgagcccaggccgtccactgcccctgcaggtgctctacccagagacccaggctgggccagggcaactgaagaagaatgaaatggaaaccttagtgtgcctacaaaacccagtgaaggccaagacactgtgcaccatcacaattcccacatgccaaacgcactcaacagaacgcatcagtactgtcccaagtttccgagggcacgtggcctataataaaggtcgatggctctgcagggcacacagtgttctaggaggtaatgttctaggaggtaagcaggcgcatctattcaacatggaaattaaccctccatctcctcaggccccgtaaatgcacaattacttggtgaattccaccctggagttcccaagtggcaggactctgcattccaacccatgtcttcctgaaatggggggctgtcttatctgcattcaaacccatgtcttcctgaaatggggggctgtcttacgggagtgggctgctcttctctgggctcaagtcagtacagttacctgatcaccctgtggcataaggaaggaaggcgaggagggaacagagggcggcagacgactgttggcacactcagggctcccttgaccaagcacggccctgccccatcactgcagccttcaggatgggctcagcaacgctgaggaaagaactcagctggggcctgacccagcagaagcagcaggggctggggagtgagcggaagtgcactgaaatccagctctgccacccgagggacccaggtcagatggcttcatccgggcctcggtttcctcatctgtgaaacgggatgagagcatacacctcatggactgctaagaggagtgatgtgaaacgtgtgaggccgggcttggtggctcacacctgtaatcccaacactttgagaggccgaggtgggaggatcgcttgagcccaggaattcaagaccagcacggacaacattaacgagacctcatctctacaaaaaatgaaaaagccgagcatagtggcgcacacctgtggtcccagctacttggtggggctgaggtgggaggatcacttgagcccaggaggtggaggctgcagcgagccaagatcgggccactgtactccagcccggttgacagagtgagatcctctctcaaaaaaataaaattaataataataattaaaaaagaaatgtgtgtatgtaaagccctgccccagccccagagacccctattccccagatggcgggacaaggctccctccaacatctgaacttccggacaaaagagcaaggctgcccttcaggggtccccactgatggacggacgctccgtgcggaaacacggctctgagccccacttggtttttcactcaacaatacagggaattcctcttttctacacacgaatgtacaccaggacaggccagcagcttcccagctcactgtctgccattgacttttttctagaaaggtgaaacttggctccctaacacgcataaactaacgtgtaaatacggctacaaagcctgactgctgagcccatgcgatccacagcaggtcctgtgctcacagcacgttgaaagtctgcctgaaccgcacgcccttgagaacttgttgctaagtacaggtccttggctagactgacagcaccccaattatcactgtcaaatatttacccagatatttttggaacattcaaatcaccacacagtgtcgagagctggattatcagtatctgatgtcactttccaccagccctcaccatggccggcagggacactgtttactacccaatcacaggccctccgggaaaatgtcctcttggtaactgcaccttttcaaatgtgaatcccatacaagctactctggagcacagagggaggggtggcagtgatcctcaggcacaacccactgtcattcctccaaagatttcaatctgttcacaagaatttggctctgacctgggcacatgaacttaccatttctaacttcaaaccgatttctgaaaagcccttcgggcttcttaacgtgcttctgctcaaagacttcttcatcttccagggaagttcttgcatagtgacctgtggcaatggcatctgcccctgtgaggtttttagaacacaaggatcaggttttagactcatacttgcaggccttgatcagcataaaccaaggcacaaaagaagagtatagaccccaagtcttaggctgaggggctgcacaatccaccctgcacccaaacatagagatcccagggaacagacgcacacatccaatttcatcaaacaagcagccttgaactcttaagctgatacaaccttgctacttaaagtgttattgcacctttaagagcctttccaaagttaatttctggcttaaggaaacagtctgaaaggcacagaaagatttaaacacaaaatattcctttcagggtttgtgataatacgaagggaggccaggcgcggtggctcatgcctgtaatcctagcactctgggaggccgaggcgggcagatgattgcttgtgctcaggagttcaagaccagcctgggcaacatggtgaaatcccacctttacaaaaaatacaaaaattagccaggcgtggtggggcacacctgtagtcccagccacttgggaggctgaggtgggaggattgcttcaacctgggaggttgaggctgcaggaagccaagactgcaccacagcactctagtctgggcaacagagcaagatgctgtctcaggaggaaaaaaaaaaaaaaaagaaccaaaatgttcaacactgggagaatgtgaagtgaatgacaatgcactgccgtaacaatgggggtccttacagagaatgtttactaacacgggaaaatgcccggcactgttcagcagggcgaggatgtaacaccatgattccacggtttttactgtacagaaacagttgaagaaaaatctcaggtctattcctttgattctgagagtgaaattataggtgtcgtttctcctcttttaaattttctgtaataaatatgtattattttcatcagagtgaagaatcatccagcacactgtttcttcttttcatattacacaaagccaaagagcctaacaaggtgcatatgaatccagaaccttttcattgtgtaaaaattccagatatttgggccaggcgcagcggctcacgcctgtcatcccagcacttttaggaggccgatgtgggtggatcacttgaggtcaggagtttgagaccagcctggccaacatgatgaaaccccgtctctacaaaaaaagtacaaaaattagctagacatgttggtgggcacctgtaatcccagctacttgggaggctgaggcaggagaattgcttgaactcaggaggtggaggttgcagtgagccgagatcacaccactgcactccagcctgggagacagagtgagactccatctcaaaaaaagaaaaaattacagatatttagtattgcaagagacttttatgaaaggtgcagcaaaatggattccatcctggaccaaccacactagctcagtgtaaacagaagacacagccatcctggaccagccacactagctccatgtaaacagaagacacagcaagaattagctgctgcatattaacgacctgaaaaaggcactttagagacacataatctcatcttgactgaggttctcctagagaaaacaatccactttacatctgtgtcctcaaagaacagcacttatactagaaaaagcgcaggatgcctctgagaagcgcggtgagttcagaagtctgggcgtcatgtcctctcatcctgtgctgcacggttcatgcctttcttccaggtgtggaaacattcactgcagaagttccttccacagcgtgcctgacagccagccacctaggggctccctaaaaagctttcgtgacagcttaatgctctccaaaggcaagccttcccttcctgaacagctgcctgcgcctccacctcagggaactctttctcctgccagtcctaactgtctgctggtgtcacacaaagaatgtcatcctaactcacacgcttgaccactgccactacgacccaaagtaatttcaacagttcagggaggacatatttccagataccctgaaaataaaaatcaattcacattctatcagtctatcactcttttcctgaataactaatacggtctaaccaggacggaccacaggggacgcatcaccccttcctagacattctatgatcatcaaggtgagctccgtctgtgctggctctgacaaaagacatcacactactggctcagtcagcctgggggcacctaaatcccccagattttctgcaaccaatggcagaagattcaatggcaaccaagctaggtctttccaatcttgtcctaggagaattactgaacctagttagcaaactttgcatttatctctattaagtttcatgtttttggtgttagcccaatgttgaaatttaagatttttctttttgattttttgtttttgtaggcatttgtttattcctaactccacaaactaactttcatcattatcatcaactcagctttaggttgctgacatattgaatctgcaagcctaatctacatcattgctgaaagtgccgacactactgggcccctggcttacaatggtatctcgtagcaacacacaacagggtgagctgcagtgggacagagcaaaccaagaagcctgagccagaacttcagaaactcattatggtgaccccaatggcaggggacaggaagaagaacctaaaattcataaagcatagccacagacatcaagaggtggtctaagcaagcaattcagtatcaggaggttccacaagaagaaacaggctaggcacaggggctcacgcttgtaatctcagcactttggaaggccgaggcaggaggactgcttaaggccagaaatctgagaccagcctggacaatacagttgtgacaccatctccacaaaaaattagccaccatggtggcatgcctgtggtccaagctactcaggagcctggggtgggagaatctcttgagcccaggaggtcgaggctgcagtgagtcatgatcgcaccactgcaatccagcctgggtgacagagcgagaccctgtctttaaaaaaaaaaatgttttaaacccaaattacttaccaagattatccacagcataatgaaaaaagcaactaaatttgatgtgcttgttgcaaactatgtcaggattgggagtccttcctttttcatactcattcaaaaagtcactagaataaaagaaaatgacttcagttccaagtgtgaaacattcctcaaaaaaaaaaaaaaagttcactaaattgcttgtttaatgtaatttccccttgtcataccaaaactataattttctgcaaaacaggagaacgtcagtcatcgaacatttgtttataacctgctgcatgggccacccgacaaggtgttattctctgccactacggctcaggagccaccgtctctgtgtaggctcacagggcttatggggtcaggagtggggagtggccgtgagggtctcactaaaaccctgcctctgggactcctccaacacagcagggcttaggtgaggaagagaagatgcctgagtgacagtggaaatgaaatcctttagacttcccttgcagattctcccacctcagccttccgaatagctgtgattacaggtgcgcagcaccatgcccagataatttttgtatttttagtagagacggggtttcaccatgttggccaggctggtctccaactcctggcctcaagtgatctgcccgcctcagcctcccaaaatgctggaattagaggcgtgagccaccgcacctggcccactgcaaccttttctttttttatagagatgaggtcttgccatgttgcccatgctgatactgaactccaggcctcaagcaagtctcctgcctcagcctcctaaagtgctaggattacaagcgtctacctttctgactgtgggtcttaagaccctccccagacacagtcccactgtatatcctgggggaaggaatggcgatgtcatgaagcctccataaaaacccaggagtactgggttcagagagcttctgcacagctacacttgtggaggctcctggagggtggtccccagggagggtgtggacactccatgaccctttccccatacctcacccaacccgtctcttcatctgtatcctttgcaacatcctttataataaactggtaaatgtgtttttctgagttctgtgaaccactccagcaaattattaataattgaacccaaagaggaagttatgggaatcccaactggaagccagttggtcataagttctagaggcccatactttcgactgctgttgtggggggagtccgtctgggggactgaacccccaacctttgggatccagcactatctccaagtagatggtatcggaactgaatcagaggacacccagtcggtgtccactgcttgctgtatggggaaaaccccccacacctttgtcacagaagccttcttccgtgaggatgactgccgtgatgagaacagaggagaaacacagtcagaggcttccctacacaagggctccatgagccattctgcaatctcagcctggaatgctgcgtcactgggcaaatataccaaaaatactatcctcaggtgacaaacacacacttctgagaactagcaaactcttgggtgcttaaagtggatcaggctatcctaattcagtgaacttctgctctaacagactgactgaacatgggaaaaagatgccatgataccagcaaaacttaccaagaatttcatagtcttcgaggattcacttcaagagggttatgatgcctattttgggagtttaaaaatgggtgtatttttggtataagtgatttttttcatttaacctaaaactctctattaatcaacaagggttaaaaaaaaaaccagtgctgatcaagaggtttgtgttttgcagacatatcacagatctgcacagggtcagaggttccttggatatcttccactttagcaggcaccaaactgttttcctacttctcagtccccctagaagttcataaaaactcatgtttttccacatttgcaacaacacttgatattattacactctttccattttgctttaattattagaaagttaccaggaagctcattaaactataaactacttaaggtgcaatctgtgtctgtgtcctagacccaacaaactttctatatcacagtcatcaataaatgttgaagaggctgaacattaaaatcagtttctgaaaagacacactgttaaccctttcgtaaacagcagatgggaaggcgtgtgttttggcattagcaaaaacaatggagtagcccagcctcttctctaactggaaagaagagaagcctttcatgtgcctcgggagggagacagatttaaaagactcagcagctaaaacgtatctggactctgatccttgaaggccagtgggtcttgaatgaaagaatgcaaaagaaatctctgagctagagagccctactagagaagtgagtcttcagcggaaagaccaatgcctccacgggcagctggtactgggcgagggcagagggcaggctggctggagccaggggcgacctcgggggcagccccagagatgggaaaagactctacccggccgcctccttctctcagtccctatcaagcagcgccagaaggcggcagcaagcactggcctggaaagctgggttttaatcccagctccgctcctaattctggggtttaatcccagctccgctcctaattctggggtttaatcccagctccgctcctaattctggggtttaatcccagctccgctcctaattctggggtttaatcccagctccgctcctaattctggggtttaatcccagctccgctcctaattctggggtttaatcccagctccgctcctaattctgggttttaatcccagctccgctcctaattctggggtttaatcccagctccgctcctaatttgccatactattcaagtcactcttcctatctggcctcagctgagctaaacttcaaaaatcgcatccactcgtacgttctgaaaaagctgtgctggcaggtgaagtgtaagctcacttggattccctgttgtcccctcaaactctacagtactcatgaggaatcccctaaaccagctttccccagccacccagccttgatcttgaaactactgctgactcctctcctctctggtctcccacacacatcagtccctaagccgcatcacaccttttctcaaagaaagaccctgacaaccccccacaccaccagcacagctgaagtgcttattaaagcagattccagggccgcccccagacctcggtccaggtctgtgtttaacaagcacctcagatctactgcccggtggacttgtcctctgggtccaacaagccagccctcaccttccactcccacactccctccccatgaagtccaaatctccagcaacagcacttcctgagactctctgcctttggtcttcccccagatttatcctgtatttggccgccacactcttttttttttcttatgtccccgagaaaactgcagaagtttttaatgcatttatcatgcattctacagataagtttttaatgcatttatcatgcattctacaggtaactttccccaggaaaattcagccatcagttttgtccatgttgttaatatatacgacacccatatgttatagcatagagtcacagagggttcatattcaagctcttccgttgattatttaggtgaccatagtcaatttacttaatctctctaaatttcgttttattgttatttcaatggttttttgggcaacagctggtatttggtcacatggataagttcttcagtggtgacttctgagattttggtgtacccgtcacccaagcagtggacattgtacccgatgtgtagtcttttatccctcaccccagagtccattatatcatttttatgcctttgcgtcctcatagcttagctccccagactcatctttttaataatgaaaataaaaatagcaggctggcgtggtggctcacgcctgtaatcccagcactttgggaggctgagacgagtggatcttctgaggtcaggagtctgagactagcccggccaacatggcgaaaccctgtctctactaaaaatacaaaaattatccgggcgtggtggtgcatgcctataatcccagctacttgggaggctgaggcatgagaatcgcttgaacctgggaggcagatgttgcagtgagccaagattgcgccactgcactccagcctgggcaacagagcgaggctctgtctcaaaaaaaaatagaaaagaaaaacagctatgtttattgactgcttactaatataccaggcatacatactagaacctaatctcaattctttcataaccctgtgaggcatcagtgttatcctcattttaaagatgagaaaattggggcttagaaaagtcaagtatctcttctgggtctttgttggcaggaaaaaaagagaatttttttcaattaaaaaaacaaagtcaagtaaattgcccaaggtcatataataagctacagtcaggactcaacccaaggctcttctgcccctaaagcccactcaggcaggggcagcctgtcccgcgcacatggcctgctgtgtcagacgccttcgacaactgcccgacattcatcacagtcagggctcaccagaggatgagccctacactccttccactgcaggaacaaaagtccagccaaactttacaacggtcctgaaatacacaatcagcatttcttctccccttcacgctgctctcgttaccccatttggagtcccttctctacaactttgtttgcaacccctcctctccggtgaagccttcttgattactccacactgcaagtttctccctcctctgggttcagtgactgatagcatcactggtacttcctgcgtgccacgcatcactgtcacctcttgtgaagataatgtcctcccaactagaccgcaaactcctacagagccaggtcacagtgaagacatcttaatgttcctagatgtggcacacgcctagcacacagcacttaattattgagattatattggattttagaaaagtttttgtttgtttcttgttttcagaggcacaggccatgtatcacctctttctcagaaatcccctaatcgctgacccacatagcacacaggcattggtgctcaccttccaggggagccctcagccttagctcccctatcctaactgggcaacagaaacagctcaaggtccaagaaagcattaaagagacttcaggcaagtggcaaaatgacaggagtgagagagctgggtgtgctgtggggtccaggcctcgcctctaacacagagccccgagggtggctgaggcctcttgcagtcttcagcaccaccgtggagggagagcgctgggctgcagcacaggcgtcggtctggctggttaccggatccttccactgcaaggatccacagtgtgaggaagcttcctttgtgctgtgacccgcactcacctgaacacatcattccaatactcctttacgtaggacacttgatggaaagggatgtctaagatctggcaaactctgtaagcatcttcacagtctttgtcggcagtacagaccccatgttcatccagtgagtcccagttcttcataaacacccctgtcacctggtaacctgcgggcgggaaggtcaattaaagagaatacataaatcaaccttcggtaaaacggcagtgatttctgagctctgagaagttccccacacgctgtgctcctgtgcctctgtgcctggcctgccgggcagtccctgctttgccatgtggcttcagggatccggtttccatcttggtgcctgagtccccaagattaacgaggtggtattttctcatctttgtgtccccatctatgtatcagcacaatacctagcaggaggggatcagccagtgtgtgtggaatacacgaaggaatagtcgaaactcaacaaaatttttcaaagcaccattcagttatcaaaaaaggaaactcttttcaaaagttatttctagttactatctaagacttagattctaagtgatcagatataaagataattaaaattttcgatattttgtaagagctgtaccacctagtttatgacctattttctaccttttcgattgtaacaaaatattcacccaaatattggaaaggccaactttagccctacaccaccttagcaaactacacaggtgcagaccctgtatgagaaagctggttcgtttaggtaggctgaatgtaatgaaagacagggcaaatgactgctgaagaaggcttcatatagtacccaaaacaacagaaatttgatgacaaagctttgtcaaaactacaccaccacacgcgaaagaccacccctatcccagatcaaccagactaatgtctacctaacagtctaaagcccctggtatagcatcttccataatcagggctaaacgtgctccaggctcctctccttccatctccatctggccagaaccagcccacacttgcaggcctctgtgattctgcttgcactgctgactgtgccgggagggccgcctccacctccaagtctctgcttagtgacatcctactcttctttcgactcagctgagcacctccatctctaggatgctttcctccactctcccttcctcacaactatttctgcttatggtccgcctacccttctctttggcacttactgtacctaccataatagctatggttattaacaatataaactaatagccactactgttttctgcgtacctcgtatgtgctgagcacgtactcatcagtatgtactatgtcatctaatccctccagtcaccccgtgaggcaggtgttagccgaattttacaggggacggcttaattcacttgcccaaggtcaggagccaaagatggcgcaaagcagagctccacaaacgtgactctgtgaatgaggcctcccgcggggagccacacaggtgaagttaaacaagtgctcatttcagcgccgggcccgaggaatgctaagcacccgtggggctccgtttagatgccggaagaaatgcaaatgctcctggagaaaactttgtcctccagcgagcggagaacacaggagacgctgaacaagcagacccgccgcgcggcagttgtccagtctgctgagtggggaggacaaggacctcccaccgggcggccacagcgtgtgcagaggtcaggcccccggcccggcgatcccagctcccctcaccagtgtccacggtctcacaggtgaatgtggacgccgcagatccgtgagaaacccttccctccccaccccaccccggcccgccggcttctcactgtgggtgggcgcgcgtgggtggagaggggcgcggaactgctcccaggtagtcggagctgcagtcgcgcacacctccgactacacaggtggagggcgaggagcctccgaaccaaagtcagaggacggggtatcctcctgccgacccgcgcgcaaccagcggcccagggagggaggagacgtgcacaacgccacgacggacggggacaggtttccggggacacattcgctcggcggggggcgggagcctcggacgcctcacctctccgcctcagcagcagcgcggccacggcgctgtccacgccgccggacagggcgcacacgacgtgccgcaaggcctgcatccgccagtcgcccaacttcgccagctgcagctaccgccgcttccgcgccttgccggaagtcccgccccggccgtagggtccgcgctagtggcccggccggaagctgcggcagcttacccgcgttccgtccggccttcccctgtcccgcggcgggttcccctgtctccggcctgcgctcacccctgaggctccaccgacccgcggggcgccgagactctgtcgggccgcgaggggctggctttttttttgagccgccgccttgccctccccacccgcgccccggcctcactgctcttcttctgcgctgtaaaccaaaaataaaattctaagccccccagccagccattggaggcctcctctcggccaagggcgtcctagagggaacctgaaccgcgagttcgggctctgatgggaaaggccgggtgggacccgcctcactagaccctcctcctccctttggaattcggaccagcattaacgtcaaaacagacttaagactgtctaggcggactctccgtagcaataggataccgacatgacagatggcaggccctgaaagatatcgaagtattttacagtattttaatttaatttaatttttaattaattaaatttttttgagatggagttttgctctgtcgcaggctggagtgtagtgggcgcgacctcggctcactgcaaccttcacctccaagattcaagcgattctcctgcctcagcctccctagtagctgcgattacaggcgcccgccaccaagcccagctaatttttgtatttttagtagagacggggtttcaccgtatttgccaggctggtctctcactcctgacctcaagggatccgcccacctcagcctcccaaagtggcgggattacaggtgtgagtcactgcccccggcccagaaaatctttgaatccacctatgacctggaagccccaccccaccttcgagttgtcccacctttccggaaccaatgttacatcttacatgtattgatttatggcttatgtctccctaaaacgtacgaaaccaaaagctgtagcaccaccagtttgagcacgtgttctcaggatctcctgggactatgacatgaataaatatcttcaaatcttttacagtttgactccaagcatactcagcactcaatccttaatgtctgtgaggtgtgttggacaggggttttgtgttctgtccactcctactccatgcccagaaaagcccctggcccagggcaggtgcttcataacctcgctgaataaaggaaggaggagagaatggaggtcatcccccaggggtgatattcaagctgagttcttctctacgagttagcatctagacaaggtctacctaaagcacagggagactctgaacgaaaaagatgttcatttgtgaatagggcattgcaatgggaatatgcatgccacaataagctatgtgggtattcagggaagtaaaggaagacaaaggtttttattttatttatttatttttttgagacagtctcacttggtcactaggctggagtgcagtggcgtgatcttagctcactgcaacctccgcctcccgggtttaagcgattctcctgcctcagcctccggagtagctgggattacaggcacatgccaccacacccagctaatttttgtatttttagtagagacggcatttcaccatgttggccaggatggtcttgatctcctgaccttgtgatccgcccgcctcggcctcccaaagtgctgggattacacgcgtgagccacagtgcccggcctaggaagacaaaggtttttaaagggaaaatgaggatcacatcattgttttgagataattctttggctacaaagatcaataacaagggtgacagcactccagggttggacaagcagttgctgggcagatgtccttgcaacagaagttttttgttttttttttttttttgaggaaggttacgatagcctttgtgtaaagttgtggtttttgcagtcttttgtgatagttgttattattaggcacatgtgcatgagaaccctcccttgtggtatgaacccaaagtacctgagacaggtttcaatttagaaagtttattttgccaaggttaaggacatgccagtgacacagcctcaggatgatgtcctgaggatatgtgcccaaggtggtcgaggcacagcttgctttgatacatattagggagacacaggacatcaattaatacgtgtaagatgtacactggttctgtctggaaaggcgcaacaactgggggtggtgggcagctcgcaggtcataggtagataagagataaactgttgcattcctttgggtctttgatcagcctttcactgaatacacaatctccatgtgagaggcaggtagaggaacagtcactgatgccttagtctggctcagtgaatctgcattttcacataaacaatagggcagaggaagcaatcagacatgcatttgtctcaggtgagcagaggactgatggtgagttgtccattgtctggcatctgtgaagataagctatcaatttacattgccagggtgaaattcaacagaactattttagggtaaagatctcgaggtccacgaggaatttccaagaagaaaagcaggaactaccaacaggagagccctggggactggtgccaggaggagctgcaagacaggagggaggtcacagggcctgtggggaaaaggatgaccactttttcagaataaaggatcaggaaaatacccaacaggagggcaatttcatcttgcatttcccggaagagataaggaaatccagtatctgggcagctgagtttgtgcagatttagaggtacacgtttaggctgtgtctaaacttgagtctgggtctgggggcaggccctccttgggtgtggcaggctgatctaaggttatggcaggttaagtcccagttgcagccaacccgcaaaatggctgagatccatgctcacatattttctgctactttttggttaactatatggtattttaggtactccgtagctccaagaggcccctgtgtatcacccaggtccactacaggctagttatggccaggatgacgacatcccaggtgccgcctgccaacagcaatgtcagagacgtggatttcagagatgtaaaatgggaagacatttgctccacaaaattaatgaaatgtggtaaaaaatcacatgaagttggacgtcttggacctgggagggtggccctccagtggcagctgaggtgttcggtgccatcctatggagaaaggggctggccctcctggggccacggagcccttcagtctccaactaactgtgcatcttcccacccggagccctctgaggggtgaaccaagggcctgtgtaccaggagagggagtgggggagctcagactgggtggcttcggcaggaagagcccagtggagaaacccagacagaaaggaatgggcctggagcctcaggacaggagcagctctgctctgtccagctcctgctcctgggccctcttcctgtctgtctgtagagagttaaagtcagatcactctgtctggcctgggtaccaaggagagcctggctgcactgaagccgcaccggggaggggaagggcacaggggggaggagccccagcagcgggattggggccacaggccaaaggctgggctcacccccagggcctgaatggagacaactgaggcacagcttggttacagatgagctgggagctgaacatctccctcctctacccagtgggaagccctaagagggaaggggtacctgagcgctgcaccccgctgcacccagcagaaaacagcctgacccatagcagagcctcagtaaatatttgctgcatggtttaatccaatttcagatttccttttctacccctgggaaatgagggccagaccagaggttccctgaggaccctccggtgtcactaccaggcccctgggattccctgctgtcccggagacgtggagccgccgtgattcccacgggcccggcgactctggccagcgcaggactggctgaaagtcttacctggggagtcactgctcatggagcggggcttctctggcttcatgactcacacatccaagcagctctgcctgtggggagcttccgtctgcaggcgcagcaactcagccgtgagaagcgcgccacctttccaccatggcagtttccaccgagacgtctttccacggcatcgcctgtccaccctacccctccctgctctcgacggcagaggactcgctgttccgagtggcagctttagaatcacgcagtaaccgcaggaagtagagagcacagcacagtcatcattttccctcatctttgtggacagaggcagatcctggtatgacccagggagcactggagtggggtccgaaatacagagtccggccgctggctcgctgctgtctgccatgaagccgctcaaccaaggtggtaagtttcctcaagagaaatggacacaaagtagcggcttcctggagctcgttttctaaataaagggaatgggctttccagtggcactcagttcctgccactgcccactgagcttgtcgggcccctgctgagagcaaagctgaggggtcctccccgaggcctgcccagcagacgccgtccatcaccttagtgtccaggtaagcccggcctcctcgcccatcctctttccactcataccctcgtctccccagagcagcttcttctcaaggggtgtgtctcaggccatcgagtcagcatcacctgtgtgcctagtaacaattactaggctggccccagacctagaaactagtgtatctgggggcgggcctgggcctgcactgacatcaatttttattgactaatttttgaaaatcacttgtatgaaagcattcgagtctagatagtagccttactgattagagtgataaaaatagctatgcatgtttgaaaatcaagataagcttaaaaatcaagatatgcttcaataagtccatttattttacaatttaatgtaaatctagaatatctaactatttatacaaacttaactttaaaaatagccacttgctattttacatacaaaacattcaaaagaaaattcttcatttagagtgactgaggcttcacattccagcccagagaatggcagcgaggagggtggcggcgggaagcagaggccttgggtggtccgtgctggccccagtccctcagcccaccctctccagcactgggaatatatttatgcttatttttctttttcaaataaaacttctactaaaacatgtttctttttttttttttccaagacaggttctcacattggtgcccaggctggagtgcagtggcacaatcacagcccactgcagcctgcatctccttgagctcaggccatcctcccacttcagcctcccaagtagctgggactacaggcatgcactaccacacccggctaatttttgtattttttgtagggacaggagtttcactatatttcccaggctggtcccgaactcctgggctcaagtaatccgcccacctcagcctcccaagttctagggttacaagtgtaagccactgcgaccagcctaaagcttgtttctgagggttgaaaaccactttagggctgttctttcaaggcaaaggatttggttcggcttagaacttgaggagtggggaatccacgttctccttgtcagcctcagggctcagctggatcagaggggagctcaggtctatgagctggaagagagcagagtggaggaggtgagcgtggatccggctagggcctcccttcccctccctgcacagaggactggctgcgtgggtcatcacagccactcgctcatcctggctcgggtgcactgaaaagcactctgggccaccacgtctaagaagctggaaggagacaggacacacacggagaagcccaggcccccaccatgcacattcctctgtcccacatctggccctggggtctatgggcaggagagaggcggtccctgtccaacaagagctggcagggtcctggcagggcacctcagaggcagctgatctttgagaagctcaggctgccaaaggtgcatcctgccctgaggtgtgtagctgagaagactcaacagccactctcaagggtcccacgatggccctgggaggatgaacaatcccagaactgaggacacccagggctgagtcaacatgaaccacctgccacttctcacctgtcccaccaccggtgaaggtttggccacatttttattcatgtctggagtgtttgtcatgaggtcgatcagaggcctgctttcagatcctacagccacgtgtgcttctggggtatcgcagaagtcgatgagaggaaggtcaatgaggggctggcttgcagcatctggagtgaccgcgagtggttccagtttgatatctacaagaagagcctgggtacaaaaccaaggttaagagcagagtccagcatctttctggcaaccatcttgggagaatgtgagctttgctcatgttccaggtgggctggcggtttggaaagccaaggaatcaggcggggccttggtggaaggaggctctgtatggggtgggccgtgcctctctgactgttgcccacctccctgtccatacccgctcaccagcagccaccagctcctgccaccctgcttcccgcttcctcagctttgatccctgacccttgccttagtcaaatgcagggctttctcccctggaggcctggaagtcctgactgcctccctttgggttgcttggcacggaggcactggccccaggatgaagcatggcagggaactccgccagccacagccctgggttccacgggcttcccgagcagcctccaggaatctcagctaacagaacccagctgcgcccgttctgcccacctcactaggggctgcatctccacccggcttggcttcctcccgagctacttctgtggcagtacttttggagaaagtagaatcgctttcctctggagaaaagttaagtgcctgaggcacacgggaaggaggagaacccctgtcaggggacacatccaccagcctggaatctgtctttctgttgctctcccttgttggttcagttctgtgggaaggaaaaaaacttatgagaaaatgtctctaaaatgctcgttcacttggctgatgtgggaagcaagtcactctggaggaacagtgtcctgggtggagtgcgtcccggctctagggccttcaccctccagacccccagtttcctgtgtatggaaggggctcagtgatctctccagttcctctcagctcacaaatcttagctgtccagcatcaccaggggctgatgttagccccttcctttctagttactaaacacaaggtaatgcgcacgcccgtcacctcctgaagggagcccagaccacacacagggacccctccttgagccacggccagctcctcctcgcatgcagctagtggggggcttctcctaggcctaggtgggtatgcagctggctccttctgccccagatgccccctcccctgctgcccagtgccctgatcagggctgaggccccaggtacaggctgcccacaccagctttccaatggcgtctcccacaggaccctgcacgggcgctgctgggcttgcctgctgcccacaggtcctcgagtacctgccacgcaaaactgaattccttccggaaacccagcaaagccgcaggtccatcaactaacacacagtaccttctttttaatacttcagaggtttcataagaaaattccaaaaacaagcagaattttgtttctacatttacacttacaaacatacaagatagttaaacacatattcctatttatatatcagatctggtgttttcagtgaggccttgtttctcattttctctttggcattccatgcctttccctctccctctgtaatgcacacacatgccagcatattttcttccagagtcttctgcattatcatagaactacatagatacacacagtgtcaacacctactgttggtagatgtacatacacagaaacatataagatatataaaaatgtgtaatttgtgtataaatacacggatattatatatgtttttttgttttgtttttcgtttttttgagacagggtctctgttgcacaggctggagtgcagtggtgcgatcttggctcaccccaacctctgcctcccagaatcaagtgattctcctgcctcagccgcctgagtagctgggattacaggcgcatgccaccatgatgcccagctaatttttgtatttttagtacagacagggtctcaccatgttggccaggttggtctcgaactcctgacctcgtgatctgcccacctcgggctcccaaagtgctgggattacaggcgtgagccaccgcgcccggctaagatagttaactttacacactagcatgatctgtttcaaaggttatacacgactgaggtgtgacttcattggaatcaggtgcctttttcaatctttaatcatttctgagctccagctatggcttacttcatgtgttctgggtcaatttagataaattttattttatttattttatttattttaatttttacagacggggtctcactctgtcccccaggctggagtgcaacggggcaatctcagctcactgcagcctcaacctcctgagctcaagtgatcctcccacctcagccccctaaatagctgggactacagtgcacgccaccacacctagcttatttttgtattttttgtagagatggggttttgccatgttacccaggttgatctcaaactcctgagctcaggcagtctgcctgcctcggcctcccaaagtgctgggattacaggcgtgagccaccacacctggccaataacttgcaaattttagaaaaccattaggttttcaaattgattatcagagaattacacgcagtatttccttgtaatacctttaattttcctctatgctcatgtctattgcattttctctttgcaatgaaaaaaaaaacaaacaaactttccaaatactatttacttcactaaaacctggagcaaggcaagaaaaaggtatgtcactgtctgggacagcaagcctaggaatttgagaccaatttattaccaccttcgtgtcttacctcattgcagagttcttgcggggctcagaggaacgtctccgagctggcacacacaggggagagcccacggccctgggcatcgttttgggggtcatcggtggaaggccagagcagcgccggctggcgggtgtgggcaaggctgacacacgccatgcgctcagcaggctttgtggtgctggcccagatgagcgtctaaccggggtgctgtggacagtgaccctggcaaacacaacatcagtgtcgtgagctgagatgacatagaaaaagtaagatctcatcattcagcctgtgctaatgcagtgctgagggctttggtttcagcccagaagagccaagccagggagcccgtgtgagctccgctctcctgggacaggccccaaggcgggcaaggctccgagctgctaccaacccatcctggcgtgggcttcgggctcccagtgggaatggcttcactgcccttcctcacaggcaactcaaaagaaaattgatcaaatgtgattacactttacggatgctaccattaaatgtcacttcacacgaggttcagaagagactgagcaaatcatctttcagttggtgtcatagatattgccataaggaagtcagagccgcagcctgtctggtgggccagcgaatgggggagcaggtctccctgcacgcccactcatacccaggcttaaggtcgcctgaatcagatgtgaacacaaatgagtgaagaggaagctgggcacttggtcctcacacccctcacgtccctggcaatacctgtggttcgggctacccatgggtcttgcctaactgttgctttcttgtgttgctgttgatgaagaagaggctgagtcaactggcatttgctgtggactgaatgtctgtgtccccagattcatgtgctgaaatcctagcccccaaggtgatggcattagaaggtggggcctttaggaggagatcaggtcatggagccaaagcctcaggaatgggatctgtgcccttataaaagagggcacattggtgcatacctgtggtcccagctactcaggaggctggagtgtgaggatcacttgaacccaggaggtagaggttacagtgagccatgattgcactactgcactccagcctgggcaacagagcaagaccctgtctcaaaaaaataaacaaacataggccgggcgggtggctcacgcctgtaatcccagcactttgggaggccgaggcgggtggatcacgaggtcaggagatcaagaccatcctggctaacacggtgaaaccccatctctactaaaaatacaaaaaatgagccgggtgtggtggcatgtgcctgtggtcccagccgctcgtgaggctgaggcaggagaattgcttgaacgtaggaagcggaggttgcagtgagccaagatcgcgccactgcactccagcctaggtgacagagcgagtctccatctcaaaataaataaataaataaatcagcataaaagaaacttgttcacccctaacccagtgaggacagagaaggcggcagctgtgaatcgggaaacaggccctcaccagacaccaaatctgcaggtgccttgatcttggatttctagcctccagaattgtgagaaacaaatgtttgttgttcaagctacatagtcgatagaacgtttgttatagtagcccaaaaaggacaaagacattattttaaaataaaatgagtcaaggacatcccaccaccatggcccctcgggaggccagggagacctgtctattgctctattctgggcaattgttacgttcttcaaaaggagcctgaaaacagactgactctagcctatttaaatggaagaaaagcaacgaggctgaaatcaagagagaaacagaatcactccagagagcaactgctgtcaaccccagctgctgctctccgcgaagttctaggattccccaccctcctccctttattgctaagttctggcagccccaccacaaattccagtgaaaataaaaattccggccaggcgcggtggctcacacctgtaatcccagcactttgcgaggccaaggctggtggatcacgaggccaggagatcgagaccatcctggctaacacggtgaaaccccgtctctactaaaaatacaaaaacttagccgggcgtggtggcgggcgcctgtagtcccagctacttgggaggctgaggcaggagaatggcgtgaatccaggaggcggagcttaccatgagctgagatcgtgccactgccctccagcctgggtgacagagtgagactctgtctcaaaaaaaaagaaaagaaaagaaaaattccaataaatgtaattctcaaagtaaccctgggtgaggtgaggaaactgaggcacagagaggcaagtgaggtggccagtggctgcctggctctggtctttgctcttcaccaccatgcatgggagggacggcagcttagcatggcaccatgcgcagcacgtgagggactggctagttcgacctcgcgaagcgtgtctcaagctcacacaggaggaaactaaagcccagagtcaccaaaagacttgcaagtggccccagctgagcttgggccatccctacttgacgtgaggaaaaaggtcagcaacattcgggaacttaaactggatcaaagaccaggaagtggtggagctgggattcaaagccaagtcaggccggacacggtggctcacgcctataatcccagcactttgggaggcagaggcgggcggatcacgaggccaggagatcgagaccatcctggctaacacggtgaaaccccatctctactaaaaaaaatacaaaaataattagccgggtgtggtggcgggtgcctgtagtcccagctactagggaggctgaggcaggagaatggcgtgaacccgggaggtggagtttgcagtgagccgagatcgtgccactgcactccagcctgggcgacagagcaagactccatctcaaaaagaaaaaaaaagccaagtcagaatcaaggtgccacgccagtgctcttcaactgcggtacaagtcacagtcacccaggagctttaggaaatccagctgctgggcctcagcctagatgaaccaaatcagaacccctggggtgggctgggcacgggcagtcctaagagcgctggagggacttctgctgtgcagcctggcatggcaaccacaccagtccagggctgggagctgccgtactgcatcgcggaagtctcagatgtcttaagtctgcagtagatctaaaaggggctggtacacatcaggagctcggcctgcacccaagagactggcgtggaagccagatgcgcaggccaggctgcagggttaccaaatggttgaggtaagcagatgcgtgagtcattctacagcaataaagagaggaagcggaccaacgtcactcacctgccaactgacgtgcacgactgcggccgctgtgcccgcgaaagctttggtgttgagctgtccggggagtcacctaagtccaagaaaggaagtgtgcggtcaggtaaagtgatcagggggagacctactgttgggggatcgtcaccgaatgggcaattctccgagtatctccactgtcccaacttgagtgtaggtggcactggctcagacaagtacacaaagggccaccctgctgcaggcagccacatgagaggcattcacccctacacggggacccctgcccaggcaaaggctgtggtctgatggatggacacgggggagaaagagaagagccatcttcactgcgccgccccaccctggctgtatatcccatcagggccgagcacgaccttcacagagcgaagtcgacttgtcagacggcacctgcatgcgctagacacttgcccacaggaacaacaccgcaggggtttagcttcccaggcacgcgcaacagagcccacattccctcattttcccgaaccatgactttactgggataataataattcattacactgtgtttgtgctgttttagttgacaagcatttccatgtgtatgatctcatctgatattcacaacaggatgaaaagcaggctcagagggcaaaggggtcaccagttaccgagctaaggcccaacacaggccccagaggtccagtcccgccaccacgcccccagacactggctccatggttcctcctcctctatactggctccttgaaaatcccagtgtgcacttgagtatcagcacatgtgctctggggcctccaaagcctcaggcaccaggacccccttggaacaccttgctatgtctgggaagccatgggaaaagaggctgtccctcagagccccttaccccagcaccaagagggaagggtggggcctggagctgaggcctcttctccacaggtgcttccaggaggccaggcgagggtccaggctgctgcccccacagacagcccctctctctggcaacagcacagctgctgctgggccctccatcttaacaagcctatgcccgccctcctgcgcctgcacccaagctcctgtcccacgtccctgccccgctttaaaccagatctcctcagaaaggctgcctgcacttacatttcctctctcctgctctttttttttttttttttttttttttgagacagagtctctctctgtcgcccaggctggagtgcagtggcatgatctcggcttaccgcaacctccgcctcctgggttcaagtgattcttttgcctcagcctcctgagtagctggaattataggtgcccgccaccacgcccggataatttttgtattgttagtagagacagggttttgccatgttggccaggctggtcttgaactcctgacctcaagtgattgcccgcctcggcctcccaaagtgctgggattacaggcgtgagccactgccccagcctctcctattcttttaaaaatcacctctatcaaagtgactcatgcacagtttttaaaaatgaaggttaaaattttatgagacaaacaagtctcccaccacacccagctctgcttccagcgtgctggaagcttcttgcgatgtctcccttcactcatttctaaatcacgcacccacattgctacctccgcattcttcagaaactccgtttgttacaagagttaagaatctgcccctcacacctccccaccgcccccacctgtgcgttcaccaggcctccatgttcaccccagcactggagaggcgcgcagctcgcacacagctgagtcaaacatgctcccaccctctctccacctccgttttcagtttgtttgtttcttttctttcttacaagaaacaaggtcttgctctgtcacccaggctggagtgcagtggcttgatcactgctcactgcagccttgaactcctgggttcaagtaatcttcctgcctcagtctcccaagtagctgggactacaggtgcccagcaccatgcccagctaaatgtttttgtagaatcggggtctcactgtgtcgcccaggctggtgtttgttttcttgtatggagtggggtggtctgtgactaagtcatcccataatccctgtcttttgggaacattcttgggtcactgaccccgcaccattcacagaggtctctgtgagacccaagttggtcactcctggcgggtgtggaggcaagcccacctctctctccctcgccgcctccctctcccttgccgcctcccgtgttggctccctctctcccgagaccccttcctctcggttgtcctctccctcagctgggtggagcgcactcttcagcagcttccatggtggcacgggaaggtcattcttatgaaacagaacacgaacaagccatctcctgacaccctcacgactgccctagggctgcctgagcacgcacgcctcccaggcccacatcagctcttccctaaacctggacggcgcgtctccactgcagctcccagtaccggggaggcaaagcccacagccagaattccaagtctcaatcctctgggtgacccggcagcatggactcatagtaaatagcaacatttgtaactggactgttttacaaagaatgctgcttgcctcgagtattttgagaaagtgcacatatgaaagcctccactacagggcaccgttcatgtggtcccacgctgtgagtgccctcagccctcacctctcctccacggtgacagctggtgtcacagccaatgagcaacaccaccagtgctctcagccaaaaagtgcacaccaccacgtgcctcccagagctgtgtgttcccaacagcgtggctgctcccctggggcctctcttccggccagtgctgagtttgtgggaccagttttgaccctgatgaatgaccaaaggcgtgcaagagacagtcctgttcccagcattgtggagagaggaggaaccgcctgccgaaggtgaaatgcacatctgagaggtgcgtaaggagaccgcagggacacgctctgggaaacagggcaaagccaacagggatttgggattagcagaagtcctgtggcatcaagcagcccgacagccaggagaccagccaacacttgtgccaacgtggtcaggagagacatggcagacgcatgtcctggctccaggcattcaggcagaagggaagcaaacactactgaacacacctccacatgacctgggccgtagggtgtccctgcagaacccacccaatcacagctcgcatttcttttctttctttctttcttttttttttttttgagacagtctcgttctgtcgcccaggctggagtgcagtgacaccatctcggctcactacaacctctgcctcctggctcaagtgattctcctgcctcagcttcccaagtagctgggattacaggcatgcgccaccatgcctggctaatttttctatttttagtagagacagggtttcaccatgttgaccaggctgctctcgaactcctgacctcaggtgatctgctcacctcggcctcccaaagtgctaggattacaggagttagccaccgtgcccagctcacagctcccatctctacaaactcagctctctgctgttgaaacctacactgaggtctccagctgtggcttctcctctgagctctcagcctgctccacccctcagctgcagcctaagtggcctctcaccctcactacttccaaaatggggccgtggactctgcccgctgcctcttccagccctcctgtcacatgagtggcagcacccaggttccgccagaacctcagggacactcgagtccctctctgcactgccacatgagccctaagctaccagaacgtcaggcagaccgcagcgctccagcctccttccccagcactagcttcctccccaacacagtgagggccaggtccgcattaccctccccaccactcttcggcccagagactctgctcttccctctgtggagggaccttctgaaggtcaagtcgctctgctctgatctctcctatgcacgtcctcctgcactgacggtactccagggtccgctctggtcacgcggcgctctgggagccggcctcgggctgcccctccatcttcatctcttcttaccctgcccctcggtcactgactggctgaggttgctagtttttgttcaacagcaactttcctcttctcagtaagaaatttcagctgtgtgcggaataaagacaacgtgtcctagcatcctgtgcagggaagcgtcgtactcaatgggacacaaacggagtcacagggacaacttgcagtgagggtccttgaaaggtggggatttgctcttcttcacctagaagaaggcttcctgccgggaggtatgagggccagagccggtgcagccacactagaccatgaggatgagaagctcatcacggcagcacaggatggagtaagcctgggtccctgacaccaaggagtactgaccagctgtcgcacgtctacgcagaatcccgaccgcagcggctgcactcccaccctccggcccccatgctgctcccagagcacgtcccacgccttcctgccccaggacctctgcactcctgccgttgcctctgcctggagtgctcccccttgcactttcctaccggctgcctcagtctcctggttcagatctcagtcccgtgtcacctcctgaccatctttgccaaagaaccacccgatgcaaattcctccccaaacatgccagctccaggacaccatcttcccttagtccctttgttgtgctaggatctgcaggcctgctcatctgataacatttcgtatcttttcctattaaacagaaattctgtgagagtaggtctgtcttatcatgatgtcccttgtcccccaaagcattccagcacagagaagacactcagcagaacagcttgttcctacagcaggactcagaatgcagtttctgggagttgcaggctgcctgtgctggccggcactgccagaacttaaaatcctcaagcacccagagggcagatctgcctgacagaggaggccaggacgctcctctcaccttaagtcagctctgagaactttctgcattgcacacaattgttcaagaaattcatgaaaactttacaaacacccacccactaatggccagacacctgctggggccagtggcctcactgactggagaaggcagtggctggagctcaggaggctgaggtggctgcaatctgagggccagaaactagagaggagggggctactccgacagaacgagctctaggaacccaagggaatctcgagtctctggctgagcaccaggcagtgcacaggtgcagggcaggagtcctcaaggtcaagagaagagcaactaccagggagcaacgagcggagctcacagggccgagaaaccgccgtcttaccagggagcaacgagcggagctcacagggccgagaaggtgtcatcttgcagcagcaggagtgcaggggtctcgcgggccttgcgggacacacgggtgtgcagcagaggccttgggaaggacgccggtggcgggaggcggaaaggctatgctagacccaccacttcaaagcataaaaagcctcggaaggatgatctgcaccttaactgcctgccaagcccaacccaactcctcagagaaagacaacaaaatccagacattcaaaagtgtacacctgacaatatccaacaaccaagaaaaacttgtgaaaaatgtagaggcaggaaaatgaggccaaaacccggaaacaaaattagtcagtcgaaacagaccccaaaatgatggggaagatggtatgagaagaatcgtagaccctaaaaccattatcaatttgctcacgaggatgtaaaagaaaacccaagtaccatgagaagaaataaggggaaactattatgttagaaacaaagttaactggatgggcttcacagctgttaggcactgcagaagaaatgatatctgacaacagaaactacccaaactgtagctcaaggaaaaaggctgggccgggcacggtggctcacacctataatcccagcagtttgagaggccgagatgggtgggtcacttgaggtcaggagttccagaccagcctggccaacatggcgaaaccccgtctctaccaaaaatacaaaaaaaaaattagccgggtgtggtggtgggcacctgtaatcccagctactcgggaggctgaggcaggagaattgcttgaactcggtaggtggaggttacagtgcgctgagatcgcgccactgcattccaccctgggtgacagagcgagactccgtctcaaaaaacaaaaaacaaaaaaaaagaaagaaagaaaagaaaaaagataagaaaaagaaaaaaggctgaaataaaaaaaagaacagagcttcggtgtcctgtgagacaacgtcaagaggcctgaaatagatgtgattagagtcctaggaaataaagtggaaagaggaaaagatagctgaagaaataatggccaacgttttccaaatttgctgaaaaaaaccaacccacagatcaaagaagcttaagaaaccctcagcgggataaaggcaaagaaagccacctcaaagcacataataatcaaattcccgacagtaacactaaagagaaaaccttacaagcagcctacgagcattggggtgtcacacacacaggaacgaacgtaagacattcagggagcctccagtgaccccccaaaacaacgtgggcgagaagacagcgggtcacacctgaaagcactgttggaggaaagaactaaaaacaccatcaatgccatcaataattgtttaaaactttaaatgcaatttcttcagtattttttaaagacacattaaaatgtatctattactcaccaatagaaaacttaggaattttaaattgatttgtaggagtaggcataacctttgtcttggaatttagacaggaatctcgccgtctgatacttctagtcttattcaattgagaagattctgaccaagcgcaactggagttcagccactggccgccaccttccggagtctggggttgggtgggggatgctgaggggggtgccgtgagctgctccgctgccagctcagaaacatcgacccgcttggcctgccaggaggatgcccccacagggcctgcaggcagagctggccgcagcatggcgggtcccattctgcctgacttgctgatgtttgacagaggccgggagctatttgcaggaatacttgcaaattcacttgatttagctagaaggtatacacacaaaaatcacattattataaaagtatgaagctatttaacaaacacacagaagttatgctgtctttagcatatctaccttaaacataagacacattaacaatattctataagcccttcaggcaacatcatcaaacacaggatggctcaggcagcttttagcttagctgagtgtattctaaggtacttattctcaaaataattactaacatgtacataagcatgcataaattcaagctctcctatcttcgttgattatgttggcaggagaaatctacattagttgagcagatggaaggggatagtctagtcacatgtctcacctgtctggtcacagaggtgggcagggaacaaggaaaaaagacgcaattgttactggttgattcctttaaaattacaaggaggctgcgtcatattaaccataagcactatttaaaatagaagaccagataaactagggtaatacatactgagctaccaatatacgcagacgatctggtaaaggattcttaaagaaaaactttagcccaggagtggtggctcacgcctgtaatccaaacactttgggaggccaaggcaagagatcactcaaggccaggagttcgagaccagcctggctaatatagtgagaccatcctctctacaaaaaacacaaaaatgtgggccaggcgcagtggctcgtgcctgtaatcctagcactttgggaggccaaggcgggcggatcacgaggtcaagagatcgagaccatcctagccaacatggtgaaaccccgtcactactaaaaatacaaaaattagccgggcgtggtggcaggtgcctgtagtcccagctacttgggaggctgaggcaggagaatcactcgaacccgggaggcagaggttgtagtgagccaagattgcgccactgcactccaacctggcaatagagtgagactccatctcaaaaaaaaaaaacccacaaaaattagccgggtgtggtggcatgtgcctgtagtcccagctactcaggaggctgaggtgggaggattgcttgatctcaggaggtcatcacctcagtctataaagataaggacacaaacctctcttaatcacagaatggcagagtcagaattccagatcagatcaatctgattagagagttcacacttatcatttttttttttttttttgagacggagtgcagtgatgcaatctcggctcatggtaacctctgcctcccgcgttcaagccattctcgtggcccagtctcccgagtagctgggactacaggcacccgccaccatgcccggctagtttttgtgtttttagtagagacagggtttcaccatgttggccaggctggtctcaaactccaggggtcaagcgatccacccatcttggcctgccaaagtgctgggatcacaggcgtgagcccctgcgcccggcccactttttacattttgtgaacacaatccacaccatgctgccctgaacgaccccgagacgccacatggccaatgcacctcgaagaggatttcgctctgaagagcagaaaggcgaaggctttcccttaccactagatggcagctgtggcttggcaaggttgaaatgtggcttgacctcaaacaggtgtgggagcatggatttaaacaggcacccaggagttatggggccatatgccctacattatctggaatagtcctattttaaaactggtgtctcatgacatggacatgagggtgattccagtgtccatgttctcaggcacggggtatcatacatgctttctggccatgtgtaccccgtagactgaagccacccatctgagtgtgccctcctcatgggacagaggcactgagggcaggtacagcaactcagtccacagcctggtccaccgcacacagcacgccctccgggacgtcctgccaagcctaagtggttctgcagaaacagtctccaaggcctgagcagcactccaggcctcacctggccagatgtgggtccaagcatgatgccggctgcctcacctttgcccactgctggggatgtgcacgcactggatgccccgctccaaacaggccccgaggaggacttccttgcgagattgctggtagagccgggtgcttttaacagggtcttcttcagccccaactggggcaaaatgtgaaaaaacagaatcagcaaagatctcgttatttacctattacttgtgtctgcaaaagtaaggggtttttggctgggcacggtggctcacgcctgtaatcccagcactttgggaggctgaggccggaggatcacaaggtcaggagtttgagaccagcctggccaatatggtgaaaccttgtctctactaaaaatataaaaactagctgggcatggtggcaggcacctgtagtcccagctactcgggaggctgaggtaggagaattgcttgaacccgggaggtggaggttgtagtgagctgagctcgtgccattgcactccagcctgggcgacagagtgagactccgtctcaacaacaacaacaacaacaaaagttggtgtttttactattttaaaataatctaataattatcatcttgaatttaaagaagaaaaaagtcaagcagcacttctcaaagtgtagtcttcaaacccctgcatgaggaccacattagggagctagcagaaatgcagatttggggccccaacccagaccccatgagtcagcagctgcagggcccagctttgggcagttctaacaagaactgccagtacacacagcttggtttaccgccaatgccagaaaataagtggcaaagatgtggctggtagtctccatgcctgtgaggaaccgcaattttctttcttttccttttttttttttttttttttagacagggtctcactctgttgcccaggctggaatggaatgcagtggcatgatcacagctcactgcagccttgacctcctgggctcaagcaatcctcccacctcaacctcccaaatagctgggaccacaggcatgcaccaccatgcctggctgatttttattttttaatggagatgggggcctcactatgttgcccaggctggtctcaaactcctgggctcaagtgatcctcccgcctcagcctcccaaagtgctgagattacatgtgtgagccactgcacccagctgctgttttcaaaacatcaacatctcatgtcatctgttcaagaactctacatgagggaaacggaatatccccacctacaaactggggctccgagacgctgacttttcccaacccacacagctcccagggcagaggctagccatcagtgcacactgcgaagccagtattctttgcatgtattttgcaggctgcctcttgtgggtgtattttcaacttttccacctcttttttttttttttttttgagacagggtctcattctgtcacccaacctggagtgcagtggcgtgattatgactcactgcagcctcgacctcctgggctcaagcaatcatcccacctcagcctcctgagtagctgggactgccgttgctcaccaccatgcccagctaatttttgtattttttgtagagatgggtttcatcatgttgctcaggctggtcttgaactcctgggctcaagtgatcctcccaccttggcctcccaaaatgctgggattttaatccaaagcacttgtacacacagctgccacctcattcccagcaaccacaagtttgggccccagcagccaactcaccttgtttggaacagggatcgcccgcttgccctggcccaagtggcttccggcggccggcacattgacagcacccggggcaggtttgtcagggagaacatcccggtgggattccttctcagctgggatttttgtcctggaaggactagctggaatctctttcttgggctgaaaattttaatttgaactgtgagaactgtctagtgcttaacaatgtacagagatactcaggcttccattcagagcgagcctaggccccatcttccccagtgctacacatgcccctccattcatcagccagattgaagggaacagggcaagcagttcgcatcctccaccaaatcactatggacataagtgatgatggattttgcttcctcattaaaaacagcatcaaatgatacctacacagatcattaataggagagaggttctctaaagccattccccagtcaggatccttatttaagaatgataatgagaaagctggtctagttacacaaattttaaaatgctgtacagaaaggactcatccattaaatggtcatctctaccagagaagctgctcaattgcaataaatcttcttggtctagtactgaaagccattttctttggccagcagagtcaaaaaataagttcttgacatatttagggacaagggcattcatggaactaatttatacttacataaatagcccccttataacaggagagttaataaggtaacagcaatagaagctcagagtggtaaagacgcagcagtaactttttccctttatagcatttctaaaaactgagatacttctcataacataaaattcactattttaaacagtatacttcagtggtttttagtagatctgttatgttgtacaaccagcacaagctaatcttaaaatatagtggtgtcccaaaaaagaacctgtactcggccgggtgcagtggctcacgcctgtaatcccagcactttgtgaggccgaggcgggcagatcacctgaggccaggagtttgagaccagcctgactaatatgatgaaaccctgtctctactaaaaatacaaaaattagccgggcgtggtggcgggcgcctgtaatcccagctactcgggaggctgagacaggaggactgcttgaacccgagaggcagaggatgcagtgagccgagattgcaccattgcactcctgcctcggcaacaagagcaaaactctgtctcagaaacaaaacaaaacaaaacaaaaaaaaaaacaacctgtacccattagcggttctcccctttccctcatcctccccagccccacctagggaagcactcaaccacgcctctgtcattggcctgtcatagtcatttcatataaatggaaccatacgacatgggaccttttgttatggcctctctcactgagcaaaatgttttcagtggtgccatcttggctcactgcaacctccacctcctgggttcaggcgattctcctgcctcagcctcccaagtagctgggattacaggtgtgcaccaccatacttggctaatttttgtatttttttgtagagacggggtttcaccatgttggccgggctgggctcaaactcctgacctcaggtgattcgcccaccttggcttcccaaagtgctgtgatcacaggtgtgagctaccacgcccagtagtgtttctttttattgccaaaaataaaccattgtttggatagactgcattttcgttacccaatcatcatttgctggatgcctgggttggtcctacttttttggctgttatgaataatgctgcttcgaacatctgcatgtggatttttctgtggatatggtttcaattctctcaggtctgtgtactaaggagtggaattgctgggtcccatgggaccctctacatttatttttttgaggagctgccaaactgtttccacaacagctgccccatttcacagtcccaccagcaatgcgtgagcttccagcttctccacatcctcagccttctcctcatcctccacaacatcctcatcctcaaaataacacctgttattttctttttcttcttcctttaggcatcctagcagttctctgtcaagcacacttgtaagtaggtgttacactcaagtggtccacccattgctaatgactcctcacaggagtgagcatgtgccatgagccactctagaagtgacttctcccagagaaacatgcaggacatggtggggctcccacgtgtgcatgagtgcatctcagctgtgcggacagtgccctgtccactgggaacaagctctctggaccccagctcaccacccaggaccaggagatcaaaagagatacttcgatgggtctggagcagcccaaatcacaccacctctctccccgagtccacgcgtgctacatgcacaatccctgtcccgagtccacgtgtgctccacacagcaggacccatcccactctcattctagaaacatcacggtaggaatctacatcccaaacgggctccaaataaaggagtttgcaggccccagctgttgggggtggcagtgccgggcatacctccttgtcaagggcagtgtgtggcgtggcggctgcacctcggctgccttccatccttggctctcaccacagggagtcatgtggctcaggagatgggcttggtgggggtaaaggaatttctgggcccttgctgagcattctgcatttgcctgcacctcctatcagccccacccagggtcattcctctgtacgtgctgcccaggggagggggcagagctgggaacgggctgcagggtgggccccggggctcccacccgccccgtcttcctctctgtggcctctcccgagcaagagccagatcgggcagccctggcagcaagtcctgtgctcacacccagctttcccccagacctccaggaccctcagtgtcccagagtaggcagactgcacccaaaggcacccctgtcaactgccacctcccaggaaagctcacctcactcagtgcccaggaggaatgcagtgtaaactgaggcacggtcaaggaggctgactagcagccattgcagaggaggggagtttttggaagaggttgcttattaaagcaaatgaaatccctactgtgtggtatatccagcattgtaacaaaacaaaaggaacaacttcagacagaatttaggaggaaatattaggtcaacccaacttatccaagccacccccacatcagctccctattggcaactgcttttcctggactccgcattcctgtgttttgtaggcctcagagactcgccacctctgaggctttccgcatgtggcttctgtgagagggctgaggggcaaggagtgggggctccccaggcaggcgctctgctgtggcatttaccttctccgcagccccagggatgcttcttcctctaacagaggccgctcgaggcagcagcaatttggtcccgggcttcctctgagtcgctgcctgacttgcagcatgagcagtgcatgattccctgggcaaagcatgagcagagtgcggaggccccggcgcccgggtgaggcgggcctgggcaccagagctgggcagggccggggaggaggccaagagccgaggctcacccacagggggccccagcaaggggctgtctgacaggtagtatgtctcccttttaagagacgtggggcttttcttcatttccttttctttctcaaagaggtttatttttaattttgactcctgtatgaatctttccacgccctggctccgagggtcttcaggcttggcagcttgggctgcctggttccggctgctgctctcaatgtgtaaagccagtaagtgagcttctttgtacacctccacgaacttctccccggccagagggctccaggcaaagggactctcagatgtgggcaacggaggctgttcgggaaccggattatttaattccaagctggcagcaatacatctttctttatgtccaaagggtccgaagaagacttcatcatcttcatttgcactatttgtttaaaaaaagaatgattaataactcataacactggcatttaaaggaaagactttactgaatgtggttatgcccaaggcaagggaagaaaactcatttgtttacctcgaagaagacaatgaaagatcgaagtcaaatttttcatcggccaaaagaagaatgtctagagggaaaaaatccactgttattttagtgccacagctgataaagagaaaaatattaccaggctctatggcttggaattaaataaaggtactgtgaaatttcactccccaaagtgtatcctgtcatgatgctaatttagtttttcatagggggctctaagttatattttttcctttttaaaaaattttttaaattttttctagtgacgaagtctcgctatgttgaccaggctggtctcgaactcctggcctcaagtgatcctcctggcgtggcctcccaaagtgttggggttacaggcgtgagccaccatgcctggccagttttttttttttttaattgcatcagccggctgggggcggtggcttatgcctgtaactccaacactttgggaggtctaggcgggcagatcatgaggtcaagagatcaagaccagcctagtcaacatggtgaaaccccgtctctactaaaaatacaaaaattggctaggcatggtagcgcacacctgtagtcccagctactcggaggctgaggcaggagaatcgcttgaacccaggaggtggaagttgcagtgagccaagatggcaccactgcactccagcctgggtgacagaaagacactctgtctcaaaaaaaaaagaaattacatcagccattctatgttcactaagccacccaaaagcttaggtccttacttttaagatataatctaaaatgcattcactgactcattcaactagcttttcaagaagagataagtcattttccaggtatagaacattttcaaaagaccaccttcctcagctcccctagaattaaattcccctcttacaagctacaaaacatctattcatagttcaacaatgaatttaatattactcaaatgcacggagtagggactctataagaattcgttgaccgccattgcttcttggagtccttcctgaatcctcagatgaaattactctgtaccccaccccatccataattctatcacagctggcatggccctgtctgcccaggtccctctaaaacagatcacaagttccaggttagtgggtccctctgcaggggcacctgctccctcctccagctccccgcaaggctcccgcagtgcctggacctcacttctaccactgcactagcctctgtgagtgcctcttgacccttctatggccccaactagactataagctcctccaagataacagtgtctaacactaacccaaattcccaaatgtccagctaagggcctggacacttagcaaatatttatcaaaatgcactgaaatacagtatttgctcaatactgtaaagcttataaagctctcccataaatgtttttatcttaataaacaatgaaggccgggcaaggtggctcacacctgtaatcccagcactttgggaggctgaggcaggcagatgatttgtggtcaggagttcgagatcagcctggccaacgtggcaaaatcccatctctaccaaaaataaagaataaaaaaattagccgagcgtggtggtgtgcacctgtaatcccagctactggggaggctgaggcaggagaattgcttgaacctcggaggtagatgttgcaatgaaccaagattgcgccactgcactccagcctgggtgacacagcaagactctgtctcagaaaacaaaacaaaacaggctgggcgcaatggctcacgcctgtaatcccagcactttgggaggccgaggcgggcggatcacgaggtcaggagatcaagaccatcctggctaacatggtgaaaccctgtctctacaaaaaatgcaaaaaattagccgggcgtggtggcaggtgcctgtagtcccagctactcgggaggctgaggcaggagaatggcgtgaacctgggaggcggagcttgcagtgagcagagatcgcgccactgcactccagcctgggtgactgagtgagactctgtctcaaaaaaataaataaataaataaaaataacaacacagcatgcttctcaaaaatcataaaatttgaaaatatactaatatcctaatttggtcctgattaatcaattattcttaattacctaatcaaggagaagtcagaacaaatgcacaaaagaaagaaaagagaaataaccacacagagagggaatgaaaagatccataagcacatctgtcaacttcatgcacataaacctaagaacttggctgaaagagataattttctaggaaaatataattttatttattcttttttttttgagatggagtctcactctgttgcccaggctggagtgcagtggggtgatcttggctcactgcaacctccgcctcccaggttcaagagattcttctgcctcagcctcctgagtagctgggattacaggcgcgcgccaccacaccgggctaattttcgtatttttagtagagatgcggtttcaccatgttggccaggctggtctcaaattcctgaccttgtgttccacctgcctcagcctcccaaagtgctgggattacaggcgtgagccactgcacttggtatattctttttatttttttgagatggagtctcactctgtcactcaggctggagtgcagtggtgtgatcttggctcactacaacctctgcttcccaggttccagcgattttcctgcctcagcctcccgagtagctgggattacaggcacgtgctaccacgcccagctaattttttgtatttctagtagagacggggtttcacaatgttagccaggatggtctcgatctcctgacctcgtgatccctccatctcggccttccaaagtgctgggattacaggcgtgagccaccgcatccagtctattttttatttaaattgtctaaatgtacttatttataaaactgactccagaagacagggaaaatcttaatacttcaataatcataaaataactggtgaaatttattaaagagctatcctcttcaaaaaagcgtcccaactagattcataggataattgtatcaaaacattaaagaacaaataattccaatactatttacatcactccagaggattaaaagaaaaaaaactttccaacttacttccacgaggcaagtaagtatgttaccaaaaaacctagaaagtgatcaataaagaaagtaaagaccagccttacttacatcagcataataatcctttttctttttttgagacagggtctcgctctgtcacccaggctggagtacagtggtacaatcatagctcactgcagcctcgaactcctggactcgagggatcctcctgtctcggcttcccgagtagctgggactacaggcacgcacaaccatccctggctaatatttgtattttttgtagagatgggatctcctcatgttgcccaggctggtctcaaactgctgggaacaagcattcctcctaccttggcctcccaaagtgctgggattacaggtatgagctaccacacctggcctaacatcaaactctttaacaagaataccagcaaaaagaatcctgcaaacattaaagtggtaataacataacacaaccaagctccctgcatttcatgactgtgagatggtttcatttcatacaatctactcatataatcattttattactagagctaaagagaaaaccatgatcgtctgcacatatgttgaacgggcatatgataaaatacaacatacattcttgattttagaggctcttaataaaaagtaatagatatataaggaaatccccatctcaacccaaagccagcattaggttcagtgggataacgtcagaagtattccttctaaagacaggaacaaattgatcttaccagttaggataggctaacatgctgaagtaacaacccttaaaacaacaaaggtaggccaggtatggtggcctgtgcctgtaatcccagcactatgggaggccaaggaggatcacttgaggcccaggggttcaaggccagccctcgcaacatagcgagaccccagctctacaaaaagaaaaaaaaaaatgagcggggtatggtgccatatacctgtagtcccagctactcaggatgctgagcccaggagcttgcggctgcagtgagctatgatcaagccactgcactccatcctgggcaatagagcaagagacactgtctcaaaacaaaccaaaaaccacaaaggtatatttctcactcaaactatatgtctgcagaggggtaggctggggccctgctccctggcctcctcactccaggaccccaactgatggagcctccaccatcaggaacaccgctcgtctccatggcaggaaggaaaagaaccaattccacactggttcttgaagatttccacccagaaatgacacacacgacaacattcccatttcactggccaagtgagtcaccagagccaactgaatttcaagtgaacagggagtacaattctattacatgcccagaagacaaacacatagaaatgctcatgaatagcacacctacgactaccatttacttggaaattaacccataacccagtatcggacttaatgaaaaaccacagaagcaattccattaaagccaggcacgtggcaatgacatctccaagcacaattcttaacactgttctggacacataaagcaacacagtcaggcaaaggaaggaatgtggaggtaacatgatcacactgcacagatgccatgattatagacacgagaaacaaatcaagaagatcaactggaaactactataagtagtaaaaggataaaagaacatggctaaggacaaaatcattacagagcaatcaacagctttcatatctacaaagaacagtgagaagataacatggaagaaaatacttcgtttctagcagcaacgaaagatgcaaaataacgataaacaaacctaacaagaaatatgcaaaatggatataaagaagacttggcatatcataaaagtaacatatcaaataaagagggaaagtagaccgggcagggtggctcacatctgtaatcccagcactttgggaggccgaggagggtggatcacaaggtcaggagatcgagaccatcctggctaacacggtgaaaccccatctctactaaaaaatacaaaaaattagccgggtgtggtggcaggtgcctgtagtcccagctacttgggaggctgatgcagaagaatggcatgaacctgggaggcggagcttgcagtgagccaagatc

SEQ ID NO: 62242 - DNA, 904 bp, Homo Sapiens
  misc_feature (517)..(517): n is a, c, g, or t
  misc_feature (526)..(526): n is a, c, g, or t
  misc_feature (542)..(542): n is a, c, g, or t
  misc_feature (727)..(727): n is a, c, g, or t
ttggcttttagaaagagaattttatttggaatgaaaatatagagcccaccctcccgcctcctctggggagggagcagagggctgggcagtggtcggggagatggtccctcagaggtcgaggagctcgcctgggcgtagacatcctccacaggaacagtgaggaaagctgggcgctggcttcggcctgggcctgggacgggtgggggtgggaactgacccctgcgctgcctcagaggctctgggcagccagctagcccggtgcgacccgctggcagaagctgagtgggaagggggcggcggaggagatgaaggtggcgtgtggctgtggccctacgcatccccgttctccatgcggcccagctgctcctccaggcggcagatgccggtcgccctgctccttgaccagcgccctcagggcccgcagctcctgcatcacctcctccagcttcccagcctccccggctctggccaggctgccgctgggggtggcatcagcagcagtggtggtggaggcggnggcccctangtgggaggagcccggngccatggcggggccgctgtcagacaacacgttgcgccggctgatcttcaggtcccgctgcttgctgggcacgtaggcctcccgcagtgagatgagggatcggtcggcatcccgcccgctcacccactcctcagcctccagggctgcctcgggccccgctggggggcgggtcagatcattcctggnagaggttcgactttctttgcccagtcatgacgatgggcttacactggcgcctcatgccagttgtggaccccggcgatcttgcacttgctgaccttccagccccgctttggcatgctgcccataccccgttgccgtttccttggtgggtgaacggttccagaaatggaggaaggaggc

SEQ ID NO: 62243 - DNA, 2255 bp, Homo Sapiens
gatgtgggcacgcctcagagccagaagtttatggctcccacctgctcaatctgacaggaagcttctgctccccagttctccccagccactgtggtctacagattccaggaaacccatccccctgtgacctcagggtgtgctctgttctccaccctagggaccagaaggagccaggagtaaagaactggcttacttggccgccactgggaaattctgggtaattcgagacgccctggaatttggacccactccgctgataggtggtgggcagggttctagggaacacaagaggcggagccaggtggcttccctgtgctggcattcttggctctctctctctctctttctctctctctgtctctctctctctctctgtctctcagccttgaagccgtttccctctgcgattcatgtaagtgtgactcgatttcagggaaagggaactcgcgtgggctgaggagaccggagtggacgggctggggaaggcaccgtgatgcccgcaaccccgtccctgaaggtggtccatgagctgcctgcctgtaccctctgtgcggggccgctggaggatgcggtgaccgttccctgtggacacaccttctgccggctctgcctccccgcgctctcccagatgggggcccaatcctcgggcaagatcctgctctgcccgctctgccaagaggaggagcaggcagagactcccatggcccctgtgcccctgggcccgctgggagaaacttactgcgaggagcacggcgagaagatctacttcttctgcgagaacgatgccgagttcctctgtgtgttctgcagggagggtcccacgcaccaggcgcacaccgtggggttcctggacgaggccattcagccctaccgggatcgtctcaggagtcgactggaagctctgagcacggagagagatgagattgaggatgtaaagtgtcaagaagaccagaagcttcaagtgctgctgactcagatcgaaagcaagaagcatcaggtggaaacagcttttgagaggctgcagcaggagctggagcagcagcgatgtctcctgctggccaggctgagggagctggagcagcagatttggaaggagagggatgaatatatcacaaaggtctctgaggaagtcacccggcttggagcccaggtcaaggagctggaggagaagtgtcagcagccagcaagtgagcttctacaagatgtcagagtcaaccagagcaggtgtgagatgaagacttttgtgagtcctgaggccatttctcctgaccttgtcaagaagatccgtgatttccacaggaaaatactcaccctcccagagatgatgaggatgttctcagaaaacttggcgcatcatctggaaatagattcaggggtcatcactctggaccctcagaccgccagccggagcctggttctctcggaagacaggaagtcagtgaggtacacccggcagaagaagagcctgccagacagccccctgcgcttcgacggcctcccggcggttctgggcttcccgggcttctcctccgggcgccaccgctggcaggttgacctgcagctgggcgacggcggcggctgcacggtgggggtggccggggagggggtgaggaggaagggagagatgggactcagcgccgaggacggcgtctgggccgtgatcatctcgcaccagcagtgctgggccagcacctccccgggcaccgacctgccgctgagcgagatcccgcgcggcgtgagagtcgccctggactacgaggcggggcaggtgaccctccacaacgcccagacccaggagcccatcttcaccttcactgcctctttctccggcaaagtcttccctttctttgccgtctggaaaaaaggttcctgccttacgctgaaaggctgaagtggggcgcgcgaagggcggcgaagcggagacggcggctctccgggatccagctccgcccctggccagtgtgcggcccgggggctccctgtgcccgcgtgaggcgagagaacaggggacttgagtctcgaacagcggttgtttttactttatttatcttaggccctcagctccctgacgtcctgagcctccctgtgacgctctggccttctctgcacctcagagtgcagaaccacagacggcttcggctgtgcctagggcaacagccaacctaggagccagcgggctttcggggaaaaaaaagaaaaagacatctaaaataaaatgtttaaactgtttcaaaataaaaaaaaaaaaaaaaaaa

SEQ ID NO: 62244 - DNA, 2838 bp, Homo Sapiens
ccagtgtggtggaattcgtccgcggtggtggcggtgcaagagagctgagggaggcgcgagggcgcggagttccaggtcgagcagttaggccgcgagcgactgcggcgccgagccgatgagtaacccgaagcccctagaggagtggtcacctgcctgagggcacttctgtcccaccagcatcagaccaggccgcaccgagtccccggcaccatgtttgggaagaggaagaagcgggtggagatctccgcgccgtccaacttcgagcaccgcgtgcacacgggcttcgaccagcacgagcagaagttcacggggctgccccgccagtggcagagcctgatcgaggagtcggctcgccggcccaagcccctcgtcgaccccgcctgcatcacctccatccagcccggggcccccaagaccatcgtgcggggcagcaaaggtgccaaagatggggccctcacgctgctgctggacgagtttgagaacatgtcggtgacacgctccaactccctgcggagagacagcccgccgccgcccgcccgtgcccgccaggaaaatgggatgccagaggagccggccaccacggccagagggggcccagggaaggcaggcagccgaggccggttcgccggtcacagcgaggcgggtggcggcagtggtgacaggcgacgggcggggccagagaagaggcccaagtcttccagggagggctcagggggtccccaggagtcctcccgggacaaacgccccctctccgggcctgatgtcggcaccccccagcctgctggtctggccagtggggcgaaactggcagctggccggccctttaacacctacccgagggctgacacggaccacccatcccggggtgcccagggggagcctcatgacgtggcccctaacgggccatcagcggggggcctggccatcccccagtcctcctcctcctcctcccggcctcccacccgagcccgaggtgcccccagccctggagtgctgggaccccacgcctcagagccccagctggcccctccagcctgcacccccgccgcccctgctgttcctgggccccctggcccccgctcaccacagcgggagccacagcgagtatcccatgagcagttccgggctgccctgcagctggtggtggacccaggcgacccccgctcctacctggacaacttcatcaagattggcgagggctccacgggcatcgtgtgcatcgccaccgtgcgcagctcgggcaagctggtggccgtcaagaagatggacctgcgcaagcagcagaggcgcgagctgctcttcaacgaggtggtaatcatgagggactaccagcacgagaatgtggtggagatgtacaacagctacctggtgggggacgagctctgggtggtcatggagttcctggaaggaggcgccctcaccgacatcgtcacccacaccaggatgaacgaggagcagatcgcggccgtgtgccttgcagtgctgcaggccctgtcggtgctccacgcccagggcgtcatccaccgggacatcaagagcgactcgatcctgctgacccatgatggcagggtgaagctgtcagactttgggttctgcgcccaggtgagcaaggaagtgccccgaaggaagtcgctggtcggcacgccctactggatggccccagagctcatctcccgccttccctacgggccagaggtagacatctggtcgctggggataatggtgattgagatggtggacggagagcccccctacttcaacgagccacccctcaaagccatgaagatgattcgggacaacctgccaccccgactgaagaacctgcacaaggtgtcgccatccctgaagggcttcctggaccgcctgctggtgcgagaccctgcccagcgggccacggcagccgagctgctgaagcacccattcctggccaaggcagggccgcctgccagcatcgtgcccctcatgcgccagaaccgcaccagatgaggcccagcgcccttcccctcaaccaaagagccccccgggtcacccccgccccactgaggccagtagggggccaggcctcccactcctcccagcccgggagatgctccgcgtggcaccaccctccttgctgggggtagatgagaccctactactgaactccagttttgatctcgtgacttttagaaaaacacagggactcgtgggagcaagcgaggctcccaggacccccaccctctgggacaggccctcccccatgttcttctgtctccaggaagggcagcggccctcccatcactggaagtctgcagtgggggtcgctgggggtggagagaacactaagaggtgaacatgtatgagtgtgtgcacgcgtgtgagtgtgcatgtgtgtgtgtgtgcaaaggtccagccaccccgtcctccagcccgcaaggggtgtctggcgccttgcctgacacccagccccctctccccctgagccattgtgggggtcgatcatgaatgtccgaagagtggccttttcccgtagccctgcgccccctttctgtggctggatggggagacaggtcagggccccccaccctctccagcccctgcagcaaatgactactgcacctggacagcctcctcttttctagaagtctatttatattgtcattttataacactctagcccctgcccttattgggggacagatggtccctgtcctgcggggtggccctggcagaaccactgcctgaagaaccaggttcctgcccggtcagcgcagccccagcccgcccacccctgcctcgagttagttttacaattaaaacattgtcttgtttaaaaaaaaaaaaaaaaaaaaaaaaaaa

SEQ ID NO: 62245 - DNA, 1714 bp, Homo Sapiens
catgattacgccaagcttggcacgagggtgatgaaggcctacgagtgcggcgcggcctgaaggggcacgcgggggacctgcaaagctagtgaggggcggggcaggcggcgcggtgggggcgggccgagcccggaggccagatgagcggacacagccccacgcgcggggccatgcaggtggccatgaacggtaaggcccgcaaagaggcggtgcagactgcggctaaggaactcctcaagttcgtgaaccggagtccctctcctttccatgctgtggctgaatgccgcaaccgccttctccaggctggcttcagtgaactcaaggagactgagaaatggaatattaagcccgagagcaagtacttcatgaccaggaactcctccaccatcatagcttttgctgtagggggccagtacgttcctggcaatggcttcagcctcatcggggcccacacggacagcccctgcctccgggtgaaacgtcggtctcgccgcagccaggtgggcttccagcaagtcggtgtggagacctatggtggtgggatctggagcacctggtttgaccgtgacctgactctggctggacgcgtcattgtcaagtgccctacctcaggtcggctggagcagcagctggtgcacgtggagcggcccattcttcgcatcccacacctggccatccatctgcagcgaaatatcaacgagaactttgggcccaacacagagatgcatctagtccccattcttgccacagccatccaggaggagctggagaaggggactcctgagccagggcctctcaatgctgtggatgagcggcaccattcggtcctcatgtccctgctctgtgcccatctggggctgagccccaaggacatagtggagatggagctctgccttgcagacacccagcctgcggtcttgggtggtgcctatgatgagttcatctttgctcctcggctggacaatctgcacagctgcttctgtgccctgcaggccttgatagattcctgtgcaggccctggctccctggccacagagcctcaagtgcgcatggtcacaatctatgacaacgaagaggtggggtctgagagtgcacagggagcacagtcactgctgacagagctggtgctgcggcggatctcagcctcgtgccagcacccgacagccttcgaggaagccatacccaagtccttcatgatcagcgcagacatggcccatgctgtgcatcccaactacctggacaagcatgaggagaaccaccggcctttattccacaagggccccgtgatcaaggtgaacagcaagcaacgctatgcttcaaacgcggtgtcagaggccctgatccgagaggtggccaacaaagtcaaggtccccctgcaggatctcatggtccggaatgacaccccctgtggaaccaccattggacctatcttggcttctcggctggggctgcgggtgctggatttaggcagcccccaactggccatgcactctatccgggagatggcctgcaccacaggagtcctccagaccctcaccctcttcaagggcttctttgagctgttcccttctctaagccataattcttagtggattgagccctcttggaaagacttttctgccatccctttgcacctgagaggggaagttttcagctgagctgaagctggattattaaagtggattgtcactcagaaaaaaaaaaaaaaaaaaaa

SEQ ID NO: 62246 - DNA, 6961 bp, Homo Sapiens
gacgccttggacgcggttcaggaatccgccgccgctagccggctcgggcctgagcggggagggcgccaggcaggacctctcgcaggctcgctgcgcaggacggcgcccgcctggcgccgcttcccttccagcgtgccgaccggccccgcagcgcctccatccctccggcccgccccggagaagacgcacagctcgggccgcgcgggcgccggggccgcggaaccgcttctgccgggatcttccaggaggaaagcgaagttgcgagcggatgctgcccgcgccggaccccagccgcggagggtcggggccgccggtggagtctcggcggccggggacaagggtgtcccccacctgaagacggcaagctgggtcctgagtgatgcccctcagctgagtgtccaaggctggcccgaggagcccccacggccccacctttccccatggagaaaggactcactttgccccaggactgccgggactttgtgcacagcctgaagatgagaagcaaatacgcccttttcttggtttttgtggtgatagtttttgtcttcatcgaaaaggaaaataaaatcatatcaagggtctcagacaagctgaagcagattccccaagctctagcagatgccaacagcaccgacccagccctgatcttagctgagaacgcatctctcttgtccctgagcgagctcgattcagccttctcccagcttcagagccgtctccgcaacctcagcttgcagctgggcgtggagccagccatggaggccgcaggggaggaagaggaagagcagagaaaggaggaggagccgcccagaccggccgtggcggggccccggcgccacgtgctgctcatggccaccacgcgcaccggctcctcgttcgtgggcgagttcttcaaccagcagggcaacatcttctacctcttcgagccgctgtggcacatcgagcgcacagtgtccttcgagccggggggcgccaacgccgcgggctcggccctggtgtaccgcgacgtgctcaagcagctcttcctgtgcgacctgtacgtgctggagcacttcatcacgccgctgcccgaggaccacctgactcagttcatgttccgccggggctccagccgctccctgtgcgaggaccccgtctgtacgcccttcgtcaagaaggtcttcgagaagtaccactgcaagaaccgccgctgcggccccctcaacgtgacgctggccgcagaggcctgccgccgcaaggagcacatggccctcaaggcggtgcgcatccggcagctggagttcctgcagccgctggccgaggacccccgcctggacctgcgcgtcatccagctggtgcgcgacccccgggccgtgctggcctcgcgcatggtggccttcgccggcaagtataagacctggaagaagtggctggacgacgagggccaggacggcctgagggaagaggaggtgcagcggctgcggggcaactgcgagagcatccgcctgtccgcggagctggggctgcggcagcccgcctggctgcggggccgctacatgctggtgcgctacgaggacgtggcacgcgggccgctgcagaaggcccgcgagatgtaccgcttcgccggcatccccctgaccccgcaggtggaagactggatccaaaagaacacgcaggcggcccacgacggcagcggcatctactccacgcagaagaactcctcggagcagttcgagaagtggcgcttcagcatgcccttcaagctggcccaggtggtgcaggccgcctgcggccctgccatgcgcctcttcggctacaaactggcgcgggacgccgccgccctcaccaaccgctcagtcagcctgctggaggagaggggcaccttctgggtcacgtaggggggccggggccccgtatgcccctcctcgtgaaaggcctgccccgtctttctgccgcagccctcgcagagggcgggtgcacagcgccatgagcgggcagcgcctcctgtagcagtagggcccccagccagcgctccagccaaagcggcggccccagggttaattgcggagaacaggacagtgcccggtccccttgagggccatcacacccagacccaacgggttgcagcctcctgagcaggcctaggcaggcccgggcctgttggcaagcttcgatctcacacacacagaaacatacattcgtgcctggagaccctgcaggccagagtccaaatatttaacaatcagaaggggcaaggctctgaccagtgacagtcagacctcctgctttatttggtgttaacgtttcttgtctggatggtgaagtctggaatctgggtgggtccttggaggaggggctaggacagccgtgggtgtcaaaggtggcatttgaggctcgtttgaggtgacagtggctgtttaccaactagtacagagcgattcagcgttttcatgaatgggttggctgtgctggttactgatgaatatgggccccttatagagctgcaaaacacacacatgcgtatagacatacatacatgtacaccatacatagacaagcatcataaaggcacaagtgcacacacatctatgcagacaagcttcctcgctgcttatgcccacagggtttttctgtatgacacacctcagaggagcctgtgcttaacatttgtaggattatttcgagggcagggcaggggaaagaaacgcgttaaagggccatgacatgacacagttccctggccgggtttggactgaacagtggattcagaactgcagcgttcaaagcccctgcccgccttagattctcatggctacctcctctgacccatccacatccttgcggctggcaggcaggatgttttgaaatggtgcagccaaaggccccgtctagcttggctggctcccgaacatgtccatatttgaaggctgcctcaggcctggcaggcagaagcagctgtggtccctggaggcaaaaggcagctcacggggccttccatttccagccaggcctcatctggggtagggccaagaggaaagtacagagtgcccgtgggggagaagtcccaccaggatgccccccctcccctgagaagcccgccttcttccctcgtggacaggagtcagccagttggttgctgtggttacagccagtgcctgaattcctccttagggccctgggaagagtattgcttaacgcaggatgtgctgggtgttttgtttcgggcttttatttatggcttggtgtctttcttgtttcatggctgtgtttttgcttttgtttctgtaggagcgcctcttccaagcagtggaggcctgagggcttgagggaggctggggaaaaccagcagggagcacttggctcctggcagagggagaggacaggaggaggagccttccccaggaggaacgaggagaggtggccacgtggcaggccacagtgccctatgggcttttctgtttgaaccccatgtgggatgaatctcaaagccaccagcgttcttgcctagtgtccagagcagcagagatttgcagccctcgcccctccctgagaagaagctggatttgaaaatccctcacaggccctaacatgtttcctgggtgggcaggggcctcatgacaagcgacaagtgtacccagagtagaaggccttccccactcccacctcaaacccaggagcagaactcagtatccagagcttacaaggagctgcaagggtttgccgagggctgcccagctctgcttctggtttcctggacaatttctctgtcagatacggcccattgtaaacccagagggctgcattttgggttgagtaatatggacaccatggaagtacaggatctgagtccaacattgccatgggggagggaagatgtgtcctggcaggaagccaccattggagaaggtgaggccagtaaccatctcatgggattcgctataatcagcctatttgagctgctgggtctctgtcactgtggactccagtcattcaaggaggtctccactcttgggttttttttattttcttttcttttgctattttgcctgaacaccccaacactcttggttttagagtccaagaataagttgtgcagaaacatggttctaatttggagttcaaaggaacaccagctctgaaaacatgaccgtggggccaggatgtttctggcaggcccagaagtgctggccgttcttccccagcctccccactgctccctcctctgttccccatgtggaggtcgggggggctgggactggggagggggcagccacctccatccaaggctcttcctaggggccctgctaatgtggacagcagactttatccctccttcttactctgggccaagacctcccactccgccctctgaggatggtaccaagaatgggcctttgggacttctcaggacattgacaatgtgcacactgcaggttgacttaatttatttattttttgaaaagaagagacagaaaataccttattatctgcagggactcaaagctgtacccaaatcaagaaagacaaaataacaatagaaaccattcacacactccgttcatgcatggacaccagaagacgattcagaacacaagaggagaatgagctggagcgccagcaccacgatggccccaggacgttgtttaagatctgagatcccttggtttctctcttgttgatctgagatgctacatcagggcccttgctgctgtattacctctgcccgggtgtttgagacaggtcacaagcgcgtggatgtttcctggaagtgtattcccctggggctcagcgatgctctgggaacccttggggtttggggaaggacagtgtggtgtgactattggcttgaaacgttatggatatggttggagtcacccatgtggatatgattttcagcttggagctgggatggagaagatggaagcactggtggccgggcctctttttccagcgaggccagccctggcttctcctctgttccagcttgtctgccagaagccttcccctgcaaggtgcccacctgcccggagacagagggagcagctgaggcctctctccactggccgccagcctccctagcacaaggggaccattcagcaatgagtgtttactcatgttctttcttgttgatgagttctgcggcccagcatatagaaatggctcagaacgttccaggccttggtgagacacagcagcgtccaatgctcacaggctgtccccactctgcctgttcccatcttcccctcgggacctgtttataaattgaggaatggatgagggccctggagggtccttgggagtagttagtggagggcaggattctcaggtccccatagagagggaaagagaagaccagatgtgcatagaagccaatctctgtcacatacaccgcaggtggtcaccgagttattttccaaaagctgaggaacataaagcaaatttaggcttttgtccttctgcaatacatgcacttgaaaataaacagaaaagagatgtttaataacaagtttacttccggtctgctagcaccctcagcctgggagctactgccagaggctggcgtagtggggcagctgctgaccaaaccccacagaacagagggcaccaggcatcacacgacatctttccctcccatctctgccatctgtctgtctggcaatggaaggagcttcagcaggagatccttcccagaaggttgattcttggcctgggtggtagaggagatatcctgaccctaaagtcttccagccccgggtcatcctctcctatactagggcctattgaccgtagaggccaggtgcggtggctcatacctgtaatcccagcatttggggaggccaaggtgggaggattgcttgagcccaagagttggagaccagcctgggcaacatggtgagaccaattgactgtagggcttgtcccttgctaagacaggagcagaagactggatggctgtgtcctcaaggcagtcccctcccatccccattcccaaagtcagaaagcgaagccagatctcaagggctgatacctgaggcaaggagagctaaggggagagaaattggggctgagtggaagcagatgcctgcacaagccaagtgtgtcttattgatctgtacaagctgatagaaggaccatctgctgaaatccagggctcctgagttggtgggtttgcttgtgaagcttctaggacaaggcgcagccagatggaagggagagggtccagggcttcctaaatgcagccgcatcacctgtcaactcgctgcagtttcagagacagtggaagctgctctttacctcaaaagcacaaagcagaattggcaacttcacatgtctcgagagctccaagatcctttggtctcgtgtccttcggcaccccgtaactggactggggacaaatttgttacgtgtttccaaggctacagacatggtgccatcctcacaggcctagctcatgtcatggatcaggtgctttgctggggggatacaatgacccatgtggtctgcgtcttctgccattggcttgaactgggcaccccctgaagtctccatctcagctgtatattctagtccaaattttcctggctcccctgctccctcccaggtcctgcacactgtctttttgccaacacctcagccctgtttgctatttcatgtctgcatggtacgagacaccccttcacagcatacactgccatggtatgtacatatgcatccacgtgtgtgtatgtgtagcatgtagctcattctgctcagcctctggcgccgttccacattgctcccagccccattgctgtcactgtcgtcccagatgtccttgccatggccacagacaatctgccgtctcctggaaacgctggggctgcccttcagagagctggcagccccagcagtcagggcctgctttgcagaatagaatgtgaacccaactcctgatggcctacttgacttatttaattaaagatgaaatcatgcaatgagc

SEQ ID NO: 62247 - DNA, 1955 bp, Homo Sapiens
gggagggcgccgcgcggaggcgggcgtgtctcctgtcaaaagccatgctcggcaggtctgggtaccgggcgctgcccctgggtgattttgaccgcttccagcagtcgagcttcggctttctgggctcgcagaagggctgcttgtccccggagcggggcggcgtggggacaggggccgatgtaccccagagctggccctcctgcctctgtcatggcctcatcagtttcctggggttcttgctgctgttggtcaccttccccatttctggctggtttgccctgaagattgtgcccacctacgagcggatgattgtgttccgcctgggccggatccgcaccccccagggacctggcatggttctgctcttgcccttcattgactcctttcagagggtggatctgaggacacgagccttcaacgtccctccctgcaagctggcctctaaggacggggctgtgctgtccgtgggagccgatgtccagtttcgcatctgggacccggtgctgtcggtgatgactgtgaaagacctgaacacagccacacgcatgacagcccagaacgccatgaccaaggccctgctcaagaggccgctgcgggagatccagatggagaagctcaagatcagcgaccagcttctgctggagatcaacgatgtgaccagggcctgggggctggaggtagaccgcgtggagctggcagtggaggccgtgctccagccgccccaggacagccagctggcccaacctggacagcaccctccagcagctggccctgcacttcctgggaggaagcatgaactcaatggcaggaggtgcccgtcccgggcagacaccgtggagatggtgagtgaagttgagccacctgcccctcaagttggtgccaggtccagtccgaagcagcctctggcaggggctactgactgctctacagccttcctgtctgaggccctggtcagccaagtcggggcctgctaccagttcaatgtcgtcctgcccagcggcacccaaagcgcctacttcctggacctcactacaggacgaggaagagtgggacacggggtgcctgatggcatccctgatgtggtggtggagatggccgaggcagacctgcgggccctgctatgcagagagctgcggcgcctgggggcctacatgagtggacggctgaaggtgaagggcgacctggctatggccatgaagctggaggctgtcctcagggccttgaagtagcagccttggctgactttccagagcccagtcccaagcctggcaccaagcctgaggggcctcttggaggaggaggtgttcatctgcaccacagagagttgaggccctaacaaatttcaggcccagccaagagcccatgaatggaggctgcaggaggctgagtccggctgccatgcacgtctcccctacagtggttctctggacaaggctttgtccatcccggtccccagctgagtgcccagcgctgagctgggtgcacggtgtgattccaggaggagagccaggcctgccctgccctgctggcttcctgactggagagacaggacccacagaaacagcctgacagcagctggtttggtccttgtgtgagggaccaagcatgtggcccaggctctaagctctgcggggattggagagggatggggagggaagggaaggcagctccaagaagaggtccctgtggcgaagttacctggggatcctggctggccaccttcctggctgcagtccaggcccgtgctggcgggattgggcatgggaaggagcagggcctgctgcttccctggcgctgctcccaaagatttctgactcatctgccagctctgtcctgcatgcctggcgagctggggcccagggcagcatgaaggagagccctgcgttctgtgcttcttaccagaggtttgcaagcctcagacaaataaatgtggtgtttacaatgtaaaaaaaaaa

SEQ ID NO: 62248 - DNA, 662 bp, Homo Sapiens
  misc_feature (261)..(261): n is a, c, g, or t
  misc_feature (567)..(567): n is a, c, g, or t
  misc_feature (651)..(651): n is a, c, g, or t
gggaagaagccttggctttattcgctctgtggggacactgttccgttcagaggcccctcccagccatggggtgggggacagtggtgggcgtgggaatcccagcgagcatcctggagggtgcgtcgtctccatgtattttgctcttccccatcttttccatggggtcccctgccagggtcaagcactaatatgtggtgaaggcagcaaacagcgtcggcgtccctttaggggtggggagagggctgtagcaccaagaacccnctcccccgccacgacatccctgaaaaggagactaaaataaagccccggggcctttctacgtaggggctccacttaaatatggaatggtggtaggcagagaggcggtggcccagcaatccttaagtccagattaccagctgtggggaggcttccagggggccaggagcaggcttggcagttccagccacagacacgtgggtgaggacggaaatatctccaagggggcacagtatcagaggagcaggatggaagggcttttctgcctgctacggatccttttaaagaaatggtgtgaagccggccggngctcatgcctgaatcccatcactttggaggccgagcgagcagatcacctgaattgcgagtcgagaccagctgccaacatgtganacccgctctct

SEQ ID NO: 62249 - DNA, 443 bp, Homo Sapiens
gttaaatgtgagatacttgttaaaaaatgtttagcaatgaattgaggcctagtagcatgttatcttgctgcagaagagatgggagtctacttctgggggatggtcaggggtcctccatacaggctgcaattgaagtcatcggtgcaggctcagtccctacaaaggccagggtatttcctgtccacctttattctgatgcatgactcttctgggtctcaaccagagccagtggacttcagtatgggtcgctttcattggcagaccctcaatccacttgttttccatctaatcccacgcatgtgtgcaaaagctgctgtgcttctttgcatctcagtagttccttctggaattcagcaatgaaactcagggaaatgggttccaaatgcgaggctgactttcgtcctgggtttccttcttctccatcttcacctcatgtctgttta

SEQ ID NO: 62250 - DNA, 891 bp, Homo Sapiens
  misc_feature (657)..(657): n is a, c, g, or t
ttttttgtggagaaatttttattactttgaatgttttagaatgcaggtagaagagacccggagctcaaatagcttaaataagtaggaaatctattggctaatacaactggaaatgcggagatagggcaggctgcagggctggtggctcagggctcagggggccccaactctctgtgctgctctgaggcactgccttcaatctcaggttggcagcacaaagctgctgagagtcccagtgtcacgcccagaccccacaatgccagggaggaagacaggttctatctaaggagagatcttccatccccacctctgcggacttttactcacttctcagggacctgcatgggatctcaggcccattcctgaagcagttgttggcagacagagtggaatagtgtttacagcaggcaggcagccttggagtggaagcacacagctccaagtctatcaggaagaaggggaaatgggagctgcacagacagcaagcagcatgctccatagaccacgaggatctgagtctgaattggtgattattagaacaatgacttccatgggtgatacatttagagtgcttcagggtccagaggattaaatgtaatggaagatgaacagaaaaaatatggaaaaaagtatgctgcacaacaatagaaaaccaanaatctcataatgcaaagcccatcagtgtttgactctgaggaccgcttgaatgccagttacttcgtctcccttagtttttgttggcttctcacctgcattccattttggctgtacctgcctgagctcctgcaggcccccactcagtttttgacagctggcatccaaaaaaaggtcattgctggaagactttcgttcctcccaactttatcaagccagaatttgctggtgtgcttt

SEQ ID NO: 62251 - DNA, 566 bp, Homo Sapiens
  misc_feature (538)..(538): n is a, c, g, or t
ttttttttttgagccaagaagtgcagtaggctgcggggattttatttctgcccccagaccaaggcaacggagccctcacctgcctgccacccccacactgggcccaagcaagctcaggtgagcgcacatacatccaccgtggcgggctcctctcgggtgaagccatcaccgaagccctcatcgtccaccaggtcgggctcacggcagcacatgggacagaggctgttgcgcacagcagaggctcggagccagacgacaaggttccaacgctcaccagtgcccaagggccgggctccatgcagctggccgccacggtggaggacaccctggcccaccacgtgctccacctccaggggctccgtcagggctgtgggtgcctggaagaggcccccaaaatacagggcgccccctgtgaagaccttgcccaaggccacattgagggtgagctcggcattatcatagtggcagcccagctccaggtcctggcccggtgcgtatttgaccacaaagggccggtggctgtcgagccggcccccgncacagtcagggtacagcaaggccatcag

SEQ ID NO: 62252 - DNA, 687 bp, Homo Sapiens
tttatattgaagtctgtgtcttcgcccttttaagtgcatctccttagcattgggatcattaaagctgcactcgcataatttacaatggaaccgaattacttttccttcatcatttcgtacctcttccacataatcatggcccactggctgcacatcactctgtaaagcagcaagagatgcaggtgtgactggttctgacactgtgtcttgctttacttcaggaatctgcacagcagaagtgacaggagtacttttaacacattcggttccttttatgtcttctgctttatttcctgttgactgcagcttattaccaccaacaaaatttattttgggggtagatgttttcttggcagccatatttgtaggcactgctgatactttagtgttagatgtgctattaagagacgagtttcctgtagtcgtaagacccttcattgaagacgttgcaattgatgacgtattcacagtacaattgtttgctgcaatgcttgaaggagaggcagtcggctttgaagcagatacagctgttgaagaagtagcttggctaacaacattgggtctgttgatggaatgggtttaccaagttttgtgtgtaacttaaccactttctgatgcttagcacccacgaatgtgggcagcatacgcatctgctcctgtacaagacaacatggagagcttacaacg

SEQ ID NO: 62253 - DNA, 548 bp, Homo Sapiens
  misc_feature (533)..(533): n is a, c, g, or t
tttttaaacacatcaattagagcagttgtttattaaaatacaaacaagggagaaaccacaccatcttttaaaatacaggcgcgaattccacatcacgcagaagacaacgcatttcgctaagggccacagcattcactggttaataaagccacagctacaaagtaatgagatgtcccacatgaatactttttaaccacttacattcacgtcaacatataaataatggaattaagtaaaaacttcattataatgctattttgttagaaaagtatttgtaaagtggcatttttcccccaagagctgtttcacttaagctttatttcctcggcctggcaaggggagggcttttcagtattgttatttggtacacacttacctgaagaaataagtaagtaacttaaacataaaaaacatagtcgacacacatcttgccctgcattctgacatttgctggaatggtctacagcaggctacaatgctcccttctgaatggcaaatgtctgaaaatgtcaaagtttattaactgttcacanaggcaggcatttgac

SEQ ID NO: 62254 - DNA, 596 bp, Homo Sapiens
agggttagaaactaacttcattctttttagaattcaacagttttcctaggtcaccaattccaccttttgttcttattaaggcgcaaagtcacaggacccccttcctgggagtcactgtcattaaatctattgccgtcagctcagcccagggtaggcaaggttcaagaatgggaagtgcttttgtctggggaaacacgcaggtaatgtgatgctaggaaggaggatgtgcaggtgggtgagagcccaggagggagcagctggtgcctgacagggtgagccatcagggctgggcctgggtacagccccaggagaaggagcctgtgcagaagtagcagttcagtggattccacctcctatgtcacaatccagcaggtggccaggactcagcctgggttttaagtgagtaatgccttccctgtctcagagattagctctaacagtgtcactagaggaagccctggcgagggtgggggggcgtagtgtggggacaaggaggccagatagaaagtgctggaatgttctggaacagatctgtttctggaggagaggctgagtatggagagtcaacagaatgtgaccaccttcagagggaggag

SEQ ID NO: 62255 - DNA, 876 bp, Homo Sapiens
  misc_feature (195)..(195): n is a, c, g, or t
  misc_feature (458)..(458): n is a, c, g, or t
  misc_feature (537)..(538): n is a, c, g, or t
  misc_feature (564)..(564): n is a, c, g, or t
  misc_feature (605)..(605): n is a, c, g, or t
  misc_feature (643)..(643): n is a, c, g, or t
  misc_feature (651)..(651): n is a, c, g, or t
  misc_feature (658)..(658): n is a, c, g, or t
  misc_feature (686)..(686): n is a, c, g, or t
  misc_feature (697)..(697): n is a, c, g, or t
  misc_feature (711)..(711): n is a, c, g, or t
  misc_feature (723)..(723): n is a, c, g, or t
  misc_feature (728)..(728): n is a, c, g, or t
  misc_feature (738)..(738): n is a, c, g, or t
  misc_feature (748)..(748): n is a, c, g, or t
  misc_feature (752)..(752): n is a, c, g, or t
  misc_feature (760)..(760): n is a, c, g, or t
  misc_feature (775)..(775): n is a, c, g, or t
  misc_feature (777)..(777): n is a, c, g, or t
  misc_feature (782)..(783): n is a, c, g, or t
  misc_feature (788)..(788): n is a, c, g, or t
  misc_feature (805)..(805): n is a, c, g, or t
  misc_feature (807)..(807): n is a, c, g, or t
  misc_feature (809)..(809): n is a, c, g, or t
  misc_feature (818)..(818): n is a, c, g, or t
  misc_feature (828)..(828): n is a, c, g, or t
  misc_feature (838)..(838): n is a, c, g, or t
  misc_feature (861)..(861): n is a, c, g, or t
  misc_feature (868)..(868): n is a, c, g, or t
  misc_feature (870)..(871): n is a, c, g, or t
gaattcggcacgagcagagctgaggtgtttgggccagttctggtccctttttgcccttcttggccttactctgttgttcaaagccactttggattgcttggatgcttcgaacagccatgaaaagtagcctgcctgtggcatttagaggccaagcaattgacagaaagggtttcttctacctctgttatctaagcngagggaagtaaacctctcaccgccccccacccctcactgcccccgattaccctagaattgctttcgccaaattgtagttgaagctaaggaaggggaatctggcccctgctgggagagggaactggaatgccacacaaggcaaggcctgcttccttccttcccctctgctgctgctgcctcggaacgctgcagcccaggcttcctcccacagtggcccttggaagcaggccgcagagtagacagctgctccttttggaagagtnagtcccctgtgttttctgaactgtttttcctaagcatgtatgtggggaaaagttttcatggcatctccaaggaaaaaannaaggctggaaaataggtttttttttnaaaattcccccaattttaaaaactttttaattaaaaaaggnaaaattttaaatggccgaaaaatgcaaaacttgggggngggggaanaaagatncccaccaaaaagggtggcaacttcaaancttgcaggggnttccaaaccagccnggggaaaggggnccccnaaattcccanaagggggggngggnaaaaaaancggcccccacttccnanaaagnnggggncaagggaaagggaactnantnccaaaagtnggggggaagnaaggcctaantccaaaagggggggcccggaaangggggcnannaataa

SEQ ID NO: 62256 - DNA, 3015 bp, Homo Sapiens
gggagcaaattcattcccttgctgggttgctgggctctggcactgcgctggccctcgttggaggtctgcagaagtgcacagaaagtgtgggcaatggactggccatttccacagttttggaaacttttaaaaatccatattcttgctgggattacagatgtgagccatcgtgcccagcccacccactttgttaatcatgatcagagcaggggtgccattctaccaccttggcacacctgcctagaggagtgagtggcgctgggagcagactgaggaacatcttagctgagcagtgaatccagcactgttctaaggaagctcagatggtctgtgactcatccctgtcctctggactgaatctgaggccttggaactcacccagggtcttagtggaggcacagctctgagctatgggtgaagagcatctgaacccatctacacattgaccaaacacaggcaggttccagtctgcgggggagatggagaaggtgccaccatgctgctgcacaaatcccaggatagctggggaatgagaatccagcactttgggcctaggacctggaaggagaggtcttttgggagaggtatggggacatctgaaggaggacttcttggaaggggaggggctggagcagaggcaagagtgattttgtcagatggagagaaggttctccacatgggcggggctggcagaggcagatgcccagacaggtcacaactctctaggtgcccaattacctgccctcggtgagctcagccatcggcggggaggtgccccagcgctacgtgtggcgtttctgcatcggcctgcactcggcgcctcgcttcttggtggccttcgcctactggaaccactacctcagctgcacctccccgtgttcctgctatcgcccgctctgccgcctcaacttcggcctcaatgtcgtggagaacctcgcgttgctagtgctcacttatgtctcctcctccgaggacttcagtgggtgcctggatgagggaggagtggggaagtgttccctgaggggacgggcctgcccctaccacattcggaccttcctacttcgtggtgtgggcactccctgcaatgtggctcccaatcctctttccctccagccatccacgaaaatgctttcattgtgttcattgcctcatccctcgggcacatgctcctcacctgcattctctggcggttgaccaagaagcacacagtaagtcaggaggtacggtctatccctagcgggggctccaaggcagcccagaagaaaatcaaggacatctgtcctcaggattcgggtaatggtgaggtgggaactgagttctaatgggaaccctggcagaggggtgctggggttggggctggggcttgggaacaaactgagggtggttggtcagaatctaggactatagcactgtgtttgggtagtgtgggagactggagaatagaagagatggaggctgcaaatggggatagaatgaggagtcgcatctaggcggcagtgagttaggaacagtgtcagaggactggtctgtcataattccagcgccccacccatgtacatgggtttcttttcccccacagtatttggaggtggggttggtgggtgactccatgtaactttcatactccatccccctgaagtggaagcggcaggaataccactgctcctcggcccatcactcccccagaggcagggacgtgaacacatagtcgtcattcttgctgcccctgcctgtgctcccttccatgaccgctagtgggagccaagggagataaggcccagcccttaggagttagggctgagaggggagcccacgctctcatacccagcaagctgcagagtgatcagacagcccattccctaggatcgcaagtcctacagctggaaacagcggctcttcatcatcaacttcatctccttcttctcggcgctggctgtctactttcggcacaacatgtattgtgaggctggagtgtacaccatctttgccatcctggagtacactgttgtcttaaccaacatggcgttccacatgacggcctggtgggacttcgggaacaaggagctgctcataacctctcagcctgaggaaaagcgattctgaacccttcagtcctgcttgggaggacgcagcccactgcccagaaacaagaaacacgataccattctggccttccccaccccacatcctctcttggccttactgaagatgggggaagggtaagaaggaagggtgtaggccaaggctcaccccagtgctgctggcttctcctctccacccctcatatgggcgtggggtcctcaaacatcacctttacctgagaggccccaagaagctgagctggcagagagctctaccatttggtgctaaaaaaaaaaaaacgtcctgaggttcatgaccaccatccagtttctggcctttacacagtcacctttcactgaggtcaggagcccctgagcagtggctgctccctgacaaccacagccatttctctgcgcgggggtcattcataggactaatgtatttcatgatctactgtgcacatccaggcctgtggccacagtcccctgctaaagttgctcaggtgttctagtcctgacttcacctttttgatttggtgtgtgccctagggtatgtacccttccccatctgagcctcggtgtgtccatgtgtctggtgggggatgggtggactgtatgatttccaaggactctaccagtcagtggttctgatgtcatcgggtggaggtggtgttctatacctaaaggatgacctgctccagaaacagcaccagcacagcatgtattttcttctcttctgaaagttctggcttgtagacccctcccctcctttgcaaaggtatgggatagaggggtcagatgcagatctctactgtaaaatgggctccctggtatctcctgtcttccctactgctccaaaccctaaattttggttgtacattttatttgaaaggaaaataaattttttttttgggccaaaaaaaaaaaaaaaaaa

SEQ ID NO: 62257 - DNA, 494 bp, Homo Sapiens
  misc_feature (263)..(263): n is a, c, g, or t
  misc_feature (474)..(474): n is a, c, g, or t
agcggccgcccccgagcggacgtcctgtttcaagagcctcagccaccctttcgcgtgatcctttttgagaaggaggatgagggaaagcgcagcggcaaagagtaggcaggccagccacacgagggcccagcgcttgtggatgtatttgtccatggggcaggcccatagcgctcccaagtcatcgtcccatagctgcagacactggcctgactgcaggtcttgtagtaagtactctccaaggcgagctgccctcgtggaggctntgctgggtagtgaagtacagccactgggttccaaggcacagagggatctgttgtcctgggggcctcgtgtctccaacagtagcacatcgtctttgagaggccccagggagtcagcccacaagcactcctgcagctgcagcttctccgagctgttcacctgaacacagaggttagggtggcctttcagcaatgggaactcgagaaccttgtncacagtgacattctcccagg

SEQ ID NO: 62258 - DNA, 537 bp, Homo Sapiens
  misc_feature (528)..(528): n is a, c, g, or t
aggtgcacaaaacaaagggtttattgtagggcgagaagtaccgcgtggataataaggtcgtctgggaaggagtgacgtcggagtagagctgaaaggagagggagcgagtgggggagtgcctagcacgttgaagagccgcaaagaggaaggagggcgcagggacagaggccgatgagaaaggcaggaccaccgcgcagcacactaaggacttgcgtttactccgagtgagatgcggtgctgagcatcggctgtgtagactgaggcgcgccggccgttgcccctcaagtccccgagccagcgctcagcccggctgccccgcagctcccacggccacacgattccccatcccgcgcgcccactcgcctcgtgcgggccgtagaccacagccagtgccttggtgttgccctgctcaatgtaggccgagccgtcagcctgcgcgaacacgcccatccgcgcctggatcttgcgcagcttccccggcgcgccgccgtccacccggtagccctggtccgacaagagctccagccncgccatgct

SEQ ID NO: 62259 - DNA, 79528 bp, Homo Sapiens
ctccaggagctcagctccctgaaaggaaaatgatgccaagccaggcgcagtggctcacacctttaatcttagcaatttgggaggctgaggcaggtggatcacttgaggtcagaagttcaagaccagcctggccaatatggtgaaaccccatctctactaaaaatacaaaacttaggccgggcacagtggctcacacctgtaatcccagcactttgggaggccgacgtgggcggatcacctgaggtcgggagttcaagaccagcctgaccaacatggtgaaaccccatctctactaaaaatacaaaaattagccaggcgtggtggtgcatgcctgtaatcccagctacttgggaggctgaggcaggagaatcgcttgaacctgggaggcagaggttgcagtgagccgcgatcgagattgcgccattgcactccagcctggatgacagatccagactctatctcaaaaaaaaaaaaaaaaaaaaaaaaagaagaggaaagaaagaaaaaggaaatgacgccagagtgggcaggtccaacaggactttcagcccaaaccacacatggcacctgtgtccctcaccaatgcctggcctctggcactgagcttgggtcacctgtccacatctacttcccatggagtgagttatttcctttgaggcatgagtgtcctctctgccagctggacaggactgtcctgatgggtcagatagcagctaatcctatcaggagagaggaactggggcccaatctcatttctcttggcggtccccagactagccacaaatttgcccacctcctgccaggttaagagaaaggcagttttgagagttgattaagagcatggagtttcctgtaatcccagaactttgggaggccaagctgggaggaccacttgaggccaggagttcaagaccagcctgggcaatatagtgaggccccatctctacagaaattttaaaaattagctgaacgtggtgatgcgcacctgtggtcccagctacttgggaggctgaagcaggaggatcacttgagcccaggagttcaaggttgcagtgagccatgatttgtgtttcagccttagtgacagagtgacaccctgtgtcacaaacaaataaacaacaacaacaacaaaaggccaggcttggtggttcacacttgtaatctcagcactttgggagatagaggcgggtggatcacctgaggtgaggagttcggaaccagcctggccaatatggtgaaaccccgtctctactaaaaatacaaaaattagctgggcgtggtggtgggtgcctgtaatcccagctacttgggaggctgagacaggaggatcacttgaacgtgggaagtggaggttgcagtgggctgagactgcaccattgtactccagcctgggcaacaagagcgaaactccgtctccaaaaaaaaaaaaacaaaacaaaaaaaagagcatggaattggactgctttaggtaagttccttccccacctgtcaaatgaagtgataacaacagcaaaagaccgaatgttaatacctacggatagatcacttagcacagtgtgggcagatagtaactgctcaataaatgggaactactgttacatacctgtatgtagttctctaatatccctattttataaaaatgaggtccccccatatttttcttagcttccttttgtcaattaatatatcatagacatttttccaggtctgcacatgtagcctcctctatgtgagagccgcatggccttccaaaggacgccgtccatgcaagaggctaaactatgtctgtgggttcaaaaccctcagtctgtgccatggtgctttaaaacttggaaatggctcatacctgtaatcccaacactttgggaggccaaggtgggaggatcgcttgagcccaagagtttgagacaaacctgggcaacatgtgaaacactgtctctacagaaaataccaaaattagtatttttggtgtggtggcatgtgcctgtagtcccagctatttgggaggctgaggtaagaggatcgattgagccctggagttcaaagctgcaatagccataattgcactccagcctgggctacagagaagacctgtcttaagaaacacaaacaggctgggcgcggtggctcacgcctgtaatcccagcactttgggaggcccaggcgaggggatcacgaggtcagtagatcgagaccatcttgcactccagcctgggagacagcgagactccatctcagaaaaaaaaaaaaaaagaaaaagaaacacaaacaaaaacaaacttggaaattagttaaggtttagttcagttagatcagttaaagtttaactgttaaactgtcacctgcatttttatttctttgtctggaaatgtgtgtttgtctttctgttcatttgacttctaacccacatgggatgggttttcctaacttgggagaagcaggtgagaggtcagcctccacagggtgaggctgtcaaggaggaggggggaaccaggacagccagtggccagggcaggacaaaagaaggccggccatctttgttttgttttgttttgttttgttttgttttgttttgttttgttacgaggcagagtcttgctgtgcctcacccaggctggagtgcaataatgagatcacagctcattgcagcctccatctcccgggttcaagtgattctcctatctcagtttcccgagtagctggggctacaggcgtgcgtgtgccatcacacctggctaattttgtatttttaaaaattattttattttattttattttattttattttgaaacggagtctcgctctgtcacccagtctggagttcagtggcacgatctcggctcagtgcaagctccgcctcccgggttcatgccattctcctgcctcagcctcctgagtagctgggactataaccgcctgccacgacgcccagctaattgttttgtatttttagtagagacggggtttcaccttgttagccaggatggtctcgatctactgacctcgtgatccacccgtcttagcctcccaaagtgctgggattacaggcgtgagccaccgcgcccggcctattttgtatatttttagtagagatggggtttcaccatgtctgctgggctggtctcgaactcctgacctcaggtgatcgtctaccttggtctcccaaagtgctgggattacaggcgtgagccactgtgcccgcctttttttttttcttctttttgttgttgttggttttatttatttatttggacagagtctcactctgttgtctgggctggagtgcagtggtgcaatctcagctcactgtaacctctgcctcccaggttcaaacgattctcctgcctcagcttccagggtagctgggattacaggcgcccaccaccacacccagcttatttttgtgtttttggtagagacagggtttcaccatattgaccaagctggtctcaaactcctgatctcaagtgatctgcccacctcggcctcccaaagtgctgggattacaggcgtgagccaccgtgccgggccatgcgccatctttgtttctgttccagatgcctgggagtccttccatctcttccctcaccccccacagccaaccctttagcaaggacttttcctcaatatttctcatatctgcctcttccttccacccccacggccaccactttaattcagaacttggatcactgagatggcccctaatggtttcactgccttcttctgcccttccctagtccattgtccatatggcaacccggggcaggtgcagtttggaaaggaggtggcactacctggtaatgctgaagctgtgtatacttctagctccttcccctttgcaccagggcacttgcagtaggaaagtcacagcgacattgtctgcaaagcaagaaactggaaatgtccaggcacagcagctcacgcctataatcgcagcactctgggaggccaaggtgggtggatcacttgagcccaggagtttgagaccagcctgggcaacatagtgagacgcccatctctataaaaaaagaagaaagtggaaacaactcaaatctccatcaacaacagtggattcttttcctgttgctgctctaaccagttaccccaaactcagcggctgaaacacacacatttattatcttacagagctggaggtcaggagtccaaaatgattttactgaactaaaatcaacaagtcagcaggtatgcatttcttctgcaggctctaagggagaatctggtttttgcctttttttctggctttcagaagctgcctgctttcctgggttcatgggtccttccatcctaacgtcagcagtagtgggcaggcctttctcaggacactgtctctgattctgactcttctgcctccctctctcccatttaaggatccttggccgggcacggtggctcacgcctgtaatcccagcagtttgggaggctgaggcaggcagatcacctgaggtcaggagttcgagaccagcctgaccaacatggagaaaccccgtctcttctaaaaatataaaattagtcagacgtggtggcgcatgcctgtaatcccagctactcgggaggctgaggcaggggaatagcttgaacccaggagatggaggttgcagtgagctgaaattgtgccattgcactccagcctgggcaacaagagcaaaactccgtctcaaaaaaaaaaaaaaaattccttgtgattccactgggcccaccaggataatccaggatcatctcccatctccaggccgggtgattagcaacctttgttctcccttgccgttaaaggaacatttttgaaagtttcagagattaggatgtggtcatatttacaggccatttttctgcctccccacacagttacccacacagttacccatcgcataatagggctggggctgggggatgtgagcagaatccctccatacccaacatataaccacgcgaggcccccagctgagggcccggtgtgttgggcagagagctgaaggcaggggaacactgtccagtcgctgcacagcagtgtgaggaaaggaagaggagtcgtctgtaaaaacccattgactgtgctcatttcacactgcgtgcctctatcaaaacatctctagccaggcgcggtggctcatgcctgtaatcccagcattttgcaagggtgaggcaagcagaccacctgaggtcaggagttcgagaccagtctggccaacatggcaaaaccccgtctctactaaaaatcctaaaattagccagggcctggtggcgcgtgcctgtaatcccagctgctcaggaggctgaggcaggagaatcgcttgacccgggaggcagaggttgcagtgagccgagatcatgccactgccctctagcctgggcaacagagcaagactccatctcaaaaacaaaacaaaacaaaacaaaatctcatgtatcccatacatatatacatctattatatacccacaaaaattaaaattaaaaaaaagaaaaaaacaaaaaatccccattgactgtactctctgttatattcctggggccctcaaatgttgattacttttcagttttgagaatctaagtgacacctagcctggacaggaggaggggagagcccctgtttctggcaggtttctaagaggaatcacaggactgggctgagaggaggggacccagcacccaggctagagcagccacccctccatccctgagtgaggggccatctgctgccccccgcctctccctcgcccccacccccgcctctatctcaagccttgctcctttcccctcgggtgcctccacctgccgtttgccccgtcctcacagagtgtgaatcttgactcaaagtgtggacgtcaaagccccttggaagtgggaaaggcccaggcgggtgcagattgtttatttgcttgctgggtgctgggtgtgaaaggaacagacacgtgcttgcctcgtggggctcagtctctagtggggaagatgggcactgctgtcattgtaaagtgtgattttgtgaaaagtgctaagaaggaaaggacaggggctatgagagggggttgtggagtcctaattaggaaggaggagttgaactggtgagattgagggaaagcaaaaagcgaaagcaggtaagctctaagtgtgcctttcttcatgctccagaacacatgccctcctgcacaaataattcacaatcttcctgcaaccagccatcaccagacgctcagctgacagaaaattgcaaattagctcactgcaacctcggcactatcagtactgcgtaaagccctctccagcatacagcacgagcaccatcctgtcccgtccctagcaagcctctgtctccttgcagacagccccttctctgctgtgctgcctgttgcaaatttgcaacgcattttctttttctttttttctttctttttttgttttttgagacggagtctcgctctgtcgcccaggctggagtgcagtggcgcgatctcgcctcactgcaagctccgcctcccgggttcacgccattctcttgcctcagcctcccaagtagctgggactacaggtacgtgccaccactcccggctaatttttttgtatttttaatagagatggggtttcactgtgttagccaggatggtcttgatctcctgacctcgtgatccacctgcctcagcctcccaaagtgctgggattacaggcgtgagccaccgtacccggccttttctattttttttttttttttgagacaagttttcaccgtgtcacccaggctggagtgcaatggcgcaatcttgactcactgcaatctctgcctcccagactcaagggattctcctgcctcagcctcccaagtaaatgggactacaagcatgtgccaccacgcccggctaatttctgtatttttagtagagatggagtttgccatgttggccaggctggtgttgaactcctgacctcaggtgatctgtacgcctcagcctcccaaagtgctgggattacaggcgtgagccatcactcccggctgcaacatattttcataccttctctaataaatgtgcctttctttacctataactgtcttggtaaattcttcttactcctgggctactggcctcagatagttgccgctcacctgagacaggggtgacaagacggcttattcatagaaagcataatgaccaaattagaagaactgggatatccatcaccttaaacatttatcttttctttatgctgggagcatgcaaattattctcctgtagctatttttgaagtatacagtgggttatggttaactgcagtcaccctactgatctatggaacactatgtcttatttcttctagctaactgtatattgtacccattgatcagcttctcttcttcctcccctccttgctatccttcctggcctctggtaaccaccaatttactctccatctttgtgagatccacttttttttttttttttgagtcggggttttttagtagagacggggtttcaccatgtgagccaggatggtctccatctcctgaccgcgtgatccgcccatctcggcctcccaaagtgttgggattacaggcgtaagccaccacgcccagcctttttttttttttttttttgagacggaattttactcgttacccaggctggagtgcaatggcacgatctcagctcaccacaacctccgcctcccgggttcaagcaattctcctgcctcagcctcccaagtagctgggattacaggcatgcgccaccacgcccagctaattttgtatttttagtagagacggggtttctccatgttggtcagactggtctcgaactcccgacctcaggtgatcctcccgcctcggcctcccaaagtgttgggattagaggtgtgagccactgcgccaggccgagatcccccttttttttttttttttttttgagatgaagtctcgctctgttgcccaggctggagagtgcaatggcgcaatctgggctcaccgcaacctccacctcctgggttcaagtgattcttctgcctcagcctcctgagtaactggaattacaggcgcctggcaccacgcccggctaatttttgtatttttaggagagatggggtttcaccacggtgaccaggctggcaaagatccacttttttagtgttcatgtatgagtgaaaacatgcaatatttgtctttctctgcctggcttatttcagttaatatgatgaccttcagttccatctgtgttgttgcaaatgacaggatttccttcttattggtggctgaataatattccctttgtttatataccacattttcttcatccattcatccattgatgtgcgcttgggttgactccatattttggctattgtgaatggtgctgcaattaccatgggagtgcagatatctcttcaatatgctgatctccttccttttggatatataccgagtagtgggattcatctgaaccattttttttttagactagtcaagttcagtagtgagaagggagcaaaaagtagaacaaggggccaggcgtggtggctcatgcctgtaatcccagcactttgggaggctgaggtgggtggatcacttgaggtcaggagtttgagaccagcctggccaacatagtgaaaccccgttccactaaaaatacaaaaattagctgggcgtggtggtgggagcctctaatcccagctactcgggaggctgaggcatgagaattgcctgaacccaggaggcagaggttgcagtgaaccgagatcgcggcactgcactccagcctgggtgacagagtgagactccatctcaaaaaaaaaaaaaaaagttagccgggcgtggtggcgcacacctgtaaccccagctactcaggaggctgaggcaggagaaccgcttgaatccaggaggcggagattgcagcaaactgagatcacggcactgcactccagcctgggcaacagagtgagactccgtctcaaaaaacaacaacgaacaacaaaaaatacaattgcaaaccaccaccatttgacactgcctatatccacccccaaccctgctccagttgtttctttgcaattgccactttccagcatactatataatttacttttttttttttttttgagatggagttttgttcttgtcgcccaggctggagtgcaatggcgtggtctcagctcattgcaacctccgcctccctagttcaaacgattctcctgcctcattctcccaagtagctaggattacaggggccccccaccacgcccggctaatttttgtattttcagtaaagacagggtttcaccatgttggccaggctggtcgcaaactcctgacctcaggtgatccacccacttcggcctcccaaagtgccgggattacaggcgtgagccaccgcacctggcctaatttacttctttatgtagtctattgtgtatctatcttttccagggaacctcagctccacaagggcagggctctcttgtcactttggtttatggccatatcacagagcccatcccagtgcctggcacatattaaggaatgcattaggattccaaaaccagccaggagcggtggctcatgcctgtaatcccagcactttgggaggccgaggcgagtggatcacgaggataggagttcaagaccagtccggccaagatggtgaaaccccgtctctactaaaaatacaaaaaattagttgggcgtggttgtggacacctgtaatcctatctattcgggaggctgaggcagagaattgcttgaacccgggaggcagaggttgcagtgagccgagatcgcgccactgcactctggcctgggcgacagagcaagacgccatctcaaaaaaaaaaaaaaaaaaaaaaaaagattacaaagcccagaatgccacaagaccacaggtggtgcagtgaacagggcattgccttgagagtctatcatccctgggcaagtcattaaacataggggtgggggtgggagcctcctgtctgtaacgtggaggtgtcacgtgccaagggctcaggcacacgcgcgcgcacgcacaaacacacccattagtaaggacacgacccctggcattctaatgcgatttatacttttccatgaaggaattcatttccccctctcactaaccccagagacaggtagagccgacaggtggaagaactgaggcccgagagagacagcgggggaccctccccgcgccacggcacagcagctgtccgaccccctcctcacgcccggggggcgcgacggctgccgagggtcgcgggcagggggcgcggcgccggggactacatttcccaggagcagttgccgcggttccgccgttcctggggtttcaagagcctcgcgttaaagggggcgggggaggttgcgcagtccgccagctggaagatggctctgcgcccggtggggacccgagagccgcctgcctgggtgcccaggcggggtccggctgcagtgaagaagccccccagctctgcagtgtccctgaggggaggcgaggcgaggcgaggcgaggcgaggccaagccaattggaggccgtctttcctcgtcttgcccgcctcggcttcggcctctgcgcccaagccccagggaaccccctcccttcccctccaactccccggaacaggggaaggggcggtgaacctcgccgcctggcgggagaaggggtgtccactagctggaagcccctgcaacccgaggcaacccctttccccaattctggcttcagttccgggaatttacaggtcgctgggatgggcggggagaagggacaggagagatacaaaatgaaatgaacgcccaggtgtcagggagctgagccttacagtaccccgcccccaatccatccttctaagtcccgggcctccgcggtaaaataggggtgatggggatagtgatcaaaggcaggaggcgcaaaggatccagaaaccggtggggagcactgtgcaaactgtaaagcgctgtgcaaataaaattattgatcgtcgtgtcattggattcatccagtctttaagacatgcacggatctggggcgggggatggggtgacatggttctgggctctcagggtggaacatctcggatacggggagggggggctatttgggtgcgtattaacccaaccaggtcttaatgggaacccgagttgtctttgaaaataaccaaaacaaagccaccagaatgttgtgttttcaaatgacgaaacttaagagaaattgacaccatcaaaagacgaaccttgaccttttgaactaacctgaccccccattgcttcccttccccgcctgtgccacggagataagcccagagagaaggcatctgacaccgagtcttgcgctccccctcccccttcctcccctaatcatttggattaatccatcccttggcgtgcgggggaaacccattaatttgtcctggcttcagagactcccaggtccagtaggagccctcccacacccacgcagctacgatcccgtccccaacatcaaaaccctcgaacccctcccctttacccctccccagtagcccactgtgtctgcaaacagctcttggaccataccgggatgcgttcatcattttgaccagcaacaaactcccactcccagggtattgtttaagtgaacagtgaccggcctctatgcttagggaataaaagcggggttgtgggagaggggcccagggagcaaacgtcgcagaatctcagcccagggccgctgccaagcggacccggcacgtgagtaggaggtcggccgcagacaaggggtcctagggtctctgaggtctctcctgctggcctctgggcccctaaagcccctcgagcttcagaactccctacagacagtggcgccccgtgtccgcctcgtctacacctgccaagcagcacgggaaaatctgtgtgcattttaacaaagacatcgcatcttcccagcaaaatggcggtggtcgcggccacggctctctaaacaactccacactttccgaggacaggtcacaacccaagggacataaccccctcctcgacctctaccctagcgccccgctttcccaagtccccaaagcactcagggcctctcctcattacaggggccccccggaccgtccctggttagagcttctggggcagcttctccattgtggaccgccctcccccgcccccacattgccttcaaggagccttgggacggggactgaacccccaggctgggcctcacggatggggggcagcgagttctgtctctgacaccccaaaacttccaggctaagagaagcacacaaatgaattcccgattagggtatatgggagatgtaggggtctttgaggagaagaggccacccgggaggccctcctcatctctcagagggtccgggcagcactgggggttcggcctcaggagggaacctcaaggcagaggtcggggggcgcgctgggggagagacggcagaggagggggaagggacaaagtttgaaagtacccttccaactctttcagggaaagtttccttgggggccccatggacagagggggtagaggtgtggagggaccggtggcggggtgacccccgagaggtgaccggaccccgggggagcgacccctcccccctgtcccggctcggcccggctgggagtcgcccagctcggggccgcgtgtgttagttggggccgctttccggcagctccaccgggctaggggaccccgcagcgggccgggagcagagcccccggtagcctcaggggagagctttgctacggggggtttcccgcaccgaggctccctagccccgcagagccagccccccgcaaaggggaaatgtgccggcacaccagcggtcctcggcgccgtttggggtgcgtggcgggcgcggggggcggcggccgggccagcgggccgcccggcggggaagcccagggagccaggcagcggcccagggcggcggcggggagcaggaaggcccgggccggggggaaaggtcggatttgctcggcggaagaaacacagatggcggcggcgcagcgccattccgggccgggagcaggcagccagcagccctgtcctcaccgcggtccgcccgccgccgctaaatacccggatgcgccgcccaagcgccagacgcggagctgggaaaagggaggcagaggaggcggaggcagaggcagaggcagaggcagagcccgagcccggtgccgagaccaagcgacagaccggcggggctgggcctcgcaaagccggctcggcgagctctcccgacacccgagccggggaggaaaagcagcgactcctcgctcgcatccccgggagccgcactccagactggcccggtagtcaggggctcaggagcagatcccgaggcaggctttgctcagcctccgacgagggctggccctttggaaggcgccttcaacagccggaccagacaggccaccatgaccgagaattccacgtccgcccctgcggccaagcccaagcgggccaaggcctccaagaagtccacagaccaccccaagtattcagacatgatcgtggctgccatccaggccgagaagaaccgcgctggctcctcgcgccagtccattcagaagtatatcaagagccactacaaggtgggtgagaacgctgactcgcagatcaagttgtccatcaagcgcctggtcaccaccggtgtcctcaagcagaccaaaggggtgggggcctcggggtccttccggctagccaagagcgacgaacccaagaagtcagtggccttcaagaagaccaagaaggaaatcaagaaggtagccacgccaaagaaggcatccaagcccaagaaggctgcctccaaagccccaaccaagaaacccaaagccaccccggtcaagaaggccaagaagaagctggctgccacgcccaagaaagccaaaaaacccaagactgtcaaagccaagccggtcaaggcatccaagcccaaaaaggccaaaccagtgaaacccaaagcaaagtccagtgccaagagggccggcaagaagaagtgacaatgaagtcttttcttgcggacactccctcctgtctcctattttctgtaaataattttctccttttttctctcttgatgctcaccaccaccttttgcccccttctgttctgactttataagagacaggatttggattcttcagaaattacagaataattcatttttccttaaccagttgtgcaaggacagcaacaaccaatctaatgatgagaatgtacttatattttgttttgctattaacctacttacggggttagggatttgcggggggggcttgtgtgttttgttggcttgtttgccatgaaggtagatgtgggtggggagaagacacaaggcagtttgttctggctagatgagagggaacccaggaattgtgaggttagcaggaatatctttagggtgagtgagttttctttgagttgggcacccgttgtgagagtttcagaacctttggccagcaggagagaggtggtagggagcagccagccggcaaaggaaggagggggaaaaaaaccgccaccgggctgacttccacctcccagtggtgagcagtgggggcccaaacccagtttccttctcatttttgttagtttgcgctttcggcctccctattttcttagggaaggggagtggggtccaagtgacagctggatgggagaagccatagtttctcccagtcagctaggatgtagccattgggggatctttgtggcttcagcaaattctcttgttaaaccggagtgaaaacttcaggggaagggtggggagtcagccaagtgcctcagtgtgccctgttgaaacttaggtttttccacgcaatcgatggattgtgtcctaggaagacttttcttttcctctggatttttgttcctcctgtacaagaggtgtctttgcttggtttggtggggctgcggccacttaaaacctcccgatctctttttgagtcctttattataagtagttgtagctgcgggagggggagggggagtgggcgggcagtggatagtaagacttactgcagtcgatttgggatttgctaagtagttttacagagctagatctgtgtgcatgtgtgtgtttgtgtatatatacatatctagggctagtacttagtttcacacccgggagctgggagaaaaaacctgtacagttgtctttctcttatttttaataaaatagaaaaatcgcgcacttgcgcgtcccccccccacccccttttttaaacaagtgttacttgtgccgggaaaattttgctgtctttgtaattttaaaactttaaaataaattggaaaagggagaaactgagcggtgtatttttcctcactttgaagactggagaatgaatgcggagcggttaggcgggcaggcagtggggacatctggggcgtttgcacctgagaatggcgggggagggttcaggagctggacagaagccaggaatccttagtcccggaggctgcggaacgtgccttagccggcttctaggcttctgcctttggggtccagagggtaccccatttccggccgagaggtgagtacgtgggaatgcggtggggagtctggtgggcttggccctgacgcgacttcctccgcccccttccctcccctctgccatccggacttcggcagtctcaacttacaagtcaagcctctcggtccctggcggatcccgccaggccccgcccacccgtcctaggcccgcctccccgcctttttaagcgagcccccctagctccgattggctgctggagcccggcccccggccacgcgaccaggctgcgtccgcgatgcgcacggctcccaggcaggcaggcgcgctcgggcgaggtaggagcgatgtggcctgggaacgcctggcgcgccgcactcttctgggtgccccgcggccgccgcgcacagtcagcgctggcccagctgcgtggcattctggagggggagctggaaggcatccgcggagctggcacttggaagagtgagcgggtcatcacgtcccgtcaggggccgcacatccgcgtggacggcgtctccggaggtaacgctccgttccgggagtcgttccaagacctttcccgagcttgcgctggaatggaggtcctggaggtgggggtgggcggctcctacactcttagctactgttccccttcgcatctctcagggcgactttatggcttcctaatattgactcttgcctggttaaacccttttgacggagggaggcgatttgcccagcaagaaaacccgcatttcttgagcggctcctttgtgaaggtctctaccaattgttgctgcacgtgaactcctgctaacttctagacgcaggaatgactaattccactttacaaacgaagaggctgaaatccacagatgtgaaatggcttgcccaaaagcccccagctagctgcaggcagcgctggaatattggagctggaacattgcctgactggccagagaggacagcttgctgggtaaactcatagcaagcaaggggtcccagggctgccacagaaatcacatgatgagttggccctgccaggtctccctcatttctttctttccttttttttttctgagatggagtctcgtcttgctctgtcgcccaggctggagtgcagtggcgagatctcggttcactgcaacctctgcctcccgggttcaagcgattttcatgcctcagcctcccaagtagctgggactacaggcacgtgccagcacacccggctaatttttgtatttttagtggagactgggtttcaccatgttggccaggctggtctcgaactcctgacctcaagtgatcctcccgcctcagcctcccaaagtgttgggattacaggcgtgagccaccactcccagccctccctcatttcactctaaccagtggttacacctgacttattcgtgtcaggcctcaggtgagtggtaatcatcaacaagctcccaaagctgccttctgcccaggaaataggcatagaacccttggtgctgttgcactcatttgtaaaacagaggtcccaggtaatcccttctctccctcaggggaagcttagagccggtcaaaagatgggaaattaggagacccaagttctcatcctgtttttgcctttcccaggctgtgtgaactttcccctctggctgtttgctcctaaggtcagctgtgttcactctgggctttagaattcggggactggtatctcaggcacctacctttgggggtgtgattctggcagcaaagtaaactgtggagttccaggactgcagcaggcgtctgatccagccctcttctttaaccctcaaggaaaccaaggggtcagataaggagtcagtggtggtcttcaggcacaggagaagcctgtgaggaagggctgagttcctccttgggtagaatgtgattcaaagccagagtttaggctgggcacagtggcttgtgcctgaaatcgtagcactttgggaggccaaggcaggaggattgcttgaggctaggagttcgagaccagcacggacaacataatgagaccccatctctacaaaaaataaaaaaatttaatcgggcatggtggcacgcacctgtagtcccagctactcaggaggttaagtgggaggattgcttgagcctgggaggttggggctacagtgaaccatgattgcaccactgtactccaacctgggcgacagagctagaccctgtctcaaaaaaaaaaaagtttaaacttcttgctcttcaagatgtgtagcactgacgctccttctgtagctgttgaatttggtgcctcctcaatggtgactccaggtctgtttcctttctggaccatttccccagggcctggcactgtcatctttccaggcctgcccttgccccacctgagctgctgtatccatctcctctccttcacctcaggaatccttaacttctgtgccaacaactacctgggcctgagcagccaccctgaggtgatccaggcaggtctgcaggctctggaggagtttggagctggcctcagctctgtccgctttatctgtggaacccaggtacacagtgagtggtggggggttgtggggactgaccccagctgcctgcttcccacagtcagcaaggctggtttagccagctcagctcagccacagccctgggcctactgttggcctcagagctgtgcagcagaaaggctgagtgcaggcctctgttttgctgaaaagctttggccaaggaactttatatatatattttttctttttgagacagagtcttgctctgtcacccaggctggagtgcagtggcacaatcttggctccctgtaaccttcgcctaccagactcaagggattctccatgcctcagcctcctgagtagctgcgattacaggcatgctaccacacccagctaattttttttttttttttttttttgagatggagtctcgctctgtcgctgaggctggagtgcggtggcatgatcttggctactgcaagctgcgcctcccaggttcacgccattctcctgcctcaacctcccgagtagctgggactacaggcgcctaccaccactcccggctaattttttgtatttttagtagagacggggtttcactgtgttagccaggatggtctcgatctcctgacctcgtgatccacccaccttggcctcccaaagtgctgggattacaggcgtgagccaccgcactcggcctaatttttatatgtttagtagagatggggtttcaccatgttggccaggctggtcttgaactcctggcctcaagtgatctcctccaccttggccttccaaagtggaaactgcctttttgagcattcattttcccacctgcaaaacagagtccctcacacctgaccttctataagaaaagaggagtaggcggcaggaactgagactaagggctctggggctgttctgacgggagcacagttgccagtgctgccctttagtgtccctgttcctgtgggcaagtatcttaacttttctctgtctcaattacttcatagggaaaatgaagataatagcacttaataggatcattacaaattaaagacttaatacatgtaatgcttagaataggccgggcgcagtggctcatgcctgtaatcccagcactttgggaggctgatgcaggcggatcacctgaggtcaggagttcaagaccagcctggccaacatggcgaaaccctttctctacaaaaatataaaaattagctggcatgatggtgggtgcctgtaatcgcagccacttgggaggctgaggcaggagaatcgcttgaacctaggaggtggaggttgcagtgagctgagatcacgccactgcactccagcctgagcaacagagtgagactctgtctcaaaaaaaaaaaaaaaaaaaaaaagcatagaacagcctggcacatagtactgctcaatgaatgttggctattatttattttccaaatgttacaaaataaatttatataagtatgaaacttaaatagtacttattatgtgccaggaattcttttaagaaaattacaactattggccaggcgtggtggcttatgcctgtaatccaggcactttgggaggccgaggtgggtggattactgagttcaagaccagcctggccaacatggtgaaaccctgtctgtgctaaaaatacaaaaattagctggccgggctcgcttgaacccatgaggcaggggttgcagtgagccacgacggtgcgaccacactccagcctgggtgacagagggaaactctgtctcaaaaaaaaaaaaaaaagaacattacaagtattaactcattaatcctaagtgatagttgctattcttattcccgctattgagatgaggacactgagatccagagaggttaagtgacttgcccagaggcacacagcctgttgtgggatttgaaccctggctcaagagtccatgctggctgggcatggtagttcacacctgtaatcccaatacttttggagcccaaagcagaaggatcacttgatgcctggagtttgagaccagcctgggcaacatagcaagaccctctctctaaaaaaaaaaaaatgtttttaattagctgggtgtggtggtgcgcacctgtagtcccagctactagggaggggaggctgagttgggaggatcacttgagcccaggagttcaaggctacagtaagctatggtctcactactgcactccagcctgagtgacagagaatccctgtctcatttgccaaaaaaaagaaagagtctgtgctcctgactacttgtgattatcattaactgccctctcagaaaggtgagagtgaaatgaatgtcagaggcagaactcctgactcgcatccagtcacttcccagcaaagccctcacccagacccaacagttttcaaatttacaaattagaggcccaggtgaacccagaattacctctgtgatctttttcttcaccattaggcgaccaaaaaagacactcagtatggtgttaggaagacacatctttcttctccacgagtgcccgtaattccaccattagactgccactgtaaaaccaaagtctgcccagggagggaacctaacaggtccccagttcctcagtgggaactgtctgtcagattcctggcagctctgggatagcccatgtgtggcagaaagtaaggagactgaggctgcaggctttctgggttgggtctctgtggtcctccaagcctctgtcccctcgaacttgtcccacatgaccccacaggcatcaacacgtgtctcactcattttcttcagagcatccacaagaatctagaagcaaaaatagcccgcttccaccagcgggaggatgccatcctctatcccagctgttatgacgccaacgccggcctctttgaggtgtgtggaagctgtcctgcgggtgagggttggtggggcctgttaggctgaggaaggcttgggtgtgggcagtcgggagaacctagcaggattcagtgccatgcctagaggctccagagcccgcttctggaggtcaaggttgggccaggtaggtgctccaggaggaatcctggggcttgcagggagcctgagttccagagcctttgggggataagctacatcagctggaaggctgggggaggcgggggcctggtactcaccaaatatattctcacctcctcttactagagcagggcgctggtccagcccggcactgagacacgggggccccagagagaagcacagaacaccttgcctctctacccagaggagcgccctggctggcagtacagttttttgatttgctggagtcccggtcaagggagaagcccagggtggttaaatgatggctctacgctcactgcctccctccaggccctgctgaccccagaggacgcagtcctgtcggacgagctgaaccatgcctccatcatcgacggcatccggctgtgcaaggcccacaagtaccgctatcgccacctggacatggccgacctagaagccaagctgcaggaggcccaggtggggcgacgcctgggtccaccctcagcctccgcctggggaaggaagtgaggcttagagaggccaactcctcactcacagagatagcctgaaagtttgaaacagcagagatttgtccaagatgtgaacccagatccctcacacccagagcattattcttttttttttttccctgagacagagtttcactctgtcgccaaggctggagtatagtggtgtgatctcggctcactgcaacctccacctcctgggttcaagtgattctcctgcctcagcctcccaagtagctgggattacaggcatccgccaccccacctggctaatttttgtatttttagtaaagacggggtttcatcatgttgtccaggctggtctcgaactcctgacctcagttgatttcacccacctaggcctcccaaagtgctgggattatagacgtgagccactgtgcctggcaccagagcattattccattgtgccatggtgccttgaggtttttccctgtgtatgtgtgacagtctcactctgttgcccaggctgtattgcaatggtgcagtcatagctcactgcagcctcaatcttctggactcgagcgatcctcccacctcagtctcctgagtagctgggactaccggtgcccaccacacccagttttttatttatttgttttttagatggaatttcactctttttgcccaggctggagtgcaatggcgtgatctcagctcactgaaacctctgcctcccaggttcaattgattctcctgcctcagcctctggagtagctgggattacaggcacacaccaccgtgctcagctaattttctatttttagtagagatggggtttagccatgttggccaggctggtttcgaactcctgacctcaggtgatctacctgtctcagcctcccaaagtgttgggattacaggcatgagccaccgcacccagcctgtttgtttgtttttgagacagggtctcactataatgctcaggctagtcttgaactcctgggctcccaaagttacaggcatgagccaccatacccagccagtttttaaaatttttagtagagacagggtctcactatgttgcccaggtgggtctcgaacccgtaagctcccaaagtcctgggattacaggtgtgagccactgtgcccggcctgccttgagtattagcaagcaccttctgtgtggcaggcccttgctaggcataaggatagaatgtacatgttggtgagacctggtcccagcctagcctgccctctgggaccttacacaggagactgagatgtgagcccattctcactgtccagagctcagggtggagatgggtgacgctgagaggcacagatgagggagaggatgttccagcccccaagatggtggtacctctgtgcccacctctgtgctgggcactgggcaggatgagctctcagagctccaagcagcacaagagacgggtggtttggcccaacttgacaccacccaccatctgctcatgtctttcctgcagaagcatcggctgcgcctggtggccactgatggggccttttccatggatggcgacatcgcacccctgcaggagatctgctgcctcgcctctagatatggtgccctggtcttcatggatgaatgccatgccactggcttcctggggcccacaggacggtgggaccatgtggcacctgaggcctggggtggggcttctgagggtggctgggaaacgaggaggccagtccccagcatgatccataatccctgggctctcaggaggccagtgacagcagcggtggcttcccttgcaggggcacagatgagctgctgggtgtgatggaccaggtcaccatcatcaactccaccctggggaaggccctgggtggagcatcaggtacctgcaaggttgtgtccctggggtccccttgtccttttgaagggccctggaggggctcagggaagtggggagggcagcatggactgtactttcaggagggggttgggtaggctctggcccctgaccaacccctccccccacctcttcccttcttctcagggggctacacgacagggcctgggcccctggtgtccctgctgcggcagcgcgcccggccatacctcttctccaacagtctgccacctgctgtcgttggctgcgcctccaaggccctagatctgctgatggggagtaacaccattgtccagtctatggctgccaagacccagaggtgcgactcccagcagggcaggctcgggggcggagagacgtggtgagagccagcctcatgtgtctgcccaggcccacagacagctctgtgcccaccgggtctgcttctgcctgttcccctcccttctctctgtccctgcctctcccctctagcttctgtgtctccttcttatccctcctgtctttccacctcccttgttgttctccctgccccctgcctggctcccctctgcctcttagagcttgtaactgtctttgttgatccttcttgcagacttgggcatagacctcgggcctggtccctgcaaggagcgggtgtgaatgctccacggccccttagctacctgtgacaccttgtgcccacaggttccgtagtaagatggaagctgctggcttcactatctcgggagccagtcaccccatctgccctgtgatgctgggtgatgcccggctggcctctcgcatggcggatgacatgctgaagagaggtaagggtgctgagacaagggaactggtggtgggtcctgagagaagagaaagggaaacccctagactgtgacccagccccgtacccagccacgctgcggcctcttaggccagctgtctgtctaagcttgaacaccccaagccatgaggcagtcccgaatctgagacctggggcagttcccttgccctctgtgttctgcccccaagcctgttggttctggcacgcccttgctttctaccctcccaggcatctttgtcatcgggttcagctaccccgtggtccccaagggcaaggcccggatccgggtacagatctcagcagtgcatagcgaggaagacattgaccgctgcgtggaggccttcgtggaagtggggcgactgcacggggcactgccctgagctctgggtaaggacgagaagagccaaggtccgcctactgccacagggtcaaaggaggttttcgatcagcccagaccagaggctctgagccctgaaccaaagtcccagagctgggctgggacgtgacctgtgctgagggctgtgagaatgtgaaacaacagtgtgaaaattggctgtgacactctggtctgctttattgtctctgggcaggcccagtcctgtggccggttgaagaatcaggcaggagccagggctctgaggggaggcgcctgaggactgcagatctccactgacctctttccctagattaagatgggacccagtggccgggcacggtggctcaggcctgtaatcccagcactttgggaggccaaggtaggcggatcacctgaggtcgggagtttgagaccagcctgaccaacatggagaaaccccgtctctactaaaaatacgaaattagccaggcgtggtggcgtatgcctgtaatcccagctgctcaggaggctgaggcaggagaatcgcttgaacccgggaggtggaggttgcggtgagccgagatcatgccattgcactccagcctgagcaacaagagcagaagtctgtctcaaaaaaaaaaaaaaaaaaaagctggcacccaggcctttgggagataggcccagtccaccgtttgtctcgggtagtttctgtgctgctgtggagggctgctgagaactagccccacaggccttttaccctgccactgcccgctactctgcagcccctgagtctagtcttagagtctagcttcttccttctccccactggaagatgtcctgtagctgcccagataggaggaggctgggtgtccatgtttggaaggagaggcagaggattcaggcccaaaagaaaagaatgaggatcacccctggggaagctccagacagtctggaaccctgtgttcgcgcccactctctccctgccttactctggctttcggcaagctccagtccctgtgtgtgcctcagtcctcctgccactatgccttgaggtctgaggtccttccatctcgctcattccaaggcctacgatgatcagccaccagggggtgctgcgagcacgggccgcggccgccggctcgccccgcccctccagactgggggccttgggccgcggctgttcaggctgcccagcagtcaaggccaggagaggcgatttgctgctgccaaggccccatcctcccttgtgccccacaacggctcgccgctttcctgttggaggggcctgcgggaggagggcggtctctccctggcgaccttgtggaccccttgtggggtggggagtggggtccccgcagctccaccctcagcgtggtgtgaccttgggaagctcttagtttgcttgggacagaggacgaaaaggccctttatcattaacgacatgaaactagccctacgtctctctctgacgtcctgcacctccagcccacccatttgcctgttatcttgggatgaacaatgtaatatgagctgggctctggcccagccctgcaggatctgaaagctgggattcagggaatcccagcctgcgatccggaggaccttgctgctggggtccaggagctgggggagggggggtgtggggggtcggtgtgagggtggaaggcagcctggctggggtagctgtggccacattagcggcaggaacatttgcagcccaccaccaccggctagggcacgtggcaccaggcgcgctgctgcaggggatgtgcacaagggctcaaccagtaatgtcgagccagcagctggatgagcatggtctgctctagccagcagctcatgttaagcgccacgggcagctgcggggtgacgtgtggcagtcggtgtgctgcacccggcggggccagaacagagggcccaggtccacccagaccgacgtgaggcggcacgaggcgagatccagacagcggcgcagaaagtgcgtcgccgcccctgtggctcccaggagccgccgctggcgttgccctgctgcgctggcagcgccgcgaccccctgggctagccgatcgcggtagggctccacgccgttggccaacccgcggctcagcgtgtcctgctgcaccagcccgggtccgccgccgcgcttcttccgcagtcatccagaaggtgtctgtaggaggcgcagcagccgctctgggtgcacgtgtttcggcttgggcgcctaccggtagtcgccggccgcccacgacaagctgtagggccacgcggggcgggagggccggccgtggaccagctgcaagtctgcgttctgcagaatcagaggctctgaggaccgccccaagggcgcaatgtccttgttctctgcgtcgcgcacggggttcagggccgcgggctaccagaagcggcagtaggagtggatggaggtggcaccgggcgcacccaaggtctaggctcacggccgcgctctttatggccgcctgttccttcctccttccctccacctccgctctcatatcagcttagccttgccgctgctgggagctcatcgccctaggccaagaaggaccttgtgggcagggggctcccaagggccaggagtgcgaagtcatgaatctcagatgctttccagcccgttccagggttcaggcatgcacattcgtccaggcttctgggagtctaagggtgcgttactttcacgcagtggttgcaggtctgtcaaagtttctaaaatcccaccaagctgagtctcgccattcagggatcataagagtctacaattcctttgcgcaattcaattctgaattcaattcagaattaattcaattctggccgggcgcggtggctcatgcctgtaatcccagcactttgggaggccgaggcgggcggatcacgaggtcaggagatcgagaccatcctggctaaaacggtgaaaccccgtctctactaaaaatacaaaaacaaaacattagccgggtgtggtgggcgcctgtagtcccaactactcgggaggctgaggtgggagaatggcgtgaacctgggaggcggagcttgcacttgcagtgagctgagatcgcaccactgtactccagcctgggcaacagagcgagactgtctcaaaaatatatatatatattaattcaattctgaagcttctgaattcaggtttggcaagtctagattagattcctaatagtttcaattccgtgagactctgcttccaaaaattgaggaatttctgcatctaaagaaggtgacatcaggctctatagaggcacctctgagccctcgtgaaaaccccggggcctttgaggagctggttcttttcttttctttttttttttttttgagtcttgctctgttgcccaggctggagtgcagtggcacagtctccgctcactgcaacctccgcctcccgggctcaagccattctcctgcctcggtctcccaagtagctgggattacaggtgtgcaccaccatacctggctaatttttagtagagatgggtttcaccatgttggccaggctggtcttgaactcctgacctcaagtgatccaactgccttggcctcccaaagtgctaggattacagacatgagccaccacgcctggccttaaggagctagttctgagcatctaccccagctcctccggcctgggatgcgagtcctggctccatcagcgcccctcacactgttttctctccccttacgcacttccccttgatgctccccaaccccagccccagcttctaaaaacactacactcagcccctccacctctcccctcccttccttaactcactgcagactgccttttgccctcaaaacacctgtccagtttaccagcagcctcctcattgctgaatccagtgtaccttgctccccaggtgctagcctccctaaccctctggaggcatttggccatgtggcccctcctccacacagttcaggacagaactccatgaccaaatcacacagccgttcaccaagacctattctcctctttggctcttgcctagacgagaggctcctaacaggtcactcatcaaatctctcccactctgtccatccttttcaccccgggcaataatagacttttttttttttttttttttgagacagagtcgctctgttgcccagtctggagtgcgagcgatctcggctcactgcaaccaccacctcccaggttcaagcgattctcgtgcctcagcctcctgagtagctgggattataggtgtgagccaccatgcccagctaatttttgtatttttagtagaggcagggttttgccatgttggccagtctggtctcgaactcttgacctcagatgatccgcccacctcagcctcccaaagtgctaggattacaggtgtgagccgctgcgcctggcccataacaaactttttacaaaagataatgtggggggaaaaaaagaaagaaagaaagaaaatgtgcgggtcatgtctctgctgtagaatcttagtagttccccgttgctatcaggtaaagccagactttttggacaggtacctaaaccatctgggctccagctggactaaggctctggaaagagcttccggagaaggatctcaggatttgcagagcctgagggaggagtctctggagtctgccgaaaggagactcaagtcctggtttcccactccaggaaaccccagtcaagactaggaatcctttttttttttttttttttttttttttttgagacggaatctcgctctgtcgcccaggctggagtgcagtggcacgatcttggctcactgcaacctccaacccctggcttcaagcaattctctgcctcagcctcccgagcagctgggattacaggtgcccgccaccacacccagctaatttttgtatttttagtagacatggggtttcatcatcttggccaggctggtcttgaactcctgacctcatgatccacctgtcttggcctcccaaagtgctgggattacaggcatgagccaccgcgcccagcctcttctttttttttttttttttttttttgagacaatgtctcactccatcacctgggctggagtgcagtggcgtcatctcggctcattgcaacctccacctcccaggttcaagcgattctcctgcctcagcctccagagtagctgggattacaggcgcccgccacgacgctcagttaatttttgtatttttagtagagacaaggtttcgccacattggccaggctggtctcgaattcctggcctcaagtgatctgcctgcctcagcctcccaaagtgctgggattacagacgtgagccaccatgcccggcctaggaaccttttctaaacatggattggagcaagaaggtgcagggataggggatggagtcacatcaggctgggccacaggaggtgggagtgccagagactggctgggccctgggcacagaggggttaactacaaagcaaatcacagagagcgagatcaatgggttactggctgcagagagaggaaaaggcagcagcaacgcagagaggcagagaagagccaggcagaagagcctgccacctgggggaaatcagggactgaggaggaagtggccagtggctactccagagggagtgcccaactccggctcagcagagggggcagaggagaggaggggccttaaaggcaaagggggagaagtagaaggcagaccagtacctgcagggaggcaccaaggggcagccgctgaatcaggaggcccacccagcccggccattccacccaggatcaagcccactgcccaaggcggaggtgggtgttgcccatcctgggctttggggacctactgcatgctgggtgctgggatgggggcagacattgcctttcttccctactccctgcctgacccccctttcccctactttgtcccaccaccccagtggtctcaagcctgcaaggagatccacaggcagtaggagacatgggctgtagagtgggatgggggtgagcatgggtgcggtgtgcacacacacaagttgtcagaggcaccacctgttacaagctctcagatgagcactctagcttaagaggcaggataccagggtggcaacagccccagagctgccatttcgagtgtgatattatcctcccatgtcccctctctgggcctcaatttccctatgtgcagagaggaagcagtgacctacacggtcttcccagttttgccattgtgatgatctcactatactggaccctccaatgactcagggatgttacccgtgttttgctaaggctacagcttgtagccagagaaagccctaaacccatgtcccagggtctcccctgagcttcagatccccattgagaaggaaaacataccagtttctgggtttggcccctccccccatcgccatatcttcatcctacttcgcttgtgccttccccagcctcgtgggttgaaagtgtccctcaaatacctaggtagtcctccaggcaggactccaggggtgttccttaggaaactgaggaactctcaccccttgaacaccacgagcttgctcacacagtgacactcagcgatgactttggctctgctctcccctcctccatctcccacgagcttccagcccagaacacctggccagacccaggtcgggggagttagatcccggggtcaagcaaccagaactgggggctcttgcctgaggattccagcttctcttcccaggtgcccgtctgatggggagatggctgatgcccagaacatttcactggacagcccagggagtgtgggggccgtggcagtgcctgtggtctttgccctaatcttcctgctgggcacagtgggcaatgggctggtgctggcagtgctcctgcagcctggcccgagtgcctggcaggagcctggcagcaccacggacctgttcatcctcaacctggcggtggctgacctctgcttcatcctgtgctgcgtgcccttccaggccaccatctacacgctggatgcctggctctttggggccctcgtctgcaaggccgtgcacctgctcatctacctcaccatgtacgccagcagctttacgctggctgctgtctccgtggacaggtgcgctgtgcctggggcctggctgggcagggctgtgggggcgggggttgggggaggagtcctgaacagatcctcactggccttaggaaggagagagtgggggaccagaaagggaggtgggtgggaggaaacaaaagctccctgacccctcgcaagcagcctctgggcacctgcagggcgtgcttgaggggactgtcctgcccttcccctcctccactgtgaacttccagaggacgcctctgagtctcaagtggcagcacagggtctggcacatagtaagtgctctgtaagcgcgaaatgaatcgcaaaagaagctcacgaatgcgttcatcagtttttttgttttgttttgttttgttgttttttttttttggatcttggctcactgcaacctctgcctcctgggttccagcgattctcctgccacagcctcctgagtagctgggattacaggccaccacacctggctaattttttgtatttttagtagaaacggggttttgccatgttggacaggctggtctcgaacccctgacctcaagtgatccgcccgcctcggcctcccaagtgctgggattacaggcgtgagccaccgcgcccagcccagctattttctaactgcccacacctggccaagctgtgcacacatctgcttccacagcttgaaacttggggtcaaatccaggctcactccagctgatgaccctgggcaagtcacttctctctggacctcatctgacgcatccataaaataatcctagaaataacaagtcaccgggatcgggcccttgctaggtgcaagggcctaagcaccttgcgcgttcacacccttaatccccgccacgtcccccacggttcacaggaggcgcactgggccgcagggcccgggcgcgggacgtggcgcgggcccctgcgggagggcacctgcccgccccgctgaccaggcgccctccgcaggtacctggccgtgcggcacccgctgcgctcgcgcgccctgcgcacgccgcgtaacgcccgcgccgcagtggggctggtgtggctgctggcggcgctcttctcggcgccctacctcagctactacggcaccgtgcgctacggcgcgctggagctctgcgtgcccgcctgggaggacgcgcgccgccgcgccctggacgtggccaccttcgctgccggctacctgctgcccgtggctgtggtgagcctggcctacgggcgcacgctgcgcttcctgtgggccgccgtgggtcccgcgggcgcggcggcggccgaggcgcggcggagggcgacgggccgcgcggggcgcgccatgctggcggtggccgcgctctacgcgctctgctggggtccgcaccacgcgctcatcctgtgcttctggtacggccgcttcgccttcagcccggccacctacgcctgccgcctggcctcacactgcctggcctacgccaactcctgcctcaacccgctcgtctacgcgctcgcctcgcgccacttccgcgcgcgcttccgccgcctgtggccgtgcggccgccgacgccgccaccgtgcccgccgcgccttgcgtcgcgtccgccccgcgtcctcgggcccacccggctgccccggagacgcccggcctagcgggaggctgctggctggtggcggccagggcccggagcccagggagggacccgtccacggcggagaggctgcccgaggaccggaataaaccctgccgcctggactccgcctgtgtccgtctgtctcactcccgttctccgaaggcgggacgccaccgggccagggatggggcaatgccacgagctctctgaggggcgttgagtggagcgacttgtccccgctccacagcggagcaccagcccagtggacacccctgggtgtgaatatgaacagcacagcccgcccccagcagggcagcccccagagcctgcccagagccagcctggcagtccctctgcccattcttccaactgggtgacacctaggccctgcttcctccaccacctcttaactatctccttcttggttccaagctcagtcctaggtaatttaacatcaacagctaataaatggctaatatttaagtgggaccaggcgcttggctcatgcctgtaatctcagcgttttgggaggtcgaggcgggaggatcgcttgaggcagcagttcaaggctgcagtgagccatgatcacgctactgcattccagcctagacagcaaagcaagaccttgtctctaaaaacatttattaagcaggtaccatatgcctcatgctacattctttgtcaaaacagctttgcaaatagatatgattaacctttcctttttttttttttttttttttgtcttttagagacagagttttgtctcccaggttggactacagtggcgccatctcggctcactgcaacctccgtcccccgggttcaagcaattctcctgcctcagcctccagagtagctgggattacaggcgcccaccaccacatccgactaatttttttttttaatagagatggggtttcaccattttggacaggctggtcttgaactcctgaccgcagatgatccgtccgcctcggcctcccaaagtgctgggataacaggcgtgaaccactgtgcccggctgtttagccccattttacagatgtagaaatcaaggatcatagagatttagtgatttgccacaccgctggtgtttggcagaggttggatacaaacccatggctgtgtaactttttctttttttttctattattattattattattatttttgagagagagagagagattgttatccaggctgcagtgcagtggcacaatcttggctcaagacaacctccgcctcccaggttcaagcgattctcctgcctcagcctcccgactagctgcaactataggcgtatgccaccacacccggctaatttttgtatttttttattatttttattttttggtagagatggggtttcaccgtgttggccaggctggtcttgaactcctgacctcaagcgatccgccggcattggcctcccaaagtgctgggattacaggcgtgagccaccgcgcccggcccagaggtaacatttgacatgtattttcttggacaaaggtggggaggggcatgccaggtagagcaacagcctgtgcaaggcaggggacgtgcagggcagtaagtggctcctgcagctgaggcagggagagattggggcaggggaggcctggagggcaggagcttcatccttcaggcagatggtgatgccactgaaggttttcaggagaggagggggcctatcagatgtgcagttcagaaagctcccagggctgctgtgtacaagctggaatggaggcctagacttggcagaggactccgatcaggtgggttctcctgggcccttcttggaagtgaggagactggtaaagagtctgctccgtgagctctgttgaggaaagccaacgaggcctggcctaggactgggaagatatttttgccgtggacttggcaggaagatggatggcctgctgccaggcttgggcttggttcccgaggctccgaggtttgcttcagggggctaatgaaacacttggaagagcagatggtcgtaataataataactcaggagagaattgtgtgtccagtagagcccaaggcaggcaagagggtcggagcggaggctgaattgagtcctggccactgctccccagggcctgagagaaccctcctgatctgagccctctgtcaagtgtagggctgagcctggggcagccctggggacctggaaaggcacttttcttagttggaaggaggtttggattctacaaccttcttaccttcctgtttgtgcaaacctcttaagaagaggcctggccggatcacgaggtcaggagatcgagaccatcctggctaacacagtgaaacaccatatctactaaaaatacaaaaaattagctgggcgtggtggcaggtgcctgtagtcccagctactcgggaggctgagacaggaaaatggcgtgaacccgggagacagagcttccagtgagccgagatcacgccactgcactccagcctgggggacagagcgagactccgtctcaaaaaaaaaaaaaaattactctttagggggcctggcgcagtagctcacgcctgtaatcctagcactttgggaggctgagacgggtggatactaggtcaggagttcaagaccagcttggccaagatgctgaaaccccatctctactaaaaatacaaaaaaaaaattggtcggccttggtggtacacacctgtaatcccagctactcgggaggctgaggcaggagaatcgcttgaacccaggcagcagaggttgcagtgagccaagatcgcgccactgcactccagcctgggtgacagagcaagactctgtctcaaaaaagaaaaaaaagatttactctttagggagctctttctggctgcccaggcaggctttcatagggaggaagtacagagtgtgctgactggagcagagaggtcagtcaggaggctcgtgtgagaatccagagagaaagacatagaggtattggaagtggtggggagacatggacagatgggtcagccacttaggaggtacaattgctaggacttggtgactgttggagggtaaggaggagagacgtgtcccagatgacaccccagacttctggcttgggctatttgggggtggcagtggggataactgagggggacagttttggtggtcatggtgggggtgcccgcagaatagcggtgtactctgagtacgtgccacgtttcacaaccactgtttgcaggtgggcaagggcagggagcttgtcctttcattccctgctgtcctcccacctagaacactgcctagcacatagcaagcactaagtcaataagtcaatatttatttttatttttatttttattttttgagatggagtctcactcttttgcccgggctggggtgaagtggctgaatcttggctcactgcaacctccacctcctgggttcaagtgattctccggcctcagcctcccaagtagctgggattacaggtgggcgccaccacgtctggctaatttttgtatttttggtagagatggggtttcgtcgtgttggccaggctggtcttgaactcctgacctcaggtgatccacctgccttggcctcccaaagtgttaggattacacgtgtgagccactgcgcctagcccaatatttctaacatgaaagaaacacgaagtataaggcaaaggatcttaacccgcaaggtgaaatcaccaaatgtttcttcttcctgccatcttctaagccttcctccgcacctccccgactcttcagtaattcgcagagcagccagcaaccagcaaaactcacccctgtgagtacaacctcagctgagctctctttcctgccctggcccatggccagctcagggaccactgagctctctatcctgcccagtccagccagctcagggaccactgagctctctatcctgcccagtccagccagctcagggaccacttgggtgttttgtgactcactccagtgtctgaggccgacttcatctggctggctcttcagacacaattggggttacaggaaatatcctggctggaaatggggtgaggcagattggctgtctacatggctgtctggcaagtgtttgatgactgacctataagccaccttcagtcaagcctttggttcactgtctacatggccagggagggagtcaacaatagacactccacctccgcaacggccagttctcctggatccatggctccagggatggaggatgctgcaggagacacaggccttgcttcccagctaaggactgtgggtcatctcagggcgatttcacagtcccagcatgccccagctctcagctctgcaaataccaagcagcctgcctaggggacagtgggctcaggagtgcccttggcaggtcctcacctatctgctcccacagctctgtagcaagggttctaaccttttttgagtgtgaagcctgctgagaatgagaatgagagctgtggacctgtttcccagaaacgcatgtgtgtactctccacacaaaaccttgcaccgtttcgggggctcacacctccctaagggctcgctaattgaaccccttgggcctgaggttgagaaaccttgcctcaattcttccccaggtgatcaggccagggtgagagaggacagacctggcaagcaggacccatgagaaagcccccttcctggactttgaggcccgctccctcctgcccctgcctcccctctgccctggactcctctctgctctgccccattcccagggccatggccatgggggggctgtgtttggatacaatggcaaccctgggcccagaaagtgggcaggctcacctggaggggatcagagtaacatggcaggaagcgagtgaaaagctaccccagaaccgcacctctgctctccatgtgactggggtgccatcctcccttacctacctcaggcagtggcctgagttccacgggcgcgccccacagctccctctgccgcctctcttcaggcttggggccactgcactttcccttccccagccctgccaacctggtggggcactgggcttccctctcacagggtcctggggacaggcctaccctacatctcatacccacagacagacccttttttcctccaaggcctggcctaggttctatgagttcaatgcagatctgagccataccaagctgggtttggggaacacactctcctcctctgaaaggtagacagggattccaacttggtgaaggggagagtagggcagagccaggcgggacacggactgatcacctggagaaagtcaccatcagcagccttggggcaggggcgggcccagcagtgccatcccctgggttttccctgagcaggcctccgctaggagcgcacgcttccttctgcctgtccatggcccacagcaaaggactggtgctcctgcagcggggagcggggctgctgacaggactgaacctcaaggtgagtttttggggcttcactacaatactagtttctggttgctgctgcaataaattaccacacacttagtgacttaaaacaacacaaatttattcccttagagttctaaaatcagccagaattataaaattagcctcactgagccagtccaggtgggagcagggctggggccttccagggctctgtgggaggatgcatttcctggctctgaggtggcctggactctgtggcttgagctgccctcctcaactccagtttcctgctccatcgctacacctccaacctcctctcccgtcacctgctcttctgttatacagacccgggtgaggacatcaagccctcctgaacaagctgggataatcttcctggcgaaagatccttaacttcattacatctgcaaagcccctttggccatacaaggtaattttgacaggttcctgggattaggacatgggcatcttgggaggccactactggcctaccacaactgggcagcaaaactattacaccctccggtataatagttttggtgtttcaatgactgggaggaaaagggttggaattttttgctttggggtccctcttaaccttgtatttttaaggtctgggactcaccaaccctccccttccaaccagagaaactcactgcagtatctccttgaaagtctggtgacgtgtctgtctaagtgctggtgagaggcacaggaccaactgagggcctcacgcagtacccctggccacagggtgcccgcctaagcccacacctgctgactgcaacaagcccatggccaggacggaacacagagaagggtctgaggcctggagcgcgccatgaaggccatggggcaagtgaggtctgctgagatagcgcaggtctgcggagctgaagtgcagctgcagaggctggtctggtgctgcgagaactggaagaagctgggagctgtggtccctgtccacagagatgctggaaactgtggctgggagtggctctgaggccgtggagagagagcatctctgccccacggcatctgcgggtgagggcaaggtcctcaccagacaagtgcagctccaagtcccagatgttgggctttttcttggtactgagacagcagtggggcagggtggggcagtggcaggaaggcagggagcctctcttgctacctcttctccatgctctgcatctgcagactgagggaggtgaagctggccaggaggtcagtcacttcatccacctgcaggacggaacagaggctctgttatgggacacggggtgtgccagggctcctgggtctcttccacaatcccacaggcacagaacacaggcacggtctctcctcccagggcgtgtggtggcttctgactacgcagcagttgaccaagggtcaatctttgacaccaggtggcctagcgctgtcctagagggcagggccatgaacacacactagccactggcaacttcaaaggaagtgaacggaggctttgaagcctgcaaccccacaatcataggctctttcccccactttttttgtttgagacagggccttgctctggtttttttttttgttgtttttataatttttgcctttttccacatgttctgagaggaccttgctttgtcactcaggctggagttcagtggcaatcacagctcactgcagcctcgaactcctagcctcaagtgatcctcccacttcagcctcccatagcgttgggattacaggtgtgagcccctgcggctggccccagcccacagcctctttctgatacgagtgtctggtggcatcggagcagggtggactggccctgaggctcctgccaggccctgggtctgggcctgtggctgcagctcacctgctctttggtactggtcatctgcaggcgggtgcagaggtcatccaggcgttctcgctgctcatgttgccctaggcgctccagatactccctcagcatatggatgatctggaacaagagggtgagctgagctgcctgggttcctagggaggcagacaggctgatgctgcttccaaaaagcacagtggagcaggtgccaactggggtcagtgtgaaacaacccaggagccctgggaccagaggcaggtgtgtctgtggttagggcagcatctgtccagtgctgccttggtgccgtggtctccacacagaaggggtactcacctgcttcacctccagacgcacagcctctaggcactgggcatggccctcctgcaggatattcagctttgacttggccaggtgcaggggtgtgcgaccagctcggtccagggcatctacacgggcccctgcaggtaccagctgaggtgagcattctgggggtgagggggagaaagaggacagagaggggaagaaaccacatacctcctcgtagcagtgtggtgatgacaggaacgtggttggtgcaggccgctgaggaagaacaacagagacttaagaatccaggaccaccagagcctggctctgcgtggccactggagggagcagggctgtgtctcccagacgcctgtgccaagttatgcctactgagaaggtatcgccaaggcacagctaggtaggactcagaagtcaagttcaactccctccctgtacagcagaggaaactgaggcctggagataggatctgcctcagtgtgagccacagtgctgagtgctgctgggctagcctaggttgctaaattggctctgccgagggcacagccaactgctaaatgattggaaggcccatgggacacaggctgctgggcagtgcagccctgggagtgcaggcctaggatcttccctgacactcacagtttctgccaggagcatgccgggccccaccctcttcatctaaagagcctttctttgctgcaaatgagttgtcttagtgacttctgacatgcttacccaggtgcagtggcgtgttccccagcccatctcgctggttaggatcagcaccatggtccaggagcagctgcactggaaacaggcaaacccaagaggagttgtcggaggcttccattgcctgcaccctgaacccctaacctagctagagaggctggctcagagtaggggacacggaatgcaagcatggatggctgtgttacttcattcattcactcactcactcacttacttaccagagttcatgggcaaagccctgagggccaggaactgaggatttggggagggcctcttggcctatgcaggtgtaggaatgagatttgaagggttaagtaaagttcttccaatagcagctgctcctggtgaaggctgtccagggcattttctgcttctcccacagccaagcaccatggtaggaattaagtcaataaatgatgctgagctccatggataacctctccctcctggcagtcttgggatcacctcaggggtgtgctgtattatcaccagggtctgccaatacccagaaggatgcataggcaggtagcctggatcccagacatcatacagggaggtcaggctgagcctcacaccatgtacaaaaactaattcaagagggaccatagacataagtgtgaatgctaaaacaggcttccagaagaacatgaacatcttgggcaggcaaagatttcttaaataggtcacaaaaatactaaccataggaaagaaaaggccaggcatgggagctcaggcctgttaatcccagcactttgggatgccgaggcaggtggatcatttgagctcaggagttcaagaccagcctgggcaacatggagaaaccctttctctatactaaaaacacaaaaattagctgggcatagtgatggcagacttgtagtcccagctacttgagaggctgaggtggcagggcggcttgagcccagaaggtcgaggttgcagtcagccgagatggtgccagtgcactccagcctaggcaacagagacagaccctgtctcaaaaaaaaaaaaaaaaaaaaaaaaaaaaaaagagaaaggaaagaaatattgataaattggattcattaaaattaagaacatggctgggcacggtggctcatgcctgtaatcccagcactttgggaggccaaggcagccagatcatctgaggtcaggagttcaagaccaggctgttcaacatgttgaaactgtctgtactaaaaacacaaaaattagctgggtgtggtggcatacccctgtagtctcagctacttgggaggctgaggcaggagaattgctggaacctaggaggtggaggttccagggagccaagatcatgccactgaactccagcctgggtgacagagcgagactctgtctccaaaaaataaaaaataaaataggccagggcacaggagctcacgcctgtaatcccagcactttgggaggccaaggcgggtggatcatcggaggtcaggagttcgagaccagcctgaccaacatggtgaaatcccatctctactaaaaataaaaaattaggtgggtgtggtgacacgcatctgtaatcccagctactcaggaggctgaggtgggagaatagcttgaacctggggagcagagcttgcagtgagccaagatcacaccactgcactccagcctaggcaacagagtgagactctgtctcaaataaataaataaataaataaaaataaaattaggaacttgtgttcatcaaagtataccactcagaaaatgaaacagcaagctcagaaaatcaagtcatttatatttgataaatgatttctaaccagaatatacaaagaattcttacaaatcaataagaaaaaggccaggcgcagtggctcatgcttgtaatcccaatactttgggaggccaaggtgacaggatcgcctgagcccaagagttagagaacagctgggtaacatagcaggaccacgtctctacaagatgttttaaaattagctgggcttggtggtgtgcacctgtcgtcccagctacttgggaggctgaggcaggaggattgcttgagcctaggagattgaggctgcagtgggcagtgatcaggccactgcacgtaagcctggatgacagagtgagactttgtctcaaaaaaagaaaaagacagaaaactagttttttttgtttgtttgtttgtttttgagacagagtcttgctttctctcccagtctggagtgcagtcacgcgatctcggctcactgtaagctccgcctcccggcttcacaccattctcctgcctcagcgagtagctggaactacaggcacccgccaccacacccggctaagtttttgtatatttagtagagatggggtttcaccgtgttagccaggatggtctcgatctcctgacctcatgatccacccgcctcggcctcccaaagtgctgggattacaggcgtgagataccgcgcccaggcaaaacttgtttttaaaaaaatggacaaaagaggccaggtgcggtggctcacgcctgtaatcccagcgctatgggaggccgaggcgggtggatcacctgaggtcaggagttcgagaccagcctgaccaacatggagaaacccggtctccactaaaaatacaaaattagccgggcgtagtggcgcatgcctgtaatcccagctacttgggaggatgaggcaggagaatcactttaacccgggaggcagaggttgtggttagccgagatcacgccattgcactccagcctgggcaacaaagagtgaaactctgtctcaaaaaaaaaaaaaaaaaaaaaaaaaggacaaaagatttgaacatatagttcataaaagaggatgtaaaaatggtcaataattggacacagggaggggaacatcacataccagggcctgtcggggggtgggggccaaggggagggagagcattaggacaaatacctaatgcatgaggggcttaaaacctagatgacgggttgatgggtacagaaaaccaccacggcacaggtgtacctatgtaacgaacctgcacgttctgcacatgcatcccagaacttaaagtttaaaaaaaaaaatggcccgggcatggtggctcacacctgtaatcccagcactttgggaggccgagacaggtggatctcctgaggtcaggagtttgtgactagcctggccaacatggtgaaaccctgtctctactaaaaatacaaaaattaactgggtgtgatgatgcgtgcctataatcccagctacccgggaggctgaagcaggagaattactcaaacccaggaggtggaggttgcaatgagccgagatcacgccattgcactccagcctgggcgacaggcaagactccgtctcaaaaaaaaaaaaaaaaggccaataaacacatgaagaggtgctcaacgttactggccatcagagaaatgcaaattaaaccactatgagacaccaaaagggttaagattaaagagagacaacagcaagcactggcagggacgtagggaaaggtggaactcttacactgctggtggggagtgggagtgtgtgtcagtacatcccttttgggaaaaggtttagtagtacctactaaagctaaatacatgtgtaccctagtgacccaacaatgccattcctaggtttatagaggatagatgagtgtttacagccacaaatcacatatacaagaatgttcacaacacttcattcataaagctaaaacctggaaacaccacaaatgtccgtcaatagtagaatggataaatggggtatatcacaatgaaatacaaaccagcataagaaagtactaactacagtccaccctccctaactgtgaatactgtgtccacagattcaatgaaccctggactcagaacccgaggatatggagggccaacttcaaaggacttgagcatccatggagtttggtatctgagtggggtcctggaaccaatcccaagaacactgagggaagactgtactgatataggcagtattcatgggtgaatctcatggagataactttgagtaaaagtatgcaaggctggtgcagtggctcacgcctgtaatcccagcactttgggaggccaaggcaggtggatcacgaggtcaggagttcaagaccagcctggccaacatggtgaaaccccatctctactaaaaaatacaaaaaaattaaccggtgtggccgggtgcagtctctcatgcctgtaatcccagcactttgggaagccgaggcgggtggatcacgaggtcaggagatcgagaccatactggctaatacagtgaaaccccgtctctactaaaaacatataaaaaattagccaggcatggtggcgggtgcctgtagtcccagctacttgggaggctgaggcaggagaatggcgtgaacccgggaggcagagcttacagtgaaccgagatggcaccactgcactccagcctgggcgacagagcgagactccatctcaaaaaaaaaaaagactcctataaaaagagaaaagctgtcctgctgctgtggttggcactgagtaaatgttacctgaaagtcttgaaggcctgggccctgcactctccagtggtctcttagttggagatatcccttcatcctcagtcaatcatattatctcccccaggtttaccctgccccagtctaacattgccagttccacaggctaacagagggagaagggcagggcactgcagtgccaagtcttccttatatccagaacaactgggcatcccaaggctgtgcagacagcagcgcctcccccaaggcctgtgcagagacactacttgcctagccctactccctcctccctccccaggactcaccaatctggtcattgccattgcatgaggcaaagtgtagagctgtgcggcccttgtcatcagctgcacagggatccgcgccatcttccagcagctgctgcactgacaccaccaagacagagggaggaagggggagaaagcggcgatgttagctaagctgcagacccgagcgatggagagggaggctcaggggtgcctctagacaagacatcgacaatgcataggaaagcagcccttcctagatgctggtcctatgggaacaagcaacttgttcttctgagggcacaactgaaggccatggattctgagtgctcaaactacacgtctagtgatagaacatcgtaggaggttcaaggccctcagggtcagaaattttagggtcacaggaatccctagcatagacagtggtccccctcccgtgacctcggcttggatacacatccattctggctggaaacagctgcccaagctattggcctatgctatgctcccagcaggcagcaatcccccagctacttggggcctcccaagtagcccccagctaatttttgtatttttagtagagacggggtttcaccatattggtcaggctggtctcgacctcctgaccttaggtgatccgcccacttcagcctcccaaagtgctgggattacaggcgtgagccaccacacccggcccgaaaaaatgtttatgatacacaaaaaattatgcaggctacagcatgtgtatatagcagtttgcaagccagcccataaagaaaattccagtgtataggaaagaagccttgaaggatattcatcaaaatattaacagattagttcctttgcggacatggattttttcttatatatttctctaatttccacaacatttttaaaaaatttttttcttatgttatttatttatttgagacagaatttcgctctgtcgcgcaggctagagtgcagtggcgtcatctccgctcactgcaagctctgtctcccaggttcacaccattctcctgccgcagcctcccaagtagctggcactacaggcgcccaccaccacgtccggctaattttttgtattttcagtagagatggggtttcacagtgttagccaggatggtctcgatctcctaacctcgtgatctgcccagctcggcctcccaaagtgctgggattacaggcgtgagccaccgcgcccagctaacatttactttttgtagagacgaggtctccctatgttgtccaggctggtctcaaactcctgagcccaagtgatcctcttgccttagcctcccaaagtgctgggattacaggcatgagccacctcacctggccgtggcagctaagttgagtattcactcccattaaccacaagttccaaagttagtgcctactctttgcagaagactgtgctggctgccagggatacaaaagtatacatggtctccaccatcaaggagtccacagggtggtaaatgctatgacatcaggaagttcaaagtgacaggggagcatggggagagtgagtgtctaagccagacttaccttcagcaagatgactgcacagtcagacaataaatacagtgagcctgctccaagggcgtgagtttgcagactgccttcccacatattgattacctggccttttccttccccaaccagcccatgggaccctgtagctggacctactgtgcacactcacctgtttccacatcattggcattggccgagtccctcagtctcttcagagctgtaaagagagtaacggatgccagtttaaaaaaacagccatggctgggtgcggtggctcatgcctataatcccagcactctgggaggccaaggcaggcagatcacaaggtcaggagatcgagaccatcctggctaacatggtgaaaccccatctctactaaaaatacaaaaaaattagccgggcgtggtggcaggtgcctgtagtcccagctactcgggaggctgaggcgggtgaatggcgtgaacctgggaggtggagcttgcagtgagcagagatcgcgccactgcactccagcctgggtgacagagtgagactccgtctcaaaacaaacaaacaaacaaacacacacaaaaaaaacacagccattggctgggcatgatggctcacgtctgtaatcccagcactttgggaggccgaggcaggtggatcacttgaggccaggagttcaaaaccagcctggacaacatggtgaaaccccatctctactaaaaatacaaaaaaattagccgggtgtggtgcacatgcctgtaatcccagctactctggaggctgaggtaggagaatcacttgaacccaggacatggaggttgcagtaagccaaaatcgcgccactgcactccagcctgggtgacagagtgagacgctgtctcagaaaaaaacaaaaacaacaaaaaccaacaaaaaaaacccagccatctagctgggtgtggtggtgtgcacgtgtaacaccagctacttaggaggccgaggtaggagaatgggttgaagccggaaggcggaggctacagtgagatgagatcacgccactgcattccagcctgggcaacaaagtgagactgtctcaggaaaaaaaaaaaaaaaaaaagccacaatggctgggcgcagtggctcatgcctataatcccggtactttgggaggccaaggcaggtggatcacttgaggccaggagttcaagaccagcctggccaacatgctgaaaccccatctctactaaaaatacaaaactagccatacgtggtgactcacgcctgtaatcccagaacgttggaaagctgaggtgggcagattgcctgtgctctggagtttgaaaccaccctgggcaacatggtgaaaccttgtctatactaaaatacaaaaaattagttgggcatgggggtgcacgcctacaatcccagctacttgggaggctcaggcaggagaatcgcttaagcccaggaggcagaggttgcagtgagccaagactgtgccactgtactccagctcgggcaacagagtgagactctgtctcacacaaacacacacacacacacacacacacacaaaaaacataggccgggcacagtggctcacgcctgtaatcccaacactttgagaggccaaggtgggtggatcacgaggtcaggagtttgagaccagcctggccaataaggtgaaatcccttctctactaaaaatacaaaaattagccaggcatggtggtgcatgcctgttatcccaactactcaggaggctaaggcaggagaatcacttgaacttgagagccggaggttgcagtgagccaagatcgcgccactgcactccagcctgggcaatagagcaagactctgtctcaaaataaataaataaataaataaataaataaataaataaataaataaataaaataaaaacacaaaaattagccgggtgtggtggtgcatgcctgtaatcccagctacttgggaggctgagacacgagaatcacttgagcccaaaatcacaccatggcactccagcctgggtggcagagcaacactccatctcaaaaaaaaagaaagaaaaaatatttctcaatcttaggttaagttctaacttaaatcaatctaacatggtaaaaccccatctctactaaaaatacaaaaactagctgggtgtggtggtgcgggcctgtagtcccagctacttgggaggctgaggcagtgagccgagattgcaccacctgcactgcagcctgggtggtaaagcgagactctcgtctcaaaaaaagaaaagaaagacagtgccctgggaacaaggagaaacttgaaatgaggcggagctagtacaaaggccacatcctcctgcaaatcctccaagacttttggagccagatttcctctctatcacttgtagtcacagggtgaccttgagcaagctagttaacccagctgggcctcaggtctatcatctgcaaaacaaggctgagttgttctgccagccccgagttattgcaaatgatttacacagaagctctttgtgagctggttacacagataatcttatattctccttcaaagcaggtcgttcccaaatgatttgcctaaatttggtatttcctaagcagattttccccctccaatggctaatggaaagcaatgtctttgtcatcggagatatggtcaaaaattgcaattcagatacatgacaattccttgctttcatacagcactttatggtcaatacaacgcttccaaattcttatttcatcttcgtgacatcactaaaatatggctagagtcatagccagtcctggaagaaatccccaaagtccccattcttaatctctcagtgcctgggtttccatgtcacccatgcattgtagaagacaatatggtagatataccagaggagaagtttgagtcgggctgacccggattctaataccagcaacagccacttgctatgtgacctggaataagacaatttctctgagcctcagtttcctcttcagtaaagtgggaacaatttctatgtctcaaagagttcttgtgaggacagatgatcatgtatcagcagtgtttggggcacagcaaaggcagcataacagctaaacatccattaccttacttaactcatcccattttacagatgagaaaactagggctgaggccgggccagtggctcatgcctgttatgccagtactttgggaggccgaggtgggtggatcacctgagatcagaagttcgagaccagcctggcaaacatggtgaaaccccatctttactaaaattacaataattagccgggcttggtagtgggcgcctgtaaccccagctactcgggaggctgaggcaggagaatcgcttgaacccggggggcggaggttgcagtgaaccaagatggcgccactgcactccagcctgggcaacagagcgagactccgtctccaaaaagataataataataaataaataaaaataaaaaaatttaaaaagaaaactaaggttgaaagggtctatcatttgccctaaggtctaactgtggtaaaggagtccaagtccgtgcatttaaacaagctggtacgacttggctgcaggctctggcctcccctctccatgataataaaagtgttccccagtacctcattttattattcaccaataagcgttccgagtcatgggaagtttccattcagaaattacccagtgagagaagactggggtgactggctcagagcaggaagactttctaaaaaaaccatcatcaccatcgttactgaaaggagactcaagggtcagtgtggccctcagcgcagacgtcgggggaccccggctgagggtcgggggcgaccaaagcgcggccactggtcctctgaggccccgcccctcgcccgggctgccccgccccgggcccccgcgccgctcgcgccgctcaccgtgcacctccttgcccgtgggcccgagccgccggtggggcctggcagcgcgcctcagccggccagcgggtatcttgcagcgcagctcgtcgcgcggctccgcatcctgctgccacaggacgtgcaagtagcgcagcggcgactgggccccgccggacgcccggcccgagaggcccgcgccgccgccgcccagcgcagacccgaagtcagcgaaggagaagaggccctcagcgtcagtcagcggctccggcgccaccgcgcactcgccctccgagctcgagtggcctgagcgcggctcgtcgtccgcgtccccggcggcggctgccatggcaacggctccgcgcgggcctggccgcctgagcctcgttcccgaccgaccaacggacctacttccctccgccctgagtcgtgctgtcagcgagctggcgggcgggcagggcccgcaaccacggcaaccgagcgggggcgggctcaggccgagacagagcggcgaaccaatgactacccttccagcttaaaccggtcccaaaaccaatcggaaagggagggcacagtacaagcaggataattggacagggtttccggcaacgtgactgacagacattgtaaccaattacaaacttgaagtgaccttggctttcgctgtacgtcgctaccggagccagtaaaacagcatttcagacgctttttttttgcgacggagtctcgctctgccgccaggctcgcgatctcggctcactgcaacctccgcctccttgaagcaattctcctgcctcagcctcccgagtagctgggactacaggcgcgcgccaccacgcccagctaatttttgtatttttagtagagacggggtttcaccatgttggccaggatggtctcgatctcttgatctcgagatgtgccggcctcggcctcccaaagtgctgggattacaggcgtgagccaccgcgcccggcctttttttttctttttcctctccatttcccagtctaatgagaaaacaagcagataccttagcaaatcagattaagatgatttgcaggcactcacaaaggaaaatgaagaagccacgccatccatgtagatatagatgttgtaaatcaatgaacgcaaaaaaaaaaaaaaaaaagaacttcccacaaatgcataatgtacgtgggaaagggaaaatgtgttgaaatttggagataccactacaaactgtgagtaatagtgtctaaatgcaatggatttcctttagtcagagttctctaggtaaccccgacgtagatgactgatctacaaagatttgtaatacaaagtgattacattagagcaatagtttagttcgacagccagtcactgagccaggtaactgctaggtcctggacacaggatcagacttggtgcccctgagatgctcacaatccaatgggagaagaccaggaaacaaataagtgttcctcaagcaacatttcatgggtgcacgttttcataaaacttctcacaatcccgtaccccacaagcacttctataaagtagacaagaaggaccatccctattttataggtgaggagttgaaaagcagagggaagagactcattcacagttgcccagctctcaccggaccaggtcttgtgtcctggcaaaagttctttccatatataaaccctcccactcaacccagttaaaatgtaatctttccgcacggtgggtcacgcctgtaatcccagcactttgggaggccaaaatgggcagatgacaaggtcgggagttcaagacaagcctggccaacatgatgaaacctcgtttctactaaaaatacaaaaattagctgggtgtggtggcgcacgcctgtaatcccagctattcaggacactgaggcaggagagtagcttgaacctgggaggcagaggttgcggtgagctgagatcgcaccatggcactccagcctgggtgacagagcgagactccatctcagaaagaaacaaaaacaaaaaaaaggcctggcgctgtggctcacgcctgtaatcccagcattttgggaggctgaggcaggcagatcacgaggtcaggagattgagaccattctggctaacatggtgaaaccccgtctctactaaaaatacaaaaaaattagcctggtgtggtggtgggcacctttagtcccagctactcaggaggctgaggcaggagaatggcgtgaacccaggaggcagagcttgcggtgagccgagatcgcaccactgcactccagtctgggcgacagagaaagactccatctcaaaaagaaaaaaaaaagtaatctttctcttacaattggaaaagcacttccagaattttcagtgtttgcagtcgccattgtgaggtttatcattgtactatatggaaaaaaatgctatgtttatttgtactctcctcgtctgccccataatggatacagtgctgagacaggatctctcactgtcactcaggctggagtgcagtggtgtgatcacagctcactgcactcaagctttcctcccacctcagcctcctgagtagctggggccacagatgtgtaccaccgtgcctggctaattatttttttgattttttgtagacatggtctcacttttttgttcaggctggtcttgaactcctcgcctcaagggatcctcctgcctccacatcccaaaatgctgagattacaggagtgagccacagtgcctgggccccaatttttttttaagatggggtctcactatattgcccaggctgatcttgagctcctgagctcaagtgatcctcccaccttggcctcccaaagtgctggcatgagccaccacatccagccccatgaaaatcttctgacttcacaactccttctcaaatgtcatgaacattttgagaattgttgtcaaattggagcaacctgtatcaaattcctgtcatatatggactataagatttcaggtaatttcttttcttttttttttttttgagacggagtctcgctctgtcgcccaggctggagtgcagtggcaggatctcggctcactgcaagctccgcctcccgggttcacgccattctcctgcctcagcctcccaagtagctgggactacaggcgcccgccactacgcccggctaattttttgtatttttagtagagacggggtttcaccattttagccgggatggtctcgatctcctgacctcatgatccacccgcctcggcctcccaaagtgctgggattacaggcgtgagccaccgcgcccggccaatttcttttcttttttctttttttttttgaggcagttttgctcttgttgcccaggctggagtgcagtggtgcaatcttggctcaccacaacctccgcctcctaggttcaagtgattctcctgcctcagcctcccgagtagctgggactacaggcatatgccaccatgcccggctaattttatatttttagtagagacggggtttcactatgttggccaggctggtctcgaactcctgacctcaggtgatccatctgccttggcctcccaaagtgctgggattacaggtgtgaaccactgtgccaggcctcggagaagggttattatttaaactagaaactaaatgtctcccaaagttagctcggttcgagccaggaatgattaagggcagtctgaagattaaatggaagatgagggttggttagatcagatctctttcactgtcattattttctcactgttacaatttttgcaaaggtggtttcagcaataaaaatatttcacaaattttacaaaagcaaaggaccatgaggacattgttggggaccctccctgaaccaaggaagagactgtgactcttccttggttcagggaaggtcctgaaccaaatcgagggtcggtaaagcttaagctccattatttccaaatttgtgtcacctctggtgacagcacaaggaagaaacacaaaacaagaacgcagcatagggagttggggctgggcattgcaattctcaataggatgttgagtggatggcatcagagcagacacctgaaggtgccatgcagataccgatggggaagggaatgggagtgggggtgccactgcattcgattctagacttggataacagtgagtgcaaaatcccagaggtggagcgtgcctcagtgggaaaagcaaggagggcggcgtgacaaagggacccagagagtcctggtcacacagcaaatcagtggcggagtagggactggaactcggatttccactaggtgttgtgtatgggcagatggctaaactaaggcctctccttgactcatacaccggtttttattggtttgctttataaccccatctctaccttgagggtttcccctggcctcgaacccggtgtactcaagagctgcccatgtcccaggcttcgcgacacagctggcctcatctttgcctgctccaactttaatgtccaaagttgggtggctcctgttctccattccctcttactgcatgggaccaaatctcaatttttttttttctttttttttttagacggagtcttgctctgtcgcccaggctggagtgcagtggcgcgatctcggctcactacagcctctgcctctcaggttccaccgattctcctgcttcagcctcctgagtagctgggattacaggcggacgctaccactcccggctaatttttgtatttttaatagagacggggtttcgccatttcggccaggctggtctcgaactcctgatctcagatcatccacccgcctcggcctcccaaagtgtagggattacaggcgtgagccatcgcgcccggccaaatctcaatttttatccccagtaagtttagtcttgtgaagtccgaacgtttgaataatttactcgctgcaggcaaaccgcctacaactaaatccatcaggcccccgtatccgaatcttccttcacgcgagaagccggccatcttttgtgtagcattctttctggttcctctaactttgcctctcctttacgccaaatacgtgtccttatatctgaatctacaccactattatagattcaccttctttgagaagtccctatttgaagagaggaaaattcaggctacttgtaaccctcttattctttttagacggagttttccctcttgttgcccaggctagagtgcaatggcgcgatctcggctcaccgcaacctccgcctcccgggttcaagcgactctcctgcctcagcctcccgagtagctggaattacaggcatgcgccaccactcccggctaattttgtatttttagtagagacggggtttctccatattggtcaggctggtctcaaacccccggcctcagcctcaggtgatccgcccgcctcggcctcccaaactggtggggttacaggtgtgagccacggaacgcggctcctcttccttctggatatggctgtctcagatggccagaggcctcggaaaggcttccggtttcccggcaggcccgagtggggctgaacttccggcctcaggacgcaggcgcgggccgctcatttcgctctttccggcggtgctcgcaagcgaggcagccatgtcttatcccgctgatgattatgagtctgaggtaaggtggccgtaagggcgcggtgggctccacgacggggtgatctctgggaccactggatgtgggtcccggcgcgaggcagcttccgggtcgcggccagctccggccgacctcccgcccggccctcaggctgctcccacagttcccggtccctagacaaccctggctctgcccgcccacttcgcgtgttcgattggcttgtccttcccctttctaagaccggagactaaggcctgttagacgtttctgtgtttctgcacctgagtttttttggtctaggctccgtctggtcaaatctcgctgattcccacagcctcttgtcctttgctccacctcattgcacccgtaatgttgtattgtcattgtctgtttactgtcccttttctctaaggcgtgtgagttcctcaaaggcaggcacagtgtcttattcgcctctgtatccttagctctctgcttggcatctagactctaggatgagcgttttgaattcacgacttggcggctgtccttgactgtgtctctttccttctaggcggcttatgacccctacgcttatcccagcgactatgatatgcacacaggtgagaccacgggttaggctggctgagtactcgtagggatcagttcctttggaatgtcttagaaccagctctgacaggcatcaaaaattgctctttgatggtccaggtttggagtcagtcattagctgccagtgcgaggggttttataaagcctaataaaccaggctttttatcatagtccacctcagtcttggaagagaaggattacttacctggctatggttttcttgtgtaaactattagccaaataagaaaagcttttttgtttttgtttttgtttttgtttttgagatggagtttccctctgtcccccaggctggagtgcagtggtgcgatctcggctcactgcaacctccgcgtccctcgttcaagcagtagttctcttgtctcagcctcctgagtagctgggattacaggcgcccaccaccattcccagctaatttttaaatttttttaatagagacgaggtttcgccgtgttgtccaggctggtcttgaactcctgacctcaggtgatccacccgccccaacctcccaaagtgctgggattacaggcgtgagccaccgcgcctgccccaaggaagaaaatcttgatgtgaaaaatttaagtaattcaaaccaagcccgaatgaaatctttttaggaggtgtctgaggtttcctgaaacgttatagtgacttgacttagtagtcagtgttatccattgttctaagtactttgtatgaaatattttgtttaatccttacagcagttctgtatgttaatgtctcctaaagaatagaaaatatagcagagaggtttattagtagtaacttggcacagtcatatatttaaaaggtgacagttattcattcaagaaatattaagtacctgttaccacttactttccaacagtcttgcctctctcccctccaacgcacacttttctaggccctgagggtatgtctgagtacaagacagacgagattcctgacttcctagacttgggagaagggtgcaaaacagataataagtgaaaaataactttaagtcatggtaatatttttgaagaaacagggacaacgagattgggagtgacttgagatgtttgtatctctgagtattcaaaagggaattttacgcagacctgagtttagtttctggggtggtcttgccatttcgttctatcatatatgtgggtttgagcatactctgtatttgttgtatccaacctccaggagatccaaagcaggaccttgcttatgaacgtcagtatgaacagcaaacctatcaggtgatccctgaggtgatcaaaaacttcatccagtatttccacaaaactgtctcagatttgattgaccagaaagtgtatgagctacaggccagtcgtgtctccagtgatgtcattgaccagaaggtgtatgagatccaggacatctatgagaacaggtatgggctactggctgaaagggcctctttctgggtgggactggcctggtaatatagttcctacaaatgaggtgagcactctgtaaacagtactttcgggggggttggggggtgggggtctttgtgagtccttgaggctagggacattttattttgttagactttattttatttatgcatttgtttattttttgaaacggagtgtcactctgtcgcccaggctggagtgcagtggcaagatctcggctcactgcaacctccgcctcctgggttcaagtgattctccagcctcagcttcccgagtagctgggactacaggcatgtgccaccatgcctagttaatttttttgtatttttagtagagacagaatttcaccatgttggccaggcgtgtgttgaacccctgacctcaagtgatccacccgcctcagcctcccaaagcactgggattacaggtgggagccaccatgcctggcctaatttttgtatttttagtagagacggggtttcatcatgttggccaggctggtcttgaacttctgacctcaagtgatgtacccccgttggcctcccagagtgctaggattacaagcgtgagccaccatgcccggcctgttggactttatatcctcagaaatttatacaaagcctaaaataatatcactattaacaattataataataatgattagcatttgtttttattaccaggatagatccatcaatgttcagtgtgttgtttgtgtttttactcatttacccttcacagtaagcccatgaagtagcagtttttctcattttacagatgaggaaacagcacagaaataagtcatgtagctagtttaatggatgtgctgagatttgaacctgcagtgtctggcaccaaagcctaatttctaaactgtgctatgcagcccttcagtacatatcagagcaagctgaactccgcaggttttgaggggctgccgttgtgtaatgagcgttagagataagataggtcagtcaaagctgggatagtcaggagtgacttcaccaaggaaatagaatttaagcaagtcagaaggatgagggagagaaaacaaatagccaaaggcctattgatcaatgaataggatctctgacatgtgttttctttttttgttgttttgaaagagctgattgtagttgaaaagcagaggaaacctcagacattgcatggttttaggcctcacccctgccactctcgtgagcctaagttctacttggtgtggactccaaggtccttcccgcccctgcaagccacccattaggttgagctgagagatcagccaatgggaacagagtcacttatgaccaagaagaattgatctgggggttagttagtgaggagagagaaagggagaaaaccttgttcggaggttgaacacctccagccgaagaaggtgcagcatcgaggtctttcaccactagcaaatggatccaagtcatgcggcaccaaaagaggttagcagctgaagggtgttgaagtgacacaacaccaaaacatgctaccaatgatgaatccgtatctgtacaggtctccagcagcctcagttcttgcctcctcaaaagaaagaattcgactgaggggtaaaatgctaccgatgatgagtccgtatctgtacaggtctacagcagcctcagttcttgcctcctcacaagaaagaattacactgagggctaaaatgctactgatgatgagtctgtatctgtacgggtcgacagcatcctcagttcttgactcctaacaagaaagaattcgactgaggggcacaaggcagaagaagagagggaggcaagtttgagagcaggagtgaaagtttattaaaaagctttagaacaggaatgaaagaaaggaaaggacagttggaagagggccaggtgggtgacctgaaaggcaagtgtgctgaactgtgttttctttattccccgggtcttttctgattagaagtatataaatcagcgcctacaaaaattagctggggcatggtggcagcatgcctatagtcccagctagttgggaggctgaggtgggaggatcacttgagcctgggaggttgaggctgcagtgagctgcacaatggagcgagaccctctctcaaaattaaaaaatggacctgatgttcaatagaaatgtagctagacattaattttaatttttcagccaagcgaagtggagatttatttaaaatattatttctatatgtaatcagtatttaaaaattaaggggatatttgcccttttttttctttatacttaaagtttcctaaatccagtgtgtatcagaaatacttgctttgtgtttagattttatagagtttatgactggaaaagtaattcaaatttgaaatttgaatcttcaaatagtagagtaattccaaatagacctaaaagttttccaatactgagttaagtgttggtttttaaacttaaatggcaactaactgaaatttaaaatttaactctttgcttatatagtagccacatgtagctagtggctattgcattgggcagtgcccgcagatacagatgacagttgaagccaagcatcttgtaagtctttctctaggagaatgtgagaagaaatgctggtgccttaagaagtatgtttctttagggatgggtgggcaggcaaagaaaggatctagtaaaggaggcagaaagaaaagtgaaaagtagatagtaaattggcaaagaaatgtcacaggaaccaaaaagtctgcagaagaaactgaggaagagagtatcaccaaatgttttagtgaggtccagatgagaaaaaaagccagttgaatttggtaacttggagggccttgataaccttagcaaggtcaatgtcagtagagtgatggaagcaacagccagagagcagtggggtgagaaaggggaattggtaagtatcggggacataaagggtcactgagtggctttgtgttttgtttctgtgttttttctgtttttgttttttgttttttgagacaggatttcgctcttgttgcccaggctagagtgcaatggcgcaatctcagctcatcgcaacctccgcctcctggctccaagcgattctcctgcctcagcttcccaagtagttgggattataggtgtgcaccaccatgcctggctaattttgtatttttagtggagacggggtttcaccgtgttggtcaggctggtctggaactcctaacctcaagtgatccacccgcctcagcctcccaaagtgttgagattacgggtgtgagccagcgcgcctggcctgtttcagtgtttcttttctgttctgtttctgtgtttctccccaacccccatcccgtagagacagggccttcctatattgtccaggcttgtcttgaattcctgggttcaagcgatacccctatcttgtcctcccaaagtgttgagattacaggcgtgagccatcatgcctggcctgttcagtgttttttaggggaacttgagcatgtttatatgttggactaaaagagccagagaagcaggaggggtggggcttgaggagattggaggaaagtattaatagctgctgagggcatcaggagaagaaaattaaacaacctgttgcaggtttgtcaagtagcagtgtttggattggataggcagcagtgtttaaattggatgctgtaggtctgttgtggccttggactgcagcagactgatttgcttctgtgtttagagacgtttggatgtgctccaggagatggaaacgctgtgttaaagaatggtggccaaaaaagtagttcttatagcagaaaacagcaagcagttaaatatggctatagttaatgatacagaggcaggagattatcctgaaaagcttgatgggtccctaactgatacaaaaacaatattttcttgtgttgagaaagattgaagtgtggagttgggttgaggacagttgtgggcttgaagggctttggcctcagctctgtttatttgacatcttcccctttctaagcctgggtcctcatctgtaaaatgttaggattggcattctccagtccttttggaattttagagatttttttcttgatttttagctggaccaagctgactgaaagattcttcaagaatacaccttggcccgaggctgaagccattgctccacaggttggcaatggtaggtgtgagctctttatatcttgtgcactgagtggaatccagtggctgagtcattagacaggaagctcaagagggtctgtgtctgttttgctcaccattttgtttccttggtgcttggtatgtagtaggtccttggcaaaataacttgtcgaaggctggatgatttaagagaggacagagatctctcatatatggtgaaatttagatctttgtactgacttgtttctatttccttctataatttgggggtcattacagtcactctggaataagctctctagcttcccacctttgactttcttagatgatgtcctttatatatgggtgaggtaggcaaatccaacttcattattttgcttgtggatattcagctaccctggcaccaatttatttatttatttattttattttattattattattttttttgagatggagtctcgttctgtctcccaggctgaagtacagtggcacaatcttggctcactgcaacctccgcctcccaggttcaagcgattctcctaggttcaagcaattctcctacctcagcctcccgcgtagctgggattacaggcgcccgccaccacgcccagctaatttttgtatttttagtagagacggggtttcaccgtgttggccaggctggtctcgaactgctgacgtcaggtgattcgcccacctcagcctcccaaagtgctaggattataggcatgagccaccgcacccagcctgcccagctaatttttaaaaattttttgtagataccgggtcacactttgttgacctggctgatcttgaactcctgacctcaagtgatcttcccagagtgctgagattacaggcatgcaccactgtgcccagccacattgtcttgattactatatttttgtagtaagttttgaaatggggaattgtaggccgggcgcagtggctcacgcctgtaatccaagcactttgggaggccgaggcgggtggatcacctgaggtcgggagttcgagaccagcctgattaacgtggagaaaccccatctctactaaaaatacaaaatcagccgggcatggtgacacatgcctgtaatcccagctacttgggaggtggaggcaggagaatcacttgaacccggaaggcagaggttgcggtgagccgagatcgcgccattgcactccagcctgggcaacaagagcgaaactccgcctcaaaaaaaaaaaaagaaagaaagaaattgggaattggtaagtcctccaactttgttctttttttttttttccccaagattgttttgactattctgggtctcttggatttgcttattgattttaggatggacttgtcaatttctgcaaagtagccagctgggattttgagaggaattgcctagaatctgaagatcactttggggagtattgccgtcttaacagtattaagtcctccaggccaggcgcggtggctcatgcctgtaatcccagcactttgggaggtgaaggtggacggatcacgaggtcaggagatcgagaccatcctggctaacacggtgaaaccccgtctctactaaaaatgcaaaaaagttatctgggcaggccggcatggtggcgggcacctgtagtcccagctactcgggaggctgagacaggagaatggcgtgaacccgggaggcagaacttgcagtgagctgagattgcgccactggactccagcctgggcgacagagcaagactgcgtcccaaaaaaaaaaaaaaaaaaaaaaaccaatattaagtcctccaatctatggacatgggatgtctttgatttatttaggtctttggttgcgttcaccagtgttttgtgttttcagtgtacaagtctctcatttgttttgttatagctaacgtttttttgaacacttaactccttttttttttccccctaagatggagtcacggagtcttgctgtcttgcccaggctggagtgcagtggcgcgatctctgctcgctgcaacctctgcctcctgggctcaagcaattctcctgcctcagcctcccgagtagctgggattacaggcacctggcggattttttgtatttttagtagagatggtgtttcaccatcttggccaggctgattttgaactcctgacctcaaatgatccacccgcctcagcctcccaaagtgctgggattacaggcatgagccactgcacctggcctgaacatttactctcaattgactaaacacagaatgagttcaaaactcattctgtggctgggtgtcgtagctcacggctgtaattctggtactttgggaagctgaggtgggaggatttcttgaggctgggagatttagactagcctgagcaacatagggagacccccttctctacaaaaaattttttaaaaaaattatccaggcatggtggcacatgcctgtagtcccacctactcgggaggctgaggtggaaggatcacttgagccctggaagtcgaggctgcagtgagccatgatcatatcactgcactccaaccttggcaacagagcgagaccctgtcttcaaacaaacaaacaacattctgaaattaatattttctttcttcctttttttttttttttttttttttttgacatgggggtctcactgtgttgcccatgctggagtgtagtgtgataatggctgactgcaacctgtgcctgctgggctcaagcgatcctcccaccttagcctgccgagtagctgggaccatgggtgcgcaccaccacgcttgtctaattactcttgtgtgctggtttttttatgcacttggatggcagaagtctctaaatggtgaaaggaaatagatctgaatgagatcttaatctcatcgacagagattgaggttgatggagtcaaatgagaagtggattttctcattgcatgtattcttggggcatatgcatagcaatttagatgttgtttagtcttcagaattacctttattcctccccaccaaagagctaaagctgccaggataccccagttttatggttagtgaagcacccttctgccatctctttcagatgctgtcttcctgattttatacaaagaattatactacaggcacatatatgccaaagtcagtgtaagtatttaagtgtcgcagttttttttttgtttttgtttttttaactctgtgctgtttttgtccctagaacacagtcatttgtttatattggttcagtgtctgggcatgattggcatgtttttgagttttaagaagcggtggaaggaacagtttaacccagaaagctgttcagacacactaacgctatataacctatgcattcttttaaatttctctgtccccacaattctcctggactgggcaatcacccatgcactggttataggctgccagcctcataggatatttccaggtacctgctgctgcttctgcttggggttctttttcccttcagagcattgagcctctgtttctctgagatgtacataacactgtcactgtatgccaagcacaatgctaggcacttagcacacatcttcacatatctaattctactatcaatcgtgcaaagttggtacccgaggtgccaagaggttaccttttctcaaatttatccagctagtaagtgacaaaactccttgaatctagaccagcttgttataacaccagtattctacacattatcccaactttgagcacttgctagattctgttcttcccgacttctaaattatagagtacgtgaagtttctttttttttttttttttttttgagagagagtgagtctcgctctgtcgcccaggctggagtacagtggcgcgatctcagctcactgcaggctccacctcccaggttcacgccattctcctgcctcagcctcctgagtagctgggattgcaggtgcctgccaccacacctggctaatttttttgtatttttagtagagacggggtttcactgtgttagccaggatggtctccatctcctgacctcgtgttccgcccgccttggcctcccaaagtgctgggatgacaggcgtgagccaccacgcccggcctagagtgcctaaagtttcttaaaatgccatctgtactatttaaggctgggcgcggtggctcacgcctataatcccagcactttgggaggctaagggcaggtcacctgaggtcaggaatttgagaccagcctggccaacatggagaaacctcgtctctattaaaaatatgaaactacaaaaataagctgggcgtggtggcgggtgcctgtaatcccagctacttggaaggctgaggcaggagaatcgcttgaacccgggaagcggaggttgcagtgagccgagatcgtaccactgcactccagcctgggtgacagagtgagactcttgtctcaaaaagaaaagaaaaatgccatctgtattatttatatacaccaatgacttaatctctatctttagcctcagttgccccactgaagtccagacttgtatattcagctgtcagcatctgcacttggctgtctgagtcatctgaagcttaacacatctaaaactgaattcttattttccctctaaactagtttttctcatggtaatcatctcaataaatgctaccgtttattaccaagttaattggactaaaagccttggcattattcttgacttttctctgacatgatatccagcaaatcctgttaagctctgtcttcaacatacttctttttgttgttttgttttattttgttttgtttttgagacggagtctcgctctgtcatccaggctggaatgcagtggcgccgtctcggctcactccaacctctgtctcctgggctcaagcaattctccaggctcaaacgattctccttcctcagcctcctgagtagctgggattacaggcatgcaccaccacgcctggctaatttttgtatttttagtagagacagggtttcgctatgttgcccaggctggtctcgaactcctgacctcaggtaatccgcccgcctcggcttcccaaagtgctaagattacaggcgtgagccactgtgcctggccttcagcatacttcttgaatcagccacttttcactgccacactgctgctcacctagttgaagtcattatcatctcttccctgaattactgcaggagctgcttacctggtgtcagtttccactcttggctgtttattctcaacataataaccagcatgatccttttgctacatagtttcatcaggtcacttccaatcctaccatgacttcccatcacacttactaattccaggttttagccctgtttcccttctcactcatttcctgaaactttccccctccctccctgggctcctggcaatattcgtggcacttcagagcacttatctcttgtacgttgtatttgtttatttaggggagggagtttcttaatctactggaaggttaactccaccggggtatgtgcttgtcttgttcaccaatataatccagtgcctagaataatgtctggtcataatggtgttaattgagcatgtgtgtgcttgcatgcatgtgtaagtgaaggaaattggcaccaagatctccacctaaggaggtcctagtttctcacagttactcacccctcttctccttgaggaccgcttgatatggctagaactcctgccttggccacaggagccactgtcagtagtggtaggtggaaaagttcttgctgccagagtaaggggccatgtttttccggcatcccagcgggatctctgactactttatctgatagaaagtaaagattcctggccaggcgctgtggcttacgcctgtaatcccagaactttgagaggctaaggcgggtggatcacgaggtcaggagttcgagaccagcctgaccaatatggtgaaaccccgtctctactaaaaatacaaaaattagccaggcgtggtggcgtgtgcctgtaatcccagctactcgggaggctgagacggaagaatcacttgaccccaggaggcagaggttgcagtgagctgagattgcaccgctgcactccagcctaggcaccagagcgagactccgtctcaaaaaaaaaaaaaagtaaagattccctactaccattgatgctaaagttcaggtactttgtggatatgctaagaatctagccattatgtgtacactgcttttttgggaacaccatgacaccatagcccatagtatagctggttttaccacctctaatctctctgtttggtctgtagatgaagattcagcagaagcttattgatgctgttatctttttattagctaccaggactcctacataaatgaccagttttaagcccttgggaagcagtttttcattgaatgtgcttagattgtgcttaatgtattaagcaccttacataacttttattaaacagagacggggtcttgccatgttgcccagcctgttctcaaactcctggcctcaggtgatcagcccacttcagcctcccagagtgttgagattacaggcgtgagccactgcgcccagctatataatcttacttcattgtgactagtcaacaatcttttgcccacattttacagagattaaataccttgtgagaaccccacagttaataagaggtgggactgactccaaagttgtgtttcttctccatcacaaatacattgctcatggtatggttccccagctcagaaactatcagtggttctcagatgcaagcaacataaagaccagaccaggggtcagccaccttctctgtggagggtcagataataagtattttagtctcgagggccatgatggtttctgtcagatctgttcagctatgtctttgtggcagttatcaacaatatgtaatgagtgggcatggctgtgttccagtaaaacttctttatttacaaaacaggtggcggaatagatttgcaggccccctgacctagatgcttgtttggcgttggaagactgcaacattcctggcccgtagtctagtgatgcccggtgcagcattatcttctcttaactccctagccttcaagtgccacgatttaacttcttcgcctttgctagtgtggtttttttctgaaacacttttccttctctctgctttgccagatcatcatccctgctctgagggtcatttaaggtctgttgctgtagaacctaaccacgtgttgcagtattcagtgcgtcagctgctataggactttctatcttccctctcacttgcatatttacatagtaagaaagagaggacagataccaattctcttgtatttgttcacagctgtcacagtataccatgggtaaaacacattaaaattaaatatctgtatcttgatatctcttgttttctttacaggggggaccttccttggagcagaggtttgaatcctattacaactactgcaatctcttcaactacattcttagtgagtctgagatttggccaagagggtgtgtgtggttatgatgaggttcagcattggcctccagcttttttttttttttttttaaattagcaggatcttaatgtgtaggtgggaagaggggaggtcttgtgattcatggtccttttaagagagaaattacaaagcattctgcagcctacagaatgggcagagtcattgctttgaatctgacttttctgtgatctcctgcacagatgccgatggtcctgctccccttgaactacccaaccagtggctctgggatattatcgatgagttcatctaccaggtatctggtcagcttcagcctaatttgaaataactggtccatgccaggaatagctgttactattgtttgtgtaaaaaagctgcagggtgtaaaaatatccccattgtagtgtaaaataccccatggcagtagactccagtttcagctggctttcggaagaggcagggaagcctaagcactccagataggaagctggaagtcggataagttcagctcctgaccttcatcaagctcttactagaccttgttaggtggtctggtggtaagaacacaggcttcacaggctttggagcgaggtggaagtggattctaacttgggtgctgccacctgctggtagctctgtaacagtgatgtgctatttaaactcagagcctcactttctttacccacacaatggaaatgttctattatctttttttttttaagagtcagggtcaggccgggcgcggtgactcacgcctgtaatcctagcactttgggaggcagaggcgggcagatcacgaggtcaggagatcaagaccatcctggctaacacggtgaaaccccgtctctactgaaagtacaaaaaattagccgggcgtggtggcaggcgcctgtagtcccagctactcagtaggctgaggcaggagaatggcgtgaacctaggaggcggagcttgcagtgagccaagatcgtgccactgcactccagcctggtaacagtgcaagactccatctcaaaaaaaaaaaagaaagagtcagggtctcactctgttgctcaggctagagtgcagtgataatagcttactgcagcctagaactcctgggttcaagtgattttcccacctcagccacctgagtagctgccactacaaggcccacaccaacttacgtggatatttatattactgtagagacgagggtcttgctgtgttgcccatgctggtgttgaactcctggcctcaagtgagcctcttgacttggcctcccaaagtgagccaccatgcctagccatctatatcttgattgtggtggtggttacttaagtgtatgctcgatcagaatacaatagaacattttcatcacaacaagaatatcacctacctcaggagttgctgttcaaggtcgaatgagaactgtgccaaatgcaaataaagtacagcagctgtgtagcctgggggtaaaagtccaggttttgctgttgctgtttactggctttttttttttttttggagatggagtctgactctgttacccaggctggagtgcagtggcattatcccggctcactgcaacctctgcctcccgggttcaagcgattctcttgtctcagcctccccagtagctgggattacaggtgcccaccaccacgcccagctaatttttgtatttttagtagagacggggtttctccatgttgaccaggctggtctcgaactcccaacttcaggtgatccgccctccttggcctcccaaagtgctgggattacaggtgtgagccaccgcgcctggcctactggcccattttaaaatggtaacatgttctgttgtgggcacattacttaaccacactgtgcattggtttccccatctctaaaacggattgctgcgaatgttgctgagatactacgtatagagtgtttagcatagtgcctgtcacagaataattaatacacgttgcctgttgattgtgatgatgttcaatgtcatcattattcttttccatcttatttagcccagtccttctatttaaaaatacagattgctcacaactgtaatcccagcatttttggggtccaaggcagtaggatcgcttcagtccaggagttcgagaaatagagactacaaaacataaaataggctgggcgtggtggctcacgcctgtaatcccaacactttgggaggcctaggtgggcagatcacgaggtctggagatggagaccatcctggccacaatggtgaaaccccatctctactaaaaaaaaaacagctgggcgtggtggtgtgcgcttgtaatcctagctactcgggaggctgaggcaggggaatcgctcgaacccgagaggcagagcttgcagtgagccaaaatcgtgccactgcactccagcctggcgacagagtgagactctgtctcaaaaaaaaaaccaaaaaaaataaaatatataatttgacaaaatataattcttttccccctttttgtgctgtctatagctctaactgattatttcaggataaattggtatcttaataaagatgttattagaactccgtgaaccagggagacgttgtgtatacaaagtgctgaaccgttacgagtggtgagctgagaaaccttcatagtgctccttgagaaggaggcttcctgctcaagattaggcttcagtgcctttcatagcaaaggccacaaaccgtactggccttgtttgccctctggctccttggcttgtgtcatccttttatttggaatatttatagatgaatagcagtctttttgacttagagcaagtgaagaaggatcatccgtgctgattttctttatccctcttaagataatcataattccctgggcttagccagtgttgttgttaaggggcttacggtgctttctaacaaagactgtccagtgagggtcagtaagtggctggtgtatttcgtcctggccaggtagatgccacatggggtaggtggctcttcctcgccaccctgttttatttatttgtttttgttttttcaaactacagatatagtgaaagtgcctgccttgcttgcttttgcagaggtatcaattactgtctggaaggaaaggcaccttgttgatgtttctcaggcacttacataaacatgactgtataaagagagatcacttcaaaaatggttacgtactctattgtgccatttactgtgacttgttaacacacttaaaccatattttcatagacctgacttgctcttttgctgcagtgtgcgtgatatggatataccatgcctctgatgatgaacctttgggttgtcagtttccacaattacaggcagtgaatcagtgaatatccatatatatgttgtacacaggcatatttttagggatcactacctagaagtagaattgtggattgaacgatacttgctttttaagtttttttaaatcagcttactgaggtatagtttatttttttaagtagagatgagccaccagctcgcgcctgttaatcccagctctttgggaagccaaggcgggtggatcacgaggtcaggagttcgagaccagcctgaccaacatggtgaaaccccgtctctactaaaaatacaaaaaaatcagccgggcgtggtggcaggtacctgtaatcccagctatttaggaggctgaggcaggagaatcgcttgaacctgggaggtggaggttgcagtgagctgagattgcgccactgcactccagcctgggtgacaaagcaagactctgtctcaaaaaaaacaaaaaacaaaaaacaggtgtgaaccaccatgcccagccatgaggtgtagtttaatatacaataaaatgtaccagaatcagtgtacagtggatgagattcaacaaatgtgtacagtgccacaatcaagataaaagaacgtttcaatcactttgaattataataaatagtaatatattgtcccaccaatgggctgtatcaaattgtgttactaccagcggtgtttgagagcaactgttggtttttttgtttctttgtttaagagatgggggtcttgcctttatggtccaggctggagtgcagtggtgtgatcatagctcattgcagccttgacctcctgggctcaagcaatccccccaccttagcctcctgagtagctcggactacaggtgcacccagctgatttttaatttgttgcagagatggggtcttgaaatcctgggataaagcaattctccctgctcagcctccaaaagtgctgggattacaggcgtgagccaccatgcctagccaagaccaactgttttctgtactggatattatcagtctgtctaatttttgtcagttcaatgggaaagaaattctggccgggcgcagtggctcacgcctgtaatcttagcactctgggaggccaaggcgggcagatcacttgaggccaggagttcgagaccagcctggccaacatggtgaaaccccgtctctactaaaaatacaaaaattacccagacttggtggtgcatgtctgtaatcccagctactcagcagctgagggatgagaatcacttgaaccgagaggcagaggttgcagtgagctgagatcacaccaccgcactccaccctgggcagtagagtgagattccgtctcaaaaaaaaaaaaaaaaaaatcagcgcggtggttcacacctgtaatcccagcactttgggaggccgaggcaggcggatcatgaggtcaagagattgagaccatcctggctaacacggtgaaaccccgtctctactaaaaatacaaaaaaatttgccaggcatggtggtgggcgcctgtagtcccagctactcaggaggctgaggcaggagaatggcgtgaacccaggaggcggagcttgcagagagccgagattgcaccactgcactccagcctcggagacagagcgagactccatctcaaaaaaaaaaaaaaaagaaaaagaaaaaaaaatcatacttttctgatttcccatattaattgtcaattttgttttctttgaagtgatcatcactattctttgcctgttttctatttgattgcttttttaattgcattacgagaattctttgtaggattttttttttttttttttttttgagacagagtctcgctctttcgcccaggctggagtgcagtggcatgatctctgctcactgcagtctccacctcctgtgttcaagcgattttcctgcctcagcttcccaagtatctggattacaggtgtgcaccaccacgccctgctaattttttttttttttttgcatttttagtagagacggggtttcaccatgttggccaggctggttttgaactcctgacctcaagggatccacccatctcggcctcccaaagtgcttggataacaggtgtaagcgccaccgcacccagcctgagaattctttatatattctggatattctttttttttcccccctaaggcggagtcttgctctgtcacctaggctggagtgcagtggcgtgatctcagctcactgcaacctctgcctcccaggttcaagggattctcctgcctcagcctcccgagtagctgggattacaggcatgtgccaccacacctggctatttttgttttggtgctttttttttttttttttttttttttgagacggagttttgctcttgttgcccaggctggagtgcaatggtgcgatcttggctcaccgcaacctctgcctcccaggttcaagcgattcacctgcctcagcctcccgagtagctgggattacaggcatgtatcactgtacctggctagttttgcattttttgtacagatggggtttctccatgttggtcaggctggtgtcaaactcccgacctcaggtaatccgcctgcatcggcctcccaaagtgctgggattacaggcatgagccaccgcacccggcctgtttttgtatttttagtagagatggggtttcaccatgttggccaagctgttctcgaactcttgatctcatgatccatccaccttggcttcccaaagtgctgggattataggcgtgagccaccgtgcctggcatattctttgtttttatattacaaaattagcattttgtcccacagtctagaagaagataattttttgtgttttgagacagagttttactctgtcactcacactggaatgcagtggcacaacctcacctcactgtagcctccgcctcctgggctcaggcaaagcccgtacctcagcctccttagtagcggagactgcaggtgcctgccaccattcctggctaattcgtttgtgttttttatagcgatagggttttgccatgtttcccaggctggtcttgagctcctggacccaagtgatctgcccacctcagtttcccaaagtgctgggtttacaggggtgagcctctgatctctgctggaagagttgaagaacagtcttagatcttctaagacctaggttttaggtctgtgatttccaaacctgatgcacaccagattcaaccagagaactttaaaaaattgagtaggtaggtctgttgtgttccatctgtgtgactgctggagccaggccaggagtgcttccaggttctacttctgtcccaaacagattcctgtggcatatcttctctgtgttcgttgtgcttggccagacgactctggttgagagtggtagagaggtgacatagtctgggaactgatggtcagctgtggtagggaaggctcacacgtgcagatacctattaccacatcactgcccataacccagggcgtaccacagtctagctgcatctgaatagatggtacaagagcccctgtggtgtttctggtggcccggtcaactgcattgtgaggcccagagacaggaagtgactttgggttgtgtttgactccagattggatgtttttaccacagactacctctaatcctagagatttttacttcactgtgtagtaagtaacattcagtaatgaacagaattcacagtttagtcaagatggctttgaaaaacagtgtacggaatggtttagaatgagaagtggtcatctcaccctcaccttgccccatccagagccagagcattgcctcgttttcagcattgtggacatggatgatcactttgggcttataccactactgcatgtttcttttcttcctcaacagtttcagtcattcagtcagtaccgctgtaagactgccaagaagtcagaggaggagattgactttcttcgttccaatcccaaaatctggaatgttcatagtgtcctcaatgtccttcattccctggtagacaaatccaacatcaaccgacagttggaggtatacacaagcggaggtgagtgcagcaggccgacagccgtggcctgcgaatttccagctgcttgccatctgttccaaatgaatagatcactgcaaggagagcagatgagtcaccatgtcttaggtggtggtctgttgactctttgtaggtgcttgagtacaaacagtagcagagtatttgtgctgggggctctggggcttgggagtccattggccaacagactgaaccagcacattgagatttgcgtttgtaaacacttctgtgtctccagtgcttttgtttagataagcacttctcacacgtgttggtgtcagagccactttaccctgttaaaatattgagaaccacaaaatgtatctattttaaaaaatttttttctttttttttcagtgaagagtggcatttttgcagatctctctgtctggctgagatagctggcttctcatttctgcttctgcattcaatctgttgcaatgtgttcttttgtttgaagcacataaagaaaatctggcccaggcactgtggctcacacctgtaatcccagcactttgggaggcttaggcagaaggatcgcttgagtccaggagtttgagaccagcctgggcaatatagtgagactttgtctcaaaaaaaatgtttaaattgactgagcatggtgggtggggtgcccctgtagtcccagctactcgggaggctgaggtgggaggattgcttgagcccaggaagcaaagattgcagtgaactgagatcacaccactgtactctagcctgggccacagagcgagaacttgtctgaaaaaaaaaaagaaggaaaatctggcttcacacggttataggaagtttttttgttgtttgtttttgagacagggtgtcgctgtgtcacccagtctggtcttggactcctgggctcaagcagtcctgccttggcctcccaaaagtgccaggattattggagaggattttctttgatactacaccatgtagtagtatgtatgggttgaatattcctgacttgaaaatttgaaatctgaaatgctccaaaatctgactttttgagcaccaacatgacgccgtaagtagaaaattctacacccaacctcatatgagcagttgcagtcagaacttcgtctcatgcacaaaagtatttaaaagattataataaagttactttcaggctgtgtgtataagacatatatgaaaaataaatgaattttatgtttagatttggatcctatccttaagatactcattagggccgggtgccatggctcacgcctattatcctggcattttgggaggctgaggcgggcagatcacctgaggtcag
